United States Patent Application Publication US 2007/0214517 A1 - sequence listing, part 74

SEQ ID NO: 96811 - DNA, 1191 bp, Arabidopsis thaliana
  misc_feature (1)..(1191): Ceres Seq. ID no. 12734794
  misc_feature: MA Experiment ID: 20000171 Result: Down-regulated in Transcription
  misc_feature: MA Experiment 20000171 PARAMETER Experiment Name: At_42deg_Heat_P Parameter: Age (day) Value: 14
  misc_feature: MA Experiment 20000171 PARAMETER Experiment Name: At_42deg_Heat_P Parameter: Organism Value: A. thaliana
  misc_feature: MA Experiment 20000171 PARAMETER Experiment Name: At_42deg_Heat_P Parameter: Plant Line Value: WS
  misc_feature: MA Experiment 20000171 PARAMETER Experiment Name: At_42deg_Heat_P Parameter: Temperature (deg C) Value: 42 vs. 22
  misc_feature: MA Experiment 20000171 PARAMETER Experiment Name: At_42deg_Heat_P Parameter: Timepoint (hr) Value: 1
  misc_feature: MA Experiment 20000171 PARAMETER Experiment Name: At_42deg_Heat_P Parameter: Tissue Value: Aerial
  misc_feature: MA Experiment ID: 20000184 Result: Down-regulated in Transcription
  misc_feature: MA Experiment 20000184 PARAMETER Experiment Name: At_Shoots__P Parameter: Age (day) Value: 7
  misc_feature: MA Experiment 20000184 PARAMETER Experiment Name: At_Shoots__P Parameter: Tissue Value: Shoots vs. Whole Plant
  misc_feature: MA Experiment ID: 20000185 Result: Down-regulated in Transcription
  misc_feature: MA Experiment 20000185 PARAMETER Experiment Name: At_Roots__P Parameter: Age (day) Value: 7 vs. 21
  misc_feature: MA Experiment 20000185 PARAMETER Experiment Name: At_Roots__P Parameter: Organism Value: A. thaliana
  misc_feature: MA Experiment 20000185 PARAMETER Experiment Name: At_Roots__P Parameter: Tissue Value: Roots vs. Whole Plant
  misc_feature: MA Experiment ID: 20000234 Result: Down-regulated in Transcription
  misc_feature: MA Experiment 20000234 PARAMETER Experiment Name: At_Siliques_P Parameter: Age (day) Value: 21
  misc_feature: MA Experiment 20000234 PARAMETER Experiment Name: At_Siliques_P Parameter: Organism Value: A. thaliana
  misc_feature: MA Experiment 20000234 PARAMETER Experiment Name: At_Siliques_P Parameter: Plant Line Value: WS
  misc_feature: MA Experiment 20000234 PARAMETER Experiment Name: At_Siliques_P Parameter: Tissue Value: Less Than 5mm Siliques vs. Whole Plant
  misc_feature: MA Experiment ID: 20000235 Result: Down-regulated in Transcription
  misc_feature: MA Experiment 20000235 PARAMETER Experiment Name: At_Siliques_P Parameter: Age (day) Value: 21
  misc_feature: MA Experiment 20000235 PARAMETER Experiment Name: At_Siliques_P Parameter: Organism Value: A. thaliana
  misc_feature: MA Experiment 20000235 PARAMETER Experiment Name: At_Siliques_P Parameter: Plant Line Value: WS
  misc_feature: MA Experiment 20000235 PARAMETER Experiment Name: At_Siliques_P Parameter: Tissue Value: 5-10mm Siliques vs. Whole Plant
  misc_feature: MA Experiment ID: 20000264 Result: Down-regulated in Transcription
  misc_feature: MA Experiment 20000264 PARAMETER Experiment Name: At_Open_Flower_P Parameter: Age (day) Value: 21
  misc_feature: MA Experiment 20000264 PARAMETER Experiment Name: At_Open_Flower_P Parameter: Plant Line Value: WS
  misc_feature: MA Experiment 20000264 PARAMETER Experiment Name: At_Open_Flower_P Parameter: Tissue Value: Open Flower vs. Whole Plant
  misc_feature: MA Experiment ID: 20000265 Result: Down-regulated in Transcription
  misc_feature: MA Experiment 20000265 PARAMETER Experiment Name: At_Open_Flower_P Parameter: Age (day) Value: 21
  misc_feature: MA Experiment 20000265 PARAMETER Experiment Name: At_Open_Flower_P Parameter: Plant Line Value: WS
  misc_feature: MA Experiment 20000265 PARAMETER Experiment Name: At_Open_Flower_P Parameter: Tissue Value: Closed Flower vs. Whole Plant
  misc_feature: MA Experiment ID: 20000267 Result: Up-regulated in Transcription
  misc_feature: MA Experiment 20000267 PARAMETER Experiment Name: At_Drought_P Parameter: Age (day) Value: 7
  misc_feature: MA Experiment 20000267 PARAMETER Experiment Name: At_Drought_P Parameter: Organism Value: A. thaliana
  misc_feature: MA Experiment 20000267 PARAMETER Experiment Name: At_Drought_P Parameter: Plant Line Value: WS
  misc_feature: MA Experiment 20000267 PARAMETER Experiment Name: At_Drought_P Parameter: Timepoint (hr) Value: 6
  misc_feature: MA Experiment 20000267 PARAMETER Experiment Name: At_Drought_P Parameter: Tissue Value: Whole Plant
  misc_feature: MA Experiment 20000267 PARAMETER Experiment Name: At_Drought_P Parameter: Treatment Value: Drought vs. No Drought
  misc_feature: MA Experiment ID: 20000286 Result: Down-regulated in Transcription
  misc_feature: MA Experiment 20000286 PARAMETER Experiment Name: At_Open_Flower_P Parameter: Age (day) Value: 21
  misc_feature: MA Experiment 20000286 PARAMETER Experiment Name: At_Open_Flower_P Parameter: Plant Line Value: WS
  misc_feature: MA Experiment 20000286 PARAMETER Experiment Name: At_Open_Flower_P Parameter: Tissue Value: Half Open vs. Whole Plant
  misc_feature: MA Experiment ID: 20000437 Result: Up-regulated in Transcription
  misc_feature: MA Experiment 20000437 PARAMETER Experiment Name: At_Drought_P Parameter: Age (day) Value: 8
  misc_feature: MA Experiment 20000437 PARAMETER Experiment Name: At_Drought_P Parameter: Organism Value: A. thaliana
  misc_feature: MA Experiment 20000437 PARAMETER Experiment Name: At_Drought_P Parameter: Plant Line Value: WS
  misc_feature: MA Experiment 20000437 PARAMETER Experiment Name: At_Drought_P Parameter: Timepoint (hr) Value: 24
  misc_feature: MA Experiment 20000437 PARAMETER Experiment Name: At_Drought_P Parameter: Tissue Value: Whole Plant
  misc_feature: MA Experiment 20000437 PARAMETER Experiment Name: At_Drought_P Parameter: Treatment Value: Drought vs. No Drought
  misc_feature: MA Experiment ID: 20000438 Result: Down-regulated in Transcription
  misc_feature: MA Experiment 20000438 PARAMETER Experiment Name: At_Shoots__P Parameter: Age (day) Value: 14
  misc_feature: MA Experiment 20000438 PARAMETER Experiment Name: At_Shoots__P Parameter: Tissue Value: Shoots vs. Whole Plant
  misc_feature: MA Experiment ID: 20000439 Result: Down-regulated in Transcription
  misc_feature: MA Experiment 20000439 PARAMETER Experiment Name: At_Roots__P Parameter: Age (day) Value: 14 vs. 21
  misc_feature: MA Experiment 20000439 PARAMETER Experiment Name: At_Roots__P Parameter: Organism Value: A. thaliana
  misc_feature: MA Experiment 20000439 PARAMETER Experiment Name: At_Roots__P Parameter: Tissue Value: Roots vs. Whole Plant
  misc_feature: MA Experiment ID: 20000452 Result: Up-regulated in Transcription
  misc_feature: MA Experiment 20000452 PARAMETER Experiment Name: At_CS6879_Shoots-Roots_P Parameter: Age (day) Value: 14
  misc_feature: MA Experiment 20000452 PARAMETER Experiment Name: At_CS6879_Shoots-Roots_P Parameter: Organism Value: A. thaliana
  misc_feature: MA Experiment 20000452 PARAMETER Experiment Name: At_CS6879_Shoots-Roots_P Parameter: Plant Line Value: CS6879 vs. WS
  misc_feature: MA Experiment 20000452 PARAMETER Experiment Name: At_CS6879_Shoots-Roots_P Parameter: Tissue Value: Shoots
  misc_feature: MA Experiment ID: 20000456 Result: Down-regulated in Transcription
  misc_feature: MA Experiment 20000456 PARAMETER Experiment Name: At_100uM_BA_P Parameter: Age (day) Value: 14
  misc_feature: MA Experiment 20000456 PARAMETER Experiment Name: At_100uM_BA_P Parameter: Organism Value: A. thaliana
  misc_feature: MA Experiment 20000456 PARAMETER Experiment Name: At_100uM_BA_P Parameter: Plant Line Value: WS
  misc_feature: MA Experiment 20000456 PARAMETER Experiment Name: At_100uM_BA_P Parameter: Timepoint (hr) Value: 6
  misc_feature: MA Experiment 20000456 PARAMETER Experiment Name: At_100uM_BA_P Parameter: Tissue Value: Aerial
  misc_feature: MA Experiment 20000456 PARAMETER Experiment Name: At_100uM_BA_P Parameter: Treatment Value: 100uM BA vs. No Treatment
  misc_feature: MA Experiment ID: 20000460 Result: Up-regulated in Transcription
  misc_feature: MA Experiment 20000460 PARAMETER Experiment Name: At_10percent_PEG_P Parameter: Age (day) Value: 12
  misc_feature: MA Experiment 20000460 PARAMETER Experiment Name: At_10percent_PEG_P Parameter: Organism Value: A. thaliana
  misc_feature: MA Experiment 20000460 PARAMETER Experiment Name: At_10percent_PEG_P Parameter: Plant Line Value: WS
  misc_feature: MA Experiment 20000460 PARAMETER Experiment Name: At_10percent_PEG_P Parameter: Timepoint (day) Value: 12
  misc_feature: MA Experiment 20000460 PARAMETER Experiment Name: At_10percent_PEG_P Parameter: Tissue Value: Whole Plant
  misc_feature: MA Experiment 20000460 PARAMETER Experiment Name: At_10percent_PEG_P Parameter: Treatment Value: 10percent PEG vs. No Treatment
  misc_feature: MA Experiment ID: 20000495 Result: Down-regulated in Transcription
  misc_feature: MA Experiment 20000495 PARAMETER Experiment Name: At_Guard_Cells_P Parameter: Harvest Date Value: 8/2/2002
  misc_feature: MA Experiment 20000495 PARAMETER Experiment Name: At_Guard_Cells_P Parameter: Organism Value: A. thaliana
  misc_feature: MA Experiment 20000495 PARAMETER Experiment Name: At_Guard_Cells_P Parameter: Tissue Value: Guard Cells vs. Leaves
  misc_feature: MA Experiment ID: 20000496 Result: Down-regulated in Transcription
  misc_feature: MA Experiment 20000496 PARAMETER Experiment Name: At_Guard_Cells_P Parameter: Harvest Date Value: 7/19/2002
  misc_feature: MA Experiment 20000496 PARAMETER Experiment Name: At_Guard_Cells_P Parameter: Organism Value: Canola
  misc_feature: MA Experiment 20000496 PARAMETER Experiment Name: At_Guard_Cells_P Parameter: Tissue Value: Guard Cells vs. Leaves
  misc_feature: MA Experiment ID: 20000506 Result: Down-regulated in Transcription
  misc_feature: MA Experiment 20000506 PARAMETER Experiment Name: At_Wounding_P Parameter: Organism Value: A. thaliana
  misc_feature: MA Experiment 20000506 PARAMETER Experiment Name: At_Wounding_P Parameter: Plant Line Value: WS
  misc_feature: MA Experiment 20000506 PARAMETER Experiment Name: At_Wounding_P Parameter: Timepoint (hr) Value: 6
  misc_feature: MA Experiment 20000506 PARAMETER Experiment Name: At_Wounding_P Parameter: Tissue Value: Aerial
  misc_feature: MA Experiment 20000506 PARAMETER Experiment Name: At_Wounding_P Parameter: Treatment Value: Wounding vs. No Wounding
  misc_feature: MA Experiment ID: 20000527 Result: Up-regulated in Transcription
  misc_feature: MA Experiment 20000527 PARAMETER Experiment Name: At_10percent_PEG_P Parameter: Age (day) Value: 20
  misc_feature: MA Experiment 20000527 PARAMETER Experiment Name: At_10percent_PEG_P Parameter: Organism Value: A. thaliana
  misc_feature: MA Experiment 20000527 PARAMETER Experiment Name: At_10percent_PEG_P Parameter: Plant Line Value: WS
  misc_feature: MA Experiment 20000527 PARAMETER Experiment Name: At_10percent_PEG_P Parameter: Timepoint (day) Value: 20
  misc_feature: MA Experiment 20000527 PARAMETER Experiment Name: At_10percent_PEG_P Parameter: Tissue Value: Whole Plant
  misc_feature: MA Experiment 20000527 PARAMETER Experiment Name: At_10percent_PEG_P Parameter: Treatment Value: 10percent PEG vs. No Treatment
  misc_feature: MA Experiment ID: 20000573 Result: Down-regulated in Transcription
  misc_feature: MA Experiment 20000573 PARAMETER Experiment Name: At_100uM_ABA_Mutants__P Parameter: Organism Value: A. thaliana
  misc_feature: MA Experiment 20000573 PARAMETER Experiment Name: At_100uM_ABA_Mutants__P Parameter: Plant Line Value: CS22 vs. Ler wt
  misc_feature: MA Experiment 20000573 PARAMETER Experiment Name: At_100uM_ABA_Mutants__P Parameter: Timepoint (hr) Value: N/A
  misc_feature: MA Experiment 20000573 PARAMETER Experiment Name: At_100uM_ABA_Mutants__P Parameter: Tissue Value: Whole Plant
  misc_feature: MA Experiment 20000573 PARAMETER Experiment Name: At_100uM_ABA_Mutants__P Parameter: Treatment Value: None
  misc_feature: MA Experiment ID: 20000574 Result: Down-regulated in Transcription
  misc_feature: MA Experiment 20000574 PARAMETER Experiment Name: At_100uM_ABA_Mutants__P Parameter: Organism Value: A. thaliana
  misc_feature: MA Experiment 20000574 PARAMETER Experiment Name: At_100uM_ABA_Mutants__P Parameter: Plant Line Value: CS23 vs. Ler wt
  misc_feature: MA Experiment 20000574 PARAMETER Experiment Name: At_100uM_ABA_Mutants__P Parameter: Timepoint (hr) Value: N/A
  misc_feature: MA Experiment 20000574 PARAMETER Experiment Name: At_100uM_ABA_Mutants__P Parameter: Tissue Value: Whole Plant
  misc_feature: MA Experiment 20000574 PARAMETER Experiment Name: At_100uM_ABA_Mutants__P Parameter: Treatment Value: None
  misc_feature: MA Experiment ID: 20001451 Result: Down-regulated in Transcription
  misc_feature: MA Experiment 20001451 PARAMETER Experiment Name: At_Far-red-induction_P Parameter: Age (day) Value: 7
  misc_feature: MA Experiment 20001451 PARAMETER Experiment Name: At_Far-red-induction_P Parameter: Light Value: Far-red vs. White
  misc_feature: MA Experiment 20001451 PARAMETER Experiment Name: At_Far-red-induction_P Parameter: Organism Value: A. thaliana
  misc_feature: MA Experiment 20001451 PARAMETER Experiment Name: At_Far-red-induction_P Parameter: Plant Line Value: Columbia
  misc_feature: MA Experiment 20001451 PARAMETER Experiment Name: At_Far-red-induction_P Parameter: Timepoint (hr) Value: 24
  misc_feature: MA Experiment 20001451 PARAMETER Experiment Name: At_Far-red-induction_P Parameter: Tissue Value: Whole Plant
  misc_feature: MA Experiment ID: 20001557 Result: Up-regulated in Transcription
  misc_feature: MA Experiment 20001557 PARAMETER Experiment Name: At_Drought_Soil_Dry_P Parameter: Age (day) Value: 27
  misc_feature: MA Experiment 20001557 PARAMETER Experiment Name: At_Drought_Soil_Dry_P Parameter: Organism Value: A. thaliana
  misc_feature: MA Experiment 20001557 PARAMETER Experiment Name: At_Drought_Soil_Dry_P Parameter: Plant Line Value: WS
  misc_feature: MA Experiment 20001557 PARAMETER Experiment Name: At_Drought_Soil_Dry_P Parameter: Post Timepoint (hr) Value: 3
  misc_feature: MA Experiment 20001557 PARAMETER Experiment Name: At_Drought_Soil_Dry_P Parameter: Post-Treatment Value: Re-Water vs. No Drought
  misc_feature: MA Experiment 20001557 PARAMETER Experiment Name: At_Drought_Soil_Dry_P Parameter: Timepoint (day) Value: 13
  misc_feature: MA Experiment 20001557 PARAMETER Experiment Name: At_Drought_Soil_Dry_P Parameter: Treatment Value: Drought vs. No Drought
  misc_feature: MA Experiment ID: 20001905 Result: Up-regulated in Transcription
  misc_feature: MA Experiment 20001905 PARAMETER Experiment Name: At_Drought_Reproduction_P Parameter: Age (day) Value: 40
  misc_feature: MA Experiment 20001905 PARAMETER Experiment Name: At_Drought_Reproduction_P Parameter: Organism Value: A. thaliana
  misc_feature: MA Experiment 20001905 PARAMETER Experiment Name: At_Drought_Reproduction_P Parameter: Plant Line Value: WS
  misc_feature: MA Experiment 20001905 PARAMETER Experiment Name: At_Drought_Reproduction_P Parameter: Timepoint (day) Value: 10
  misc_feature: MA Experiment 20001905 PARAMETER Experiment Name: At_Drought_Reproduction_P Parameter: Tissue Value: Rosettes
  misc_feature: MA Experiment 20001905 PARAMETER Experiment Name: At_Drought_Reproduction_P Parameter: Treatment Value: Drought vs. No Drought
atgtcttgctccgtcgccgtatgtaattctccggtgttttcaccgtcgtcttctctattctgcaacaaatcttcgattctctcgtcaccgcaagaatctctttctctaacgctttctcatcgcaaacctcagacctcttctccttcctctccatccaccaccgtttcttctcctaaatctccatttcgtctccgtttccagaaacctccgtccggattcgctcctggtccattatcttttggatctgaatctgtttctgcatcctctcctccgggaggtgttttaaagaggaaacgacctacaaggcttgatataccgattggtgttgctggatttgtagctccgatttcttcatcggccgctgtggctgcgacgccgagagaggagtgtagagaggttgagagagaaggtgatggttattctgtttattgtaagagaggaagaagagaagctatggaggatcgtttctctgctatcaccaatcttcatggagatcgtaaacaggcgattttcggagtctatgatggtcatggaggagttaaagcggctgagtttgcagctaagaacttagataagaacattgtagaagaagtagttggtaagagagacgagtctgagatagctgaagcggtgaaacatggttacttggcaacagacgcgtcgtttcttaaggaggaagacgttaagggtggttcatgctgtgtcacggctctggttaacgaagggaaccttgttgtgtctaacgccggtgactgtcgtgctgttatgagtgtaggaggtgtagctaaggctttatcttctgatcaccgcccgtctagagacgatgaacggaaaagaattgaaaccacgggaggatatgttgatacgtttcacggtgtttggagaatccagggatctttagctgtgtcaagaggaattggagatgctcaacttaagaaatgggttatagctgaaccagagacaaagatttcgagaatcgagcatgaccatgagtttttgatcttggcatctgatggtttatgggataaagtgagtaaccaagaagcagtagacattgctcgtcctctctgcttaggaaccgagaagccattgttgttagctgcctgtaagaagcttgtcgatttatctgcttcacgaggctcgtctgatgatatcagtgtgatgttgatccctttacgccagttcatatag

SEQ ID NO: 96812 - protein, 396 aa, Arabidopsis thaliana
  peptide (1)..(396): Ceres Seq. ID no. 12734795
  misc_feature (138)..(385): Pfam Name: Protein phosphatase 2C Pfam Description: Protein phosphatase 2C
  misc_feature (1)..(396): Homolog of NCBI NO: 15227687 NR Description: protein phosphatase 2C (PP2C); protein id: supported by cDNA: gi_13877670 [Arabidopsis thaliana]
  misc_feature (28)..(392): Homolog of NCBI NO: 15222312 NR Description: protein phosphatase 2C (PP2C); protein id: supported by cDNA: gi_20258779 [Arabidopsis thaliana]
  misc_feature (28)..(283): Homolog of NCBI NO: 25352225 NR Description: hypothetical protein [imported] - Arabidopsis >gi|8954030|gb|AAF82204.1|AC067971_12 Contains similarity to phosphatase 2C from Arabidopsis thaliana gb|AF085279. It contains
  misc_feature (284)..(392): Homolog of NCBI NO: 25352225 NR Description: hypothetical protein [imported] - Arabidopsis >gi|8954030|gb|AAF82204.1|AC067971_12 Contains similarity to phosphatase 2C from Arabidopsis thaliana gb|AF085279. It contains
  misc_feature (1)..(396): Homolog of NCBI NO: 7488754 NR Description: protein phosphatase 2C - alfalfa
  misc_feature (1)..(395): Homolog of NCBI NO: 30013681 NR Description: Avr9/Cf-9 rapidly elicited protein 284 [Nicotiana
  misc_feature (20)..(396): Homolog of NCBI NO: 15225656 NR Description: protein phosphatase 2C (PP2C); protein id: [Arabidopsis thaliana] >gi|25352216|pir||C84826 protein
  misc_feature (219)..(396): Homolog of NCBI NO: 15236450 NR Description: protein phosphatase 2C (PP2C), putative; protein At4g08260.1 [Arabidopsis thaliana] >gi|7486866|pir||T10553
  misc_feature (152)..(199): Homolog of NCBI NO: 15236450 NR Description: protein phosphatase 2C (PP2C), putative; protein At4g08260.1 [Arabidopsis thaliana] >gi|7486866|pir||T10553
  misc_feature (219)..(393): Homolog of NCBI NO: 9294079 NR Description: serine/threonine phosphatase type 2c-like protein
MSCSVAVCNSPVFSPSSSLFCNKSSILSSPQESLSLTLSHRKPQTSSPSSPSTTVSSPKSPFRLRFQKPPSGFAPGPLSFGSESVSASSPPGGVLKRKRPTRLDIPIGVAGFVAPISSSAAVAATPREECREVEREGDGYSVYCKRGRREAMEDRFSAITNLHGDRKQAIFGVYDGHGGVKAAEFAAKNLDKNIVEEVVGKRDESEIAEAVKHGYLATDASFLKEEDVKGGSCCVTALVNEGNLVVSNAGDCRAVMSVGGVAKALSSDHRPSRDDERKRIETTGGYVDTFHGVWRIQGSLAVSRGIGDAQLKKWVIAEPETKISRIEHDHEFLILASDGLWDKVSNQEAVDIARPLCLGTEKPLLLAACKKLVDLSASRGSSDDISVMLIPLRQFI

SEQ ID NO: 96813 - protein, 245 aa, Arabidopsis thaliana
  peptide (1)..(245): Ceres Seq. ID no. 12734796
  misc_feature (1)..(234): Pfam Name: Protein phosphatase 2C Pfam Description: Protein phosphatase 2C
  misc_feature (1)..(245): Homolog of NCBI NO: 15227687 NR Description: protein phosphatase 2C (PP2C); protein id: supported by cDNA: gi_13877670 [Arabidopsis thaliana]
  misc_feature (1)..(241): Homolog of NCBI NO: 15222312 NR Description: protein phosphatase 2C (PP2C); protein id: supported by cDNA: gi_20258779 [Arabidopsis thaliana]
  misc_feature (1)..(132): Homolog of NCBI NO: 25352225 NR Description: hypothetical protein [imported] - Arabidopsis >gi|8954030|gb|AAF82204.1|AC067971_12 Contains similarity to phosphatase 2C from Arabidopsis thaliana gb|AF085279. It contains
  misc_feature (133)..(241): Homolog of NCBI NO: 25352225 NR Description: hypothetical protein [imported] - Arabidopsis >gi|8954030|gb|AAF82204.1|AC067971_12 Contains similarity to phosphatase 2C from Arabidopsis thaliana gb|AF085279. It contains
  misc_feature (1)..(245): Homolog of NCBI NO: 7488754 NR Description: protein phosphatase 2C - alfalfa
  misc_feature (1)..(244): Homolog of NCBI NO: 30013681 NR Description: Avr9/Cf-9 rapidly elicited protein 284 [Nicotiana
  misc_feature (1)..(245): Homolog of NCBI NO: 15225656 NR Description: protein phosphatase 2C (PP2C); protein id: [Arabidopsis thaliana] >gi|25352216|pir||C84826 protein
  misc_feature (68)..(245): Homolog of NCBI NO: 15236450 NR Description: protein phosphatase 2C (PP2C), putative; protein At4g08260.1 [Arabidopsis thaliana] >gi|7486866|pir||T10553
  misc_feature (1)..(48): Homolog of NCBI NO: 15236450 NR Description: protein phosphatase 2C (PP2C), putative; protein At4g08260.1 [Arabidopsis thaliana] >gi|7486866|pir||T10553
  misc_feature (68)..(242): Homolog of NCBI NO: 9294079 NR Description: serine/threonine phosphatase type 2c-like protein
MEDRFSAITNLHGDRKQAIFGVYDGHGGVKAAEFAAKNLDKNIVEEVVGKRDESEIAEAVKHGYLATDASFLKEEDVKGGSCCVTALVNEGNLVVSNAGDCRAVMSVGGVAKALSSDHRPSRDDERKRIETTGGYVDTFHGVWRIQGSLAVSRGIGDAQLKKWVIAEPETKISRIEHDHEFLILASDGLWDKVSNQEAVDIARPLCLGTEKPLLLAACKKLVDLSASRGSSDDISVMLIPLRQFI

SEQ ID NO: 96814 - DNA, 1284 bp, Arabidopsis thaliana
  misc_feature (1)..(1284): Ceres Seq. ID no. 12734807
  misc_feature: MA Experiment ID: 20001451 Result: Down-regulated in Transcription
  misc_feature: MA Experiment 20001451 PARAMETER Experiment Name: At_Far-red-induction_P Parameter: Age (day) Value: 7
  misc_feature: MA Experiment 20001451 PARAMETER Experiment Name: At_Far-red-induction_P Parameter: Light Value: Far-red vs. White
  misc_feature: MA Experiment 20001451 PARAMETER Experiment Name: At_Far-red-induction_P Parameter: Organism Value: A. thaliana
  misc_feature: MA Experiment 20001451 PARAMETER Experiment Name: At_Far-red-induction_P Parameter: Plant Line Value: Columbia
  misc_feature: MA Experiment 20001451 PARAMETER Experiment Name: At_Far-red-induction_P Parameter: Timepoint (hr) Value: 24
  misc_feature: MA Experiment 20001451 PARAMETER Experiment Name: At_Far-red-induction_P Parameter: Tissue Value: Whole Plant
agggaagtactttcacaaaccggagaagattatcggagatcgcaaactatggccggacgagatcgttatattccatcatcagcagtttcaacttcatcatcttcaagattattagaatctcaattaatcgaatccgatcgaaatcgagctcgatctgtaatcctcgaggatcgaatcgcaatccaacaccgtgaaatccaatctcttctcaacgacaatcaacgattagctgtagcacacatcggactcaaagaccagctcaatgtagctaagcgtgagctcgaacggttacttgaaaccgctgttaaagttaaagcggaaggagaagctaaagtgcgtgaggtttatcagaatgcgttgagaatggaggcggaggctcgtgtgattgatggacttggagctgagcttggtcaggttaggtctgatgtacagaggttaggtagtgatagacaggagttagctacggaattggctatgtttgatgatgagatggctaaggctaaaccgaattcggatcgagctattgaggttaaattggagattgagattcttcgaggagagattcgtaaaggaaggtgaaaatttgaattctctttgttgtttttgttggaacattggatttgttatcttgtagtgtatactcatatgatggttttttggatgcttatggagtagtaatgaatttgtttgaggtttgggatatgaaacagggctgctcttgagctggagaagaagacacgagctagtaaccttcaccatgagcgcggtatggagaagactatcgatcatttgaatcgagagattgtaaaacttgaggaagaattggttgatctggagactaaagctagagaagcaaatgcagctgctgaggcagctccaaccccaagtcctggattggctgcaagttatggaaacaacaccgatgatatatatggaggtcaaggccggcaatacccggaggctaatggtactcatgaggtacacatgagtctatagataagtagtaactttacgtgatcatctgttagaagttctcctaatttagcattattatggagaaggagaagattggactaattgtttgtaatgattggcataccaagttctgattgtcttacattctgaactgatatcttagcaaaatagctagttctcagggaaaaaagttatgttcataggttagtaagtgtccaacttgtacaagtatccgttggttagtgagaattgttgtaaactcataattgactgaattcaacgcttatgataagattgcggttttacttt

SEQ ID NO: 96815 - protein, 192 aa, Arabidopsis thaliana
  peptide (1)..(192): Ceres Seq. ID no. 12734808
  misc_feature (17)..(192): Homolog of NCBI NO: 7487478 NR Description: hypothetical protein At2g30120 [imported] -
  misc_feature (17)..(192): Homolog of NCBI NO: 18402266 NR Description: expressed protein; protein id: At2g30120.1, by cDNA: gi_16323181 [Arabidopsis thaliana] At2g30120/T27E13.14 [Arabidopsis thaliana]
  misc_feature (55)..(192): Homolog of NCBI NO: 28876008 NR Description: hypothetical protein [Oryza sativa (japonica
  misc_feature (54)..(192): Homolog of NCBI NO: 9294396 NR Description: gb|AAD10662.1~gene_id:MIE1.26~similar to unknown
  misc_feature (54)..(192): Homolog of NCBI NO: 18400511 NR Description: expressed protein; protein id: At3g14750.1, by cDNA: gi_14334819, supported by cDNA: gi_15293200 [Arabidopsis >gi|14334820|gb|AAK59588.1| unknown protein [Arabidopsis
  misc_feature (55)..(187): Homolog of NCBI NO: 33146484 NR Description: myosin-like protein [Oryza sativa (japonica
  misc_feature (28)..(192): Homolog of NCBI NO: 15240385 NR Description: putative protein; protein id: At5g61920.1 thaliana] >gi|9758391|dbj|BAB08878.1|
  misc_feature (46)..(192): Homolog of NCBI NO: 38605778 NR Description: OSJNBa0044K18.21 [Oryza sativa (japonica
  misc_feature (54)..(192): Homolog of NCBI NO: 25404669 NR Description: hypothetical protein F5A8.8 [imported] - thaliana >gi|4204281|gb|AAD10662.1| Hypothetical protein
  misc_feature (54)..(192): Homolog of NCBI NO: 30697468 NR Description: expressed protein [Arabidopsis thaliana]
REVLSQTGEDYRRSQTMAGRDRYIPSSAVSTSSSSRLLESQLIESDRNRARSVILEDRIAIQHREIQSLLNDNQRLAVAHIGLKDQLNVAKRELERLLETAVKVKAEGEAKVREVYQNALRMEAEARVIDGLGAELGQVRSDVQRLGSDRQELATELAMFDDEMAKAKPNSDRAIEVKLEIEILRGEIRKGR

SEQ ID NO: 96816 - protein, 176 aa, Arabidopsis thaliana
  peptide (1)..(176): Ceres Seq. ID no. 12734809
  misc_feature (1)..(176): Homolog of NCBI NO: 7487478 NR Description: hypothetical protein At2g30120 [imported] -
  misc_feature (1)..(176): Homolog of NCBI NO: 18402266 NR Description: expressed protein; protein id: At2g30120.1, by cDNA: gi_16323181 [Arabidopsis thaliana] At2g30120/T27E13.14 [Arabidopsis thaliana]
  misc_feature (39)..(176): Homolog of NCBI NO: 28876008 NR Description: hypothetical protein [Oryza sativa (japonica
  misc_feature (38)..(176): Homolog of NCBI NO: 9294396 NR Description: gb|AAD10662.1~gene_id:MIE1.26~similar to unknown
  misc_feature (38)..(176): Homolog of NCBI NO: 18400511 NR Description: expressed protein; protein id: At3g14750.1, by cDNA: gi_14334819, supported by cDNA: gi_15293200 [Arabidopsis >gi|14334820|gb|AAK59588.1| unknown protein [Arabidopsis
  misc_feature (39)..(171): Homolog of NCBI NO: 33146484 NR Description: myosin-like protein [Oryza sativa (japonica
  misc_feature (12)..(176): Homolog of NCBI NO: 15240385 NR Description: putative protein; protein id: At5g61920.1 thaliana] >gi|9758391|dbj|BAB08878.1|
  misc_feature (30)..(176): Homolog of NCBI NO: 38605778 NR Description: OSJNBa0044K18.21 [Oryza sativa (japonica
  misc_feature (38)..(176): Homolog of NCBI NO: 25404669 NR Description: hypothetical protein F5A8.8 [imported] - thaliana >gi|4204281|gb|AAD10662.1| Hypothetical protein
  misc_feature (38)..(176): Homolog of NCBI NO: 30697468 NR Description: expressed protein [Arabidopsis thaliana]
MAGRDRYIPSSAVSTSSSSRLLESQLIESDRNRARSVILEDRIAIQHREIQSLLNDNQRLAVAHIGLKDQLNVAKRELERLLETAVKVKAEGEAKVREVYQNALRMEAEARVIDGLGAELGQVRSDVQRLGSDRQELATELAMFDDEMAKAKPNSDRAIEVKLEIEILRGEIRKGR

SEQ ID NO: 96817 - DNA, 1077 bp, Arabidopsis thaliana
  misc_feature (1)..(1077): Ceres Seq. ID no. 12734814
  misc_feature: MA Experiment ID: 20000355 Result: Down-regulated in Transcription
  misc_feature: MA Experiment 20000355 PARAMETER Experiment Name: At_Siliques_Sub_P Parameter: Age (day) Value: 21
  misc_feature: MA Experiment 20000355 PARAMETER Experiment Name: At_Siliques_Sub_P Parameter: Organism Value: A. thaliana
  misc_feature: MA Experiment 20000355 PARAMETER Experiment Name: At_Siliques_Sub_P Parameter: Plant Line Value: WS
  misc_feature: MA Experiment 20000355 PARAMETER Experiment Name: At_Siliques_Sub_P Parameter: Tissue Value: Less Than 5mm Siliques vs. Whole Plant
  misc_feature: MA Experiment ID: 20000440 Result: Down-regulated in Transcription
  misc_feature: MA Experiment 20000440 PARAMETER Experiment Name: At_Closed-Flower__Sub_P Parameter: Tissue Value: Closed Flower vs. Whole Plant
atgtatatatctaaaaccatagtgtttggtctctttgttgcaacactcctcgtgtcttgcaatgcggatgcaaacaccacgcagccgcttttcccggcgattctaatattcggcgactcaacggcagacacaggcaataacaactactactcacaagccgtcttcaaggctaatcacctcccttatggcgttgatcttcccggccacgaagctaacggaagattctcaaacggaaagctaatctctgacgtaatctccacaaaactcaacatcaaagagtttgttcctccgtttctacaaccgaacatctccgaccaagacattgtcactggagtctgttttgcatccgcgggtgctggctacgatgacgagacctcactatctagcaaagctattccggtctcacaacagccaagcatgttcaagaattatattgctcgtctcaaaggtatcgtaggagacaagaaagcgatggagattattaacaacgctttagtggtcataagcgcagggcctaatgatttcatcttgaacttttacgatatccccataaggcgtctcgagtatcctactatctatggctaccaagattttgttctcaagaggcttgacggttttgtccgggagctttatagtttaggttgccggaatattctagtcggagggttgccgccaatgggatgtttaccgatccaattgaccgcgaaattgagaaccattttgggaatttgtgtggaacaagaaaacaaagactccattttgtacaatcagaagcttgtaaagaaattgcctgagatccaagcgtctctacccggaagcaagttcctttacgctaacgtctacgaccctgtgatggacatgatccgaaaccctagcaaatacggattcaaggagacgaagaaaggatgttgcggaacaggatacttggaaacaagcttcttgtgcacttccttgtcaaagacttgtccgaatcattcggatcacttgttttgggactccattcatccctccgaggcagcttacaaatacctagggaacttcatagatgctcagattcaagagtggcttaagacttaa

SEQ ID NO: 96818 - protein, 358 aa, Arabidopsis thaliana
  peptide (1)..(358): Ceres Seq. ID no. 12734815
  misc_feature (34)..(348): Pfam Name: GDSL-like Lipase/Acylhydrolase Pfam Description: GDSL-like Lipase/Acylhydrolase
  misc_feature (1)..(358): Homolog of NCBI NO: 15227723 NR Description: putative GDSL-motif lipase hydrolase; protein id:
  misc_feature (1)..(357): Homolog of NCBI NO: 15227734 NR Description: putative GDSL-motif lipase/hydrolase; protein id:
  misc_feature (1)..(357): Homolog of NCBI NO: 15217963 NR Description: proline-rich protein, putative; protein id:
  misc_feature (1)..(357): Homolog of NCBI NO: 25336283 NR Description: hypothetical protein RXF26 [imported] -
  misc_feature (1)..(357): Homolog of NCBI NO: 21592974 NR Description: proline-rich protein, putative [Arabidopsis
  misc_feature (1)..(353): Homolog of NCBI NO: 15225096 NR Description: putative GDSL-motif lipase/hydrolase; protein id:
  misc_feature (1)..(353): Homolog of NCBI NO: 21537117 NR Description: putative GDSL-motif lipase/hydrolase [Arabidopsis
  misc_feature (1)..(299): Homolog of NCBI NO: 15224162 NR Description: putative GDSL-motif lipase/hydrolase; protein id:
  misc_feature (150)..(353): Homolog of NCBI NO: 25336273 NR Description: probable GDSL-motif lipase/hydrolase [imported] -
  misc_feature (1)..(144): Homolog of NCBI NO: 25336273 NR Description: probable GDSL-motif lipase/hydrolase [imported] -
MYISKTIVFGLFVATLLVSCNADANTTQPLFPAILIFGDSTADTGNNNYYSQAVFKANHLPYGVDLPGHEANGRFSNGKLISDVISTKLNIKEFVPPFLQPNISDQDIVTGVCFASAGAGYDDETSLSSKAIPVSQQPSMFKNYIARLKGIVGDKKAMEIINNALVVISAGPNDFILNFYDIPIRRLEYPTIYGYQDFVLKRLDGFVRELYSLGCRNILVGGLPPMGCLPIQLTAKLRTILGICVEQENKDSILYNQKLVKKLPEIQASLPGSKFLYANVYDPVMDMIRNPSKYGFKETKKGCCGTGYLETSFLCTSLSKTCPNHSDHLFWDSIHPSEAAYKYLGNFIDAQIQEWLKT

SEQ ID NO: 96819 - protein, 219 aa, Arabidopsis thaliana
  peptide (1)..(219): Ceres Seq. ID no. 12734816
  misc_feature (1)..(209): Pfam Name: GDSL-like Lipase/Acylhydrolase Pfam Description: GDSL-like Lipase/Acylhydrolase
  misc_feature (1)..(219): Homolog of NCBI NO: 15227723 NR Description: putative GDSL-motif lipase hydrolase; protein id:
  misc_feature (1)..(218): Homolog of NCBI NO: 15227734 NR Description: putative GDSL-motif lipase/hydrolase; protein id:
  misc_feature (1)..(218): Homolog of NCBI NO: 15217963 NR Description: proline-rich protein, putative; protein id:
  misc_feature (1)..(218): Homolog of NCBI NO: 25336283 NR Description: hypothetical protein RXF26 [imported] -
  misc_feature (1)..(218): Homolog of NCBI NO: 21592974 NR Description: proline-rich protein, putative [Arabidopsis
  misc_feature (1)..(214): Homolog of NCBI NO: 15225096 NR Description: putative GDSL-motif lipase/hydrolase; protein id:
  misc_feature (1)..(214): Homolog of NCBI NO: 21537117 NR Description: putative GDSL-motif lipase/hydrolase [Arabidopsis
  misc_feature (1)..(160): Homolog of NCBI NO: 15224162 NR Description: putative GDSL-motif lipase/hydrolase; protein id:
  misc_feature (11)..(214): Homolog of NCBI NO: 25336273 NR Description: probable GDSL-motif lipase/hydrolase [imported] -
  misc_feature (1)..(202): Homolog of NCBI NO: 18390708 NR Description: expressed protein; protein id: At1g06990.1,
MFKNYIARLKGIVGDKKAMEIINNALVVISAGPNDFILNFYDIPIRRLEYPTIYGYQDFVLKRLDGFVRELYSLGCRNILVGGLPPMGCLPIQLTAKLRTILGICVEQENKDSILYNQKLVKKLPEIQASLPGSKFLYANVYDPVMDMIRNPSKYGFKETKKGCCGTGYLETSFLCTSLSKTCPNHSDHLFWDSIHPSEAAYKYLGNFIDAQIQEWLKT

SEQ ID NO: 96820 - protein, 201 aa, Arabidopsis thaliana
  peptide (1)..(201): Ceres Seq. ID no. 12734817
  misc_feature (1)..(191): Pfam Name: GDSL-like Lipase/Acylhydrolase Pfam Description: GDSL-like Lipase/Acylhydrolase
  misc_feature (1)..(201): Homolog of NCBI NO: 15227723 NR Description: putative GDSL-motif lipase hydrolase; protein id:
  misc_feature (1)..(200): Homolog of NCBI NO: 15227734 NR Description: putative GDSL-motif lipase/hydrolase; protein id:
  misc_feature (1)..(200): Homolog of NCBI NO: 15217963 NR Description: proline-rich protein, putative; protein id:
  misc_feature (1)..(200): Homolog of NCBI NO: 25336283 NR Description: hypothetical protein RXF26 [imported] -
  misc_feature (1)..(200): Homolog of NCBI NO: 21592974 NR Description: proline-rich protein, putative [Arabidopsis
  misc_feature (1)..(196): Homolog of NCBI NO: 15225096 NR Description: putative GDSL-motif lipase/hydrolase; protein id:
  misc_feature (1)..(196): Homolog of NCBI NO: 21537117 NR Description: putative GDSL-motif lipase/hydrolase [Arabidopsis
  misc_feature (1)..(142): Homolog of NCBI NO: 15224162 NR Description: putative GDSL-motif lipase/hydrolase; protein id:
  misc_feature (1)..(196): Homolog of NCBI NO: 25336273 NR Description: probable GDSL-motif lipase/hydrolase [imported] -
  misc_feature (1)..(184): Homolog of NCBI NO: 18390708 NR Description: expressed protein; protein id: At1g06990.1,
MEIINNALVVISAGPNDFILNFYDIPIRRLEYPTIYGYQDFVLKRLDGFVRELYSLGCRNILVGGLPPMGCLPIQLTAKLRTILGICVEQENKDSILYNQKLVKKLPEIQASLPGSKFLYANVYDPVMDMIRNPSKYGFKETKKGCCGTGYLETSFLCTSLSKTCPNHSDHLFWDSIHPSEAAYKYLGNFIDAQIQEWLKT

SEQ ID NO: 96821 - DNA, 1503 bp, Arabidopsis thaliana
  misc_feature (1)..(1503): Ceres Seq. ID no. 12734824
  misc_feature: MA Experiment ID: 20000235 Result: Up-regulated in Transcription
  misc_feature: MA Experiment 20000235 PARAMETER Experiment Name: At_Siliques_P Parameter: Age (day) Value: 21
  misc_feature: MA Experiment 20000235 PARAMETER Experiment Name: At_Siliques_P Parameter: Organism Value: A. thaliana
  misc_feature: MA Experiment 20000235 PARAMETER Experiment Name: At_Siliques_P Parameter: Plant Line Value: WS
  misc_feature: MA Experiment 20000235 PARAMETER Experiment Name: At_Siliques_P Parameter: Tissue Value: 5-10mm Siliques vs. Whole Plant
atgtctcggaagattctcccgtggttgagtctagtcgctattctctggcttcaatctttcaatggcaccaacttgagtttcccagcttactcttcacagcttaaagagcttctcaaaatctcccagtttaagctaaattatctttctttcgcctccgacgctggaaaagtcctaggttttatctccggtatcgccgccgtttatcttcctctccctcttgtccttctcgccggaggttcattagggttcgccggctacggtctccagtatctctccatcatcaagaagattatctgttggatcaacacagcttgttacatcgtcgcaatcaatagttttccggtgaaccgtcaagtcgccgtggggatcacggcaagttatcaaggtttgagtgggaaaatctacaccgacatggtccactctttttttcacacgtctcaacgtgaagaagcttcgggttatctcttgctcaactctcttgttccattggtcgcttgtctcgtgacggctcctatgttgatgagacacggaggagacaaaacgatgtcgtattctaaggatgttaaagttggttttatcgttttgttcgtcttgactattgctacggggatttatgcggtggctacgagtcttgtctcggttcctgcggttttagtacttgtaggcattgctctgtttcttcttgctcctcttgctataccaattggagttggatttaaagagcttatgtcctctagaaaaactcaacaaaaggtgcacgatcttgaagctcctgtcgataaattttatttcgtagaagaagatcacacgaaagaagaagaagagtttgagaaggcaataattggagttaaagaagaggtcgagtggacacaactatggaagaaactcgatttttggatatactttggactctatttgttcggtccaacggtcgggctagtgtttacgaacaatcttggtcagatcgctgagtctcgtggctccaccgccaccagttccttggtcgctctctcgtcgtcgttcgggtttttcggccgcttgttaccatcattactcgactacttcttttctaggaacaaatacatgccatcaagtccggtttctatggcgggttcactggtagcaatggtagcttcgtttctcctcctccttattgactccgacattgctctctacatcggcacggcgatgattggcatcttctccggagccttgacttcactctctgtcacaatgacggcagagctttttgggacgaagcattttggagttaaccacaacattgttgtcggaagtattccccttggatctttttctttcggtttgttagccgctaaaatttaccgcgacggagctgctctttacggagatgatggcaagtgttttgggatgcattgctttcaaaccactttggtattttggggaatgctttgttcgatcgccgcacttctcgccgccgttttgtatatacgcaaccgcaagttctattcgcagaagccgtag

SEQ ID NO: 96822 - protein, 500 aa, Arabidopsis thaliana
  peptide (1)..(500): Ceres Seq. ID no. 12734825
  misc_feature (277)..(436): Pfam Name: Sugar (and other) transporter Pfam Description: Sugar (and other) transporter
  misc_feature (1)..(500): Homolog of NCBI NO: 15227733 NR Description: hypothetical protein; protein id: At2g30300.1
  misc_feature (17)..(500): Homolog of NCBI NO: 34907888 NR Description: P0031D02.33 [Oryza sativa (japonica
  misc_feature (38)..(496): Homolog of NCBI NO: 15222361 NR Description: hypothetical protein; protein id: At1g31470.1
  misc_feature (2)..(282): Homolog of NCBI NO: 15236224 NR Description: putative protein; protein id: At4g34950.1
  misc_feature (266)..(498): Homolog of NCBI NO: 15236224 NR Description: putative protein; protein id: At4g34950.1
  misc_feature (23)..(496): Homolog of NCBI NO: 15232155 NR Description: hypothetical protein; protein id: At3g01630.1 thaliana] >gi|6016721|gb|AAF01547.1|AC009325_17 hypothetical
  misc_feature (23)..(496): Homolog of NCBI NO: 28393720 NR Description: unknown protein [Arabidopsis thaliana]
  misc_feature (8)..(251): Homolog of NCBI NO: 34907888 NR Description: P0031D02.33 [Oryza sativa (japonica
  misc_feature (100)..(498): Homolog of NCBI NO: 15227274 NR Description: nodulin-like protein; protein id: At2g16660.1, by cDNA: gi_17979282, supported by cDNA: gi_20465249 [Arabidopsis
  misc_feature (295)..(496): Homolog of NCBI NO: 38345150 NR Description: OSJNBa0014K14.4 [Oryza sativa (japonica
MSRKILPWLSLVAILWLQSFNGTNLSFPAYSSQLKELLKISQFKLNYLSFASDAGKVLGFISGIAAVYLPLPLVLLAGGSLGFAGYGLQYLSIIKKIICWINTACYIVAINSFPVNRQVAVGITASYQGLSGKIYTDMVHSFFHTSQREEASGYLLLNSLVPLVACLVTAPMLMRHGGDKTMSYSKDVKVGFIVLFVLTIATGIYAVATSLVSVPAVLVLVGIALFLLAPLAIPIGVGFKELMSSRKTQQKVHDLEAPVDKFYFVEEDHTKEEEEFEKAIIGVKEEVEWTQLWKKLDFWIYFGLYLFGPTVGLVFTNNLGQIAESRGSTATSSLVALSSSFGFFGRLLPSLLDYFFSRNKYMPSSPVSMAGSLVAMVASFLLLLIDSDIALYIGTAMIGIFSGALTSLSVTMTAELFGTKHFGVNHNIVVGSIPLGSFSFGLLAAKIYRDGAALYGDDGKCFGMHCFQTTLVFWGMLCSIAALLAAVLYIRNRKFYSQKP

SEQ ID NO: 96823 - protein, 363 aa, Arabidopsis thaliana
  peptide (1)..(363): Ceres Seq. ID no. 12734826
  misc_feature (140)..(299): Pfam Name: Sugar (and other) transporter Pfam Description: Sugar (and other) transporter
  misc_feature (1)..(363): Homolog of NCBI NO: 15227733 NR Description: hypothetical protein; protein id: At2g30300.1
  misc_feature (1)..(363): Homolog of NCBI NO: 34907888 NR Description: P0031D02.33 [Oryza sativa (japonica
  misc_feature (1)..(359): Homolog of NCBI NO: 15222361 NR Description: hypothetical protein; protein id: At1g31470.1
  misc_feature (1)..(145): Homolog of NCBI NO: 15236224 NR Description: putative protein; protein id: At4g34950.1
  misc_feature (129)..(361): Homolog of NCBI NO: 15236224 NR Description: putative protein; protein id: At4g34950.1
  misc_feature (1)..(359): Homolog of NCBI NO: 15232155 NR Description: hypothetical protein; protein id: At3g01630.1 thaliana] >gi|6016721|gb|AAF01547.1|AC009325_17 hypothetical
  misc_feature (1)..(359): Homolog of NCBI NO: 28393720 NR Description: unknown protein [Arabidopsis thaliana]
  misc_feature (1)..(114): Homolog of NCBI NO: 34907888 NR Description: P0031D02.33 [Oryza sativa (japonica
  misc_feature (1)..(361): Homolog of NCBI NO: 15227274 NR Description: nodulin-like protein; protein id: At2g16660.1, by cDNA: gi_17979282, supported by cDNA: gi_20465249 [Arabidopsis
  misc_feature (158)..(359): Homolog of NCBI NO: 38345150 NR Description: OSJNBa0014K14.4 [Oryza sativa (japonica
MVHSFFHTSQREEASGYLLLNSLVPLVACLVTAPMLMRHGGDKTMSYSKDVKVGFIVLFVLTIATGIYAVATSLVSVPAVLVLVGIALFLLAPLAIPIGVGFKELMSSRKTQQKVHDLEAPVDKFYFVEEDHTKEEEEFEKAIIGVKEEVEWTQLWKKLDFWIYFGLYLFGPTVGLVFTNNLGQIAESRGSTATSSLVALSSSFGFFGRLLPSLLDYFFSRNKYMPSSPVSMAGSLVAMVASFLLLLIDSDIALYIGTAMIGIFSGALTSLSVTMTAELFGTKHFGVNHNIVVGSIPLGSFSFGLLAAKIYRDGAALYGDDGKCFGMHCFQTTLVFWGMLCSIAALLAAVLYIRNRKFYSQKP

SEQ ID NO: 96824 - protein, 329 aa, Arabidopsis thaliana
  peptide (1)..(329): Ceres Seq. ID no. 12734827
  misc_feature (106)..(265): Pfam Name: Sugar (and other) transporter Pfam Description: Sugar (and other) transporter
  misc_feature (1)..(329): Homolog of NCBI NO: 15227733 NR Description: hypothetical protein; protein id: At2g30300.1
  misc_feature (1)..(329): Homolog of NCBI NO: 34907888 NR Description: P0031D02.33 [Oryza sativa (japonica
  misc_feature (1)..(325): Homolog of NCBI NO: 15222361 NR Description: hypothetical protein; protein id: At1g31470.1
  misc_feature (1)..(111): Homolog of NCBI NO: 15236224 NR Description: putative protein; protein id: At4g34950.1
  misc_feature (95)..(327): Homolog of NCBI NO: 15236224 NR Description: putative protein; protein id: At4g34950.1
  misc_feature (1)..(325): Homolog of NCBI NO: 15232155 NR Description: hypothetical protein; protein id: At3g01630.1 thaliana] >gi|6016721|gb|AAF01547.1|AC009325_17 hypothetical
  misc_feature (1)..(325): Homolog of NCBI NO: 28393720 NR Description: unknown protein [Arabidopsis thaliana]
  misc_feature (1)..(80): Homolog of NCBI NO: 34907888 NR Description: P0031D02.33 [Oryza sativa (japonica
  misc_feature (1)..(327): Homolog of NCBI NO: 15227274 NR Description: nodulin-like protein; protein id: At2g16660.1, by cDNA: gi_17979282, supported by cDNA: gi_20465249 [Arabidopsis
  misc_feature (124)..(325): Homolog of NCBI NO: 38345150 NR Description: OSJNBa0014K14.4 [Oryza sativa (japonica
MLMRHGGDKTMSYSKDVKVGFIVLFVLTIATGIYAVATSLVSVPAVLVLVGIALFLLAPLAIPIGVGFKELMSSRKTQQKVHDLEAPVDKFYFVEEDHTKEEEEFEKAIIGVKEEVEWTQLWKKLDFWIYFGLYLFGPTVGLVFTNNLGQIAESRGSTATSSLVALSSSFGFFGRLLPSLLDYFFSRNKYMPSSPVSMAGSLVAMVASFLLLLIDSDIALYIGTAMIGIFSGALTSLSVTMTAELFGTKHFGVNHNIVVGSIPLGSFSFGLLAAKIYRDGAALYGDDGKCFGMHCFQTTLVFWGMLCSIAALLAAVLYIRNRKFYSQKP

SEQ ID NO: 96825 - DNA, 911 bp, Arabidopsis thaliana
  misc_feature (1)..(911): Ceres Seq. ID no. 12734828
  misc_feature: MA Experiment ID: 20000184 Result: Up-regulated in Transcription
  misc_feature: MA Experiment 20000184 PARAMETER Experiment Name: At_Shoots__P Parameter: Age (day) Value: 7
  misc_feature: MA Experiment 20000184 PARAMETER Experiment Name: At_Shoots__P Parameter: Tissue Value: Shoots vs. Whole Plant
  misc_feature: MA Experiment ID: 20001451 Result: Up-regulated in Transcription
  misc_feature: MA Experiment 20001451 PARAMETER Experiment Name: At_Far-red-induction_P Parameter: Age (day) Value: 7
  misc_feature: MA Experiment 20001451 PARAMETER Experiment Name: At_Far-red-induction_P Parameter: Light Value: Far-red vs. White
  misc_feature: MA Experiment 20001451 PARAMETER Experiment Name: At_Far-red-induction_P Parameter: Organism Value: A. thaliana
  misc_feature: MA Experiment 20001451 PARAMETER Experiment Name: At_Far-red-induction_P Parameter: Plant Line Value: Columbia
  misc_feature: MA Experiment 20001451 PARAMETER Experiment Name: At_Far-red-induction_P Parameter: Timepoint (hr) Value: 24
  misc_feature: MA Experiment 20001451 PARAMETER Experiment Name: At_Far-red-induction_P Parameter: Tissue Value: Whole Plant
tccattgatactctaaaataaacttataaatagcatgcgtgaatgtcccgagaaagggaaggatttggagagtactacgagaccgtcaagaagataaagaaagatccagccttcgagacaacgacggatcatgccgtgatgggaatcaggagacatgtggcggtgcctccggggacaacgttgaacaccgtaacaccatgcgccgcttgtaagctcctccgccgtcgttgtgcggaggagtgtcctttctcgccttacttctcgccgcatgaacctcacaagttcgctgccgttcataaagtctttggtgcaagcaacgtctccaagatgcttctggaagtgggagagagccaaagaggagacgcagcaaatagtttagtatacgaagcaaacctaagacttagagatccaatctacggttgcatgggagcaatctcagctcttcaacaccacattcagtctcttcaatccgaactcacgaccgtccgtacggaaatcctacgccacaaataccaagaagccaccaccatcacttctctccaaaacaacttcaacagcactacaacaacttcatcagtgagttgtgatcagcatgctctcgcctcggcgattctcctcccaccaccaccgccaccacctcctactccacgaccaccaaggttgttgtcctctcagccagctccaccgcctacgccacccgtttctttgccatctccgtccatggttgtgtcgtcctcttcatcttctaattcatctgccaccaattctatgtataatcctcctccatcttcgacggctggatatagcaattctctgtccagtgataataatgttcattactttgattaaatcagaattctgtgttccttaatttttttaaaatactattatagcccttattataagctacg

SEQ ID NO: 96826 - protein, 268 aa, Arabidopsis thaliana
  peptide (1)..(268): Ceres Seq. ID no. 12734829
  misc_feature (52)..(152): Pfam Name: Protein of unknown function DUF260 Pfam Description: Protein of unknown function DUF260
  misc_feature (1)..(268): Homolog of NCBI NO: 30684548 NR Description: lateral organ boundaries (LOB) domain protein 13 [Arabidopsis thaliana] >gi|29427981|sp|Q9AT61|LB13_ARATH LOB protein 13 >gi|17227158|gb|AAL38033.1|AF447888_1 LOB DOMAIN 13
  misc_feature (1)..(268): Homolog of NCBI NO: 25408064 NR Description: hypothetical protein At2g30340 [imported] -
  misc_feature (96)..(268): Homolog of NCBI NO: 13569544 NR Description: unknown [Arabidopsis thaliana]
  misc_feature (1)..(217): Homolog of NCBI NO: 18405401 NR Description: expressed protein; protein id: At2g40470.1, by cDNA: 97343., supported by cDNA: gi_17227159 [Arabidopsis >gi|29427824|sp|Q8L5T5|LB15_ARATH LOB domain protein 15 DOMAIN 15
  misc_feature (1)..(217): Homolog of NCBI NO: 21618113 NR Description: LOB DOMAIN 13 [Arabidopsis thaliana]
  misc_feature (13)..(239): Homolog of NCBI NO: 34907878 NR Description: P0031D02.27 [Oryza sativa (japonica
  misc_feature (51)..(165): Homolog of NCBI NO: 18402268 NR Description: expressed protein; protein id: At2g30130.1, by cDNA: 29970. [Arabidopsis thaliana]
  misc_feature (51)..(165): Homolog of NCBI NO: 21592574 NR Description: unknown [Arabidopsis thaliana]
  misc_feature (51)..(161): Homolog of NCBI NO: 15221679 NR Description: hypothetical protein; protein id: At1g31320.1
  misc_feature (48)..(158): Homolog of NCBI NO: 15218746 NR Description: unknown protein; protein id: At1g65620.1, by cDNA: gi_17227155, supported by cDNA: gi_19918970 [Arabidopsis >gi|29427552|sp|O04479|LBD6_ARATH LOB domain protein 6
MSREREGFGEYYETVKKIKKDPAFETTTDHAVMGIRRHVAVPPGTTLNTVTPCAACKLLRRRCAEECPFSPYFSPHEPHKFAAVHKVFGASNVSKMLLEVGESQRGDAANSLVYEANLRLRDPIYGCMGAISALQHHIQSLQSELTTVRTEILRHKYQEATTITSLQNNFNSTTTTSSVSCDQHALASAILLPPPPPPPPTPRPPRLLSSQPAPPPTPPVSLPSPSMVVSSSSSSNSSATNSMYNPPPSSTAGYSNSLSSDNNVHYFD

SEQ ID NO: 96827 - protein, 236 aa, Arabidopsis thaliana
  peptide (1)..(236): Ceres Seq. ID no. 12734830
  misc_feature (20)..(120): Pfam Name: Protein of unknown function DUF260 Pfam Description: Protein of unknown function DUF260
  misc_feature (1)..(236): Homolog of NCBI NO: 30684548 NR Description: lateral organ boundaries (LOB) domain protein 13 [Arabidopsis thaliana] >gi|29427981|sp|Q9AT61|LB13_ARATH LOB protein 13 >gi|17227158|gb|AAL38033.1|AF447888_1 LOB DOMAIN 13
  misc_feature (1)..(236): Homolog of NCBI NO: 25408064 NR Description: hypothetical protein At2g30340 [imported] -
  misc_feature (64)..(236): Homolog of NCBI NO: 13569544 NR Description: unknown [Arabidopsis thaliana]
  misc_feature (1)..(185): Homolog of NCBI NO: 18405401 NR Description: expressed protein; protein id: At2g40470.1, by cDNA: 97343., supported by cDNA: gi_17227159 [Arabidopsis >gi|29427824|sp|Q8L5T5|LB15_ARATH LOB domain protein 15 DOMAIN 15
  misc_feature (1)..(185): Homolog of NCBI NO: 21618113 NR Description: LOB DOMAIN 13 [Arabidopsis thaliana]
  misc_feature (1)..(207): Homolog of NCBI NO: 34907878 NR Description: P0031D02.27 [Oryza sativa (japonica
  misc_feature (19)..(133): Homolog of NCBI NO: 18402268 NR Description: expressed protein; protein id: At2g30130.1, by cDNA: 29970. [Arabidopsis thaliana]
  misc_feature (19)..(133): Homolog of NCBI NO: 21592574 NR Description: unknown [Arabidopsis thaliana]
  misc_feature (19)..(129): Homolog of NCBI NO: 15221679 NR Description: hypothetical protein; protein id: At1g31320.1
  misc_feature (16)..(126): Homolog of NCBI NO: 15218746 NR Description: unknown protein; protein id: At1g65620.1, by cDNA: gi_17227155, supported by cDNA: gi_19918970 [Arabidopsis >gi|29427552|sp|O04479|LBD6_ARATH LOB domain protein 6
MGIRRHVAVPPGTTLNTVTPCAACKLLRRRCAEECPFSPYFSPHEPHKFAAVHKVFGASNVSKMLLEVGESQRGDAANSLVYEANLRLRDPIYGCMGAISALQHHIQSLQSELTTVRTEILRHKYQEATTITSLQNNFNSTTTTSSVSCDQHALASAILLPPPPPPPPTPRPPRLLSSQPAPPPTPPVSLPSPSMVVSSSSSSNSSATNSMYNPPPSSTAGYSNSLSSDNNVHYFD

SEQ ID NO: 96828 - protein, 173 aa, Arabidopsis thaliana
  peptide (1)..(173): Ceres Seq. ID no. 12734831
  misc_feature (1)..(57): Pfam Name: Protein of unknown function DUF260 Pfam Description: Protein of unknown function DUF260
  misc_feature (1)..(173): Homolog of NCBI NO: 30684548 NR Description: lateral organ boundaries (LOB) domain protein 13 [Arabidopsis thaliana] >gi|29427981|sp|Q9AT61|LB13_ARATH LOB protein 13 >gi|17227158|gb|AAL38033.1|AF447888_1 LOB DOMAIN 13
  misc_feature (1)..(173): Homolog of NCBI NO: 25408064 NR Description: hypothetical protein At2g30340 [imported] -
  misc_feature (1)..(173): Homolog of NCBI NO: 13569544 NR Description: unknown [Arabidopsis thaliana]
  misc_feature (1)..(122): Homolog of NCBI NO: 18405401 NR Description: expressed protein; protein id: At2g40470.1, by cDNA: 97343., supported by cDNA: gi_17227159 [Arabidopsis >gi|29427824|sp|Q8L5T5|LB15_ARATH LOB domain protein 15 DOMAIN 15
  misc_feature (1)..(122): Homolog of NCBI NO: 21618113 NR Description: LOB DOMAIN 13 [Arabidopsis thaliana]
  misc_feature (1)..(144): Homolog of NCBI NO: 34907878 NR Description: P0031D02.27 [Oryza sativa (japonica
  misc_feature (1)..(70): Homolog of NCBI NO: 18402268 NR Description: expressed protein; protein id: At2g30130.1, by cDNA: 29970. [Arabidopsis thaliana]
  misc_feature (1)..(70): Homolog of NCBI NO: 21592574 NR Description: unknown [Arabidopsis thaliana]
  misc_feature (1)..(66): Homolog of NCBI NO: 15221679 NR Description: hypothetical protein; protein id: At1g31320.1
  misc_feature (1)..(63): Homolog of NCBI NO: 15218746 NR Description: unknown protein; protein id: At1g65620.1, by cDNA: gi_17227155, supported by cDNA: gi_19918970 [Arabidopsis >gi|29427552|sp|O04479|LBD6_ARATH LOB domain protein 6
MLLEVGESQRGDAANSLVYEANLRLRDPIYGCMGAISALQHHIQSLQSELTTVRTEILRHKYQEATTITSLQNNFNSTTTTSSVSCDQHALASAILLPPPPPPPPTPRPPRLLSSQPAPPPTPPVSLPSPSMVVSSSSSSNSSATNSMYNPPPSSTAGYSNSLSSDNNVHYFD

SEQ ID NO: 96829 - DNA, 1524 bp, Arabidopsis thaliana
  misc_feature (1)..(1524): Ceres Seq. ID no. 12734868
  misc_feature: MA Experiment ID: 20000185 Result: Up-regulated in Transcription
  misc_feature: MA Experiment 20000185 PARAMETER Experiment Name: At_Roots__P Parameter: Age (day) Value: 7 vs. 21
  misc_feature: MA Experiment 20000185 PARAMETER Experiment Name: At_Roots__P Parameter: Organism Value: A. thaliana
  misc_feature: MA Experiment 20000185 PARAMETER Experiment Name: At_Roots__P Parameter: Tissue Value: Roots vs. Whole Plant
  misc_feature: MA Experiment ID: 20000439 Result: Up-regulated in Transcription
  misc_feature: MA Experiment 20000439 PARAMETER Experiment Name: At_Roots__P Parameter: Age (day) Value: 14 vs. 21
  misc_feature: MA Experiment 20000439 PARAMETER Experiment Name: At_Roots__P Parameter: Organism Value: A. thaliana
  misc_feature: MA Experiment 20000439 PARAMETER Experiment Name: At_Roots__P Parameter: Tissue Value: Roots vs. Whole Plant
atggaatcaaaaatagtttcaaaagccaaaagacttcactttgttttgatccctctcatggctcaagggcatctgatccccatggtcgacatctccaagattcttgcacgacaaggcaacatcgttaccatagttacaacccctcaaaatgcttctaggtttgcgaagacagttgaccgagcaagattagagtcgggtctcgaaatcaatgtcgttaaatttccaattccttacaaagaattcggtcttcccaaagattgtgagactctggacactttgccctccaaagacctcctacgaagattctatgacgctgtggataaactccaagagcccatggaacggtttcttgagcaacaagatatccctccaagttgcataatctccgataaatgccttttttggacgtcaagaaccgcaaagaggttcaaaatcccgaggatcgtgttccatggaatgtgttgcttctctcttttgagttcgcacaatatccatcttcatagcccgcacctctcggtttcttcggccgtagagccattccctataccaggaatgccacataggattgagatagctagagctcagttacctggtgcttttgagaagttagcaaatatggatgacgttcgcgagaagatgcgtgaatctgaatcagaagcctttggggttattgttaatagcttccaggaattggagcctggctatgcagaggcctacgctgaggccatcaataagaaggtatggttcgttggacccgtttctttatgcaacgaccgtatggctgacctattcgatagaggaagtaatggtaacatcgcaataagcgagaccgaatgcttgcagtttcttgactcgatgagaccaaggtcagtcttatatgtttctcttggtagcctctgtcgactaatacctaatcaattgatagaactaggtttagggttagaagaatcgggaaaaccctttatttgggtgataaagaccgaggaaaaacacatgattgagctagacgaatggctaaaacgcgaaaattttgaagagcgagttagaggaagagggatagtaataaagggttggagtcctcaggctatgatactctcacatggttcaaccggcgggttcttgactcattgcggttggaattctacaatagaagcgatatgttttggtgtaccaatgatcacatggccgttgttcgctgaacaatttctcaatgagaaactcatcgtggaggttttgaacatcggggttagggttggggtggagattccggtgagatggggagacgaggagagacttggagtgttggtcaagaaaccgagtgttgtgaaagctataaagcttttgatggaccaagattgtcaacgtgtagacgaaaatgatgatgataatgaattcgtgagacgaaggagacgtattcaagaacttgcagtaatggcgaaaaaggctgtggaagaaaagggatcttcgagtattaacgtttcaattttaatccaagatgttttggagcaattgagtctcgtgtag

SEQ ID NO: 96830 - protein, 507 aa, Arabidopsis thaliana
  peptide (1)..(507): Ceres Seq. ID no. 12734869
  misc_feature (13)..(504): Pfam Name: UDP-glucoronosyl and UDP-glucosyl transferase Pfam Description: UDP-glucoronosyl and UDP-glucosyl transferase
  misc_feature (1)..(507): Homolog of NCBI NO: 15231757 NR Description: glucosyltransferase - like protein; protein id:
  misc_feature (7)..(502): Homolog of NCBI NO: 15228037 NR Description: putative glucosyl transferase; protein id: supported by cDNA: gi_17065333 [Arabidopsis thaliana]
  misc_feature (12)..(502): Homolog of NCBI NO: 15228034 NR Description: putative glucosyl transferase; protein id: supported by cDNA: gi_15028388, supported by cDNA: gi_19310660
  misc_feature (12)..(502): Homolog of NCBI NO: 15228035 NR Description: putative glucosyl transferase; protein id: [Arabidopsis thaliana] >gi|25286803|pir||G84784 probable glucosyl
  misc_feature (12)..(502): Homolog of NCBI NO: 26450153 NR Description: putative glucosyl transferase [Arabidopsis
  misc_feature (13)..(503): Homolog of NCBI NO: 19911201 NR Description: glucosyltransferase-9 [Vigna angularis]
  misc_feature (12)..(502): Homolog of NCBI NO: 15228031 NR Description: putative glucosyl transferase; protein id: [Arabidopsis thaliana] >gi|25286801|pir||C84784 probable glucosyl
  misc_feature (12)..(504): Homolog of NCBI NO: 15228033 NR Description: putative glucosyl transferase; protein id: supported by cDNA: gi_20856889 [Arabidopsis thaliana]
  misc_feature (12)..(504): Homolog of NCBI NO: 15228032 NR Description: putative glucosyl transferase; protein id: [Arabidopsis thaliana] >gi|25286791|pir||D84784 probable glucosyl
  misc_feature (25)..(503): Homolog of NCBI NO: 19911211 NR Description: glucosyltransferase-14 [Vigna angularis]
MESKIVSKAKRLHFVLIPLMAQGHLIPMVDISKILARQGNIVTIVTTPQNASRFAKTVDRARLESGLEINVVKFPIPYKEFGLPKDCETLDTLPSKDLLRRFYDAVDKLQEPMERFLEQQDIPPSCIISDKCLFWTSRTAKRFKIPRIVFHGMCCFSLLSSHNIHLHSPHLSVSSAVEPFPIPGMPHRIEIARAQLPGAFEKLANMDDVREKMRESESEAFGVIVNSFQELEPGYAEAYAEAINKKVWFVGPVSLCNDRMADLFDRGSNGNIAISETECLQFLDSMRPRSVLYVSLGSLCRLIPNQLIELGLGLEESGKPFIWVIKTEEKHMIELDEWLKRENFEERVRGRGIVIKGWSPQAMILSHGSTGGFLTHCGWNSTIEAICFGVPMITWPLFAEQFLNEKLIVEVLNIGVRVGVEIPVRWGDEERLGVLVKKPSVVKAIKLLMDQDCQRVDENDDDNEFVRRRRRIQELAVMAKKAVEEKGSSSINVSILIQDVLEQLSLV

SEQ ID NO: 96831 - protein, 488 aa, Arabidopsis thaliana
  peptide (1)..(488): Ceres Seq. ID no. 12734870
  misc_feature (1)..(485): Pfam Name: UDP-glucoronosyl and UDP-glucosyl transferase Pfam Description: UDP-glucoronosyl and UDP-glucosyl transferase
  misc_feature (1)..(488): Homolog of NCBI NO: 15231757 NR Description: glucosyltransferase - like protein; protein id:
  misc_feature (1)..(483): Homolog of NCBI NO: 15228037 NR Description: putative glucosyl transferase; protein id: supported by cDNA: gi_17065333 [Arabidopsis thaliana]
  misc_feature (1)..(483): Homolog of NCBI NO: 15228034 NR Description: putative glucosyl transferase; protein id: supported by cDNA: gi_15028388, supported by cDNA: gi_19310660
  misc_feature (1)..(483): Homolog of NCBI NO: 15228035 NR Description: putative glucosyl transferase; protein id: [Arabidopsis thaliana] >gi|25286803|pir||G84784 probable glucosyl
  misc_feature (1)..(483): Homolog of NCBI NO: 26450153 NR Description: putative glucosyl transferase [Arabidopsis
  misc_feature (1)..(484): Homolog of NCBI NO: 19911201 NR Description: glucosyltransferase-9 [Vigna angularis]
  misc_feature (1)..(483): Homolog of NCBI NO: 15228031 NR Description: putative glucosyl transferase; protein id: [Arabidopsis thaliana] >gi|25286801|pir||C84784 probable glucosyl
  misc_feature (1)..(485): Homolog of NCBI NO: 15228033 NR Description: putative glucosyl transferase; protein id: supported by cDNA: gi_20856889 [Arabidopsis thaliana]
  misc_feature (1)..(485): Homolog of NCBI NO: 15228032 NR Description: putative glucosyl transferase; protein id: [Arabidopsis thaliana] >gi|25286791|pir||D84784 probable glucosyl
  misc_feature (6)..(484): Homolog of NCBI NO: 19911211 NR Description: glucosyltransferase-14 [Vigna angularis]
MAQGHLIPMVDISKILARQGNIVTIVTTPQNASRFAKTVDRARLESGLEINVVKFPIPYKEFGLPKDCETLDTLPSKDLLRRFYDAVDKLQEPMERFLEQQDIPPSCIISDKCLFWTSRTAKRFKIPRIVFHGMCCFSLLSSHNIHLHSPHLSVSSAVEPFPIPGMPHRIEIARAQLPGAFEKLANMDDVREKMRESESEAFGVIVNSFQELEPGYAEAYAEAINKKVWFVGPVSLCNDRMADLFDRGSNGNIAISETECLQFLDSMRPRSVLYVSLGSLCRLIPNQLIELGLGLEESGKPFIWVIKTEEKHMIELDEWLKRENFEERVRGRGIVIKGWSPQAMILSHGSTGGFLTHCGWNSTIEAICFGVPMITWPLFAEQFLNEKLIVEVLNIGVRVGVEIPVRWGDEERLGVLVKKPSVVKAIKLLMDQDCQRVDENDDDNEFVRRRRRIQELAVMAKKAVEEKGSSSINVSILIQDVLEQLSLV

SEQ ID NO: 96832 - protein, 480 aa, Arabidopsis thaliana
  peptide (1)..(480): Ceres Seq. ID no. 12734871
  misc_feature (1)..(477): Pfam Name: UDP-glucoronosyl and UDP-glucosyl transferase Pfam Description: UDP-glucoronosyl and UDP-glucosyl transferase
  misc_feature (1)..(480): Homolog of NCBI NO: 15231757 NR Description: glucosyltransferase - like protein; protein id:
  misc_feature (1)..(475): Homolog of NCBI NO: 15228037 NR Description: putative glucosyl transferase; protein id: supported by cDNA: gi_17065333 [Arabidopsis thaliana]
  misc_feature (1)..(475): Homolog of NCBI NO: 15228034 NR Description: putative glucosyl transferase; protein id: supported by cDNA: gi_15028388, supported by cDNA: gi_19310660
  misc_feature (1)..(475): Homolog of NCBI NO: 15228035 NR Description: putative glucosyl transferase; protein id: [Arabidopsis thaliana] >gi|25286803|pir||G84784 probable glucosyl
  misc_feature (1)..(475): Homolog of NCBI NO: 26450153 NR Description: putative glucosyl transferase [Arabidopsis
  misc_feature (1)..(476): Homolog of NCBI NO: 19911201 NR Description: glucosyltransferase-9 [Vigna angularis]
  misc_feature (1)..(475): Homolog of NCBI NO: 15228031 NR Description: putative glucosyl transferase; protein id: [Arabidopsis thaliana] >gi|25286801|pir||C84784 probable glucosyl
  misc_feature (1)..(477): Homolog of NCBI NO: 15228033 NR Description: putative glucosyl transferase; protein id: supported by cDNA: gi_20856889 [Arabidopsis thaliana]
  misc_feature (1)..(477): Homolog of NCBI NO: 15228032 NR Description: putative glucosyl transferase; protein id: [Arabidopsis thaliana] >gi|25286791|pir||D84784 probable glucosyl
  misc_feature (1)..(476): Homolog of NCBI NO: 19911211 NR Description: glucosyltransferase-14 [Vigna angularis]
MVDISKILARQGNIVTIVTTPQNASRFAKTVDRARLESGLEINVVKFPIPYKEFGLPKDCETLDTLPSKDLLRRFYDAVDKLQEPMERFLEQQDIPPSCIISDKCLFWTSRTAKRFKIPRIVFHGMCCFSLLSSHNIHLHSPHLSVSSAVEPFPIPGMPHRIEIARAQLPGAFEKLANMDDVREKMRESESEAFGVIVNSFQELEPGYAEAYAEAINKKVWFVGPVSLCNDRMADLFDRGSNGNIAISETECLQFLDSMRPRSVLYVSLGSLCRLIPNQLIELGLGLEESGKPFIWVIKTEEKHMIELDEWLKRENFEERVRGRGIVIKGWSPQAMILSHGSTGGFLTHCGWNSTIEAICFGVPMITWPLFAEQFLNEKLIVEVLNIGVRVGVEIPVRWGDEERLGVLVKKPSVVKAIKLLMDQDCQRVDENDDDNEFVRRRRRIQELAVMAKKAVEEKGSSSINVSILIQDVLEQLSLV

SEQ ID NO: 96833 - DNA, 1473 bp, Arabidopsis thaliana
  misc_feature (1)..(1473): Ceres Seq. ID no. 12734872
  misc_feature: MA Experiment ID: 20000307 Result: Down-regulated in Transcription
  misc_feature: MA Experiment 20000307 PARAMETER Experiment Name: At_Germinating_Seeds_Sub_P Parameter: Age (hr) Value: 24 vs. 0
  misc_feature: MA Experiment 20000307 PARAMETER Experiment Name: At_Germinating_Seeds_Sub_P Parameter: Organism Value: A. thaliana
  misc_feature: MA Experiment 20000307 PARAMETER Experiment Name: At_Germinating_Seeds_Sub_P Parameter: Plant Line Value: WS
  misc_feature: MA Experiment 20000307 PARAMETER Experiment Name: At_Germinating_Seeds_Sub_P Parameter: Tissue Value: Germinating Seeds
  misc_feature: MA Experiment ID: 20000347 Result: Up-regulated in Transcription
  misc_feature: MA Experiment 20000347 PARAMETER Experiment Name: At_2mM_SA_Sub_P Parameter: Age (day) Value: 14
  misc_feature: MA Experiment 20000347 PARAMETER Experiment Name: At_2mM_SA_Sub_P Parameter: Organism Value: A. thaliana
  misc_feature: MA Experiment 20000347 PARAMETER Experiment Name: At_2mM_SA_Sub_P Parameter: Plant Line Value: WS
  misc_feature: MA Experiment 20000347 PARAMETER Experiment Name: At_2mM_SA_Sub_P Parameter: Timepoint (hr) Value: 6
  misc_feature: MA Experiment 20000347 PARAMETER Experiment Name: At_2mM_SA_Sub_P Parameter: Tissue Value: Aerial
  misc_feature: MA Experiment 20000347 PARAMETER Experiment Name: At_2mM_SA_Sub_P Parameter: Treatment Value: 2mM SA vs. No Treatment
atgtgttctcatgatcctcttcacttcgtcgtaataccctttatggcccaaggccatatgatcccattggtcgacatctctaggctcttgtcccagcgccaaggcgtgactgtctgcatcatcacaactactcaaaatgtagccaagatcaagacttcactctcattttcctctttgtttgcgactatcaacatcgttgaagttaagtttctgtctcaacaaacgggtttgccagaagggtgcgagagtttagatatgttggcttcaatgggcgatatggtgaagttctttgatgctgccaactcacttgaggagcaagttgagaaagctatggaagagatggttcagccgcggccaagctgcatcattggagacatgagccttcctttcacttcaagacttgccaagaaattcaagatccccaaacttatcttccatgggttttcttgtttcagcctcatgtctatacaagtggttcgagaaagcgggatcttgaaaatgatagaatcaaacgacgagtattttgatttgcccggcttgcctgacaaagttgagttcacgaaacctcaggtctctgtgttgcaacctgttgaaggaaatatgaaagagagtacggccaagattattgaagctgataatgactcttatggtgttattgtgaacacttttgaagagttagaggttgattatgcaagagaatataggaaagcaagggctggaaaagtttggtgcgttggacctgtttccttgtgcaataggttagggttagacaaagctaaaagaggagataaggcttctattggtcaagaccaatgtcttcaatggcttgactctcaagaaactggttcagtgctctacgtttgccttggaagtctatgtaatcttcccttggctcagctcaaagagctgggactaggccttgaggcatctaataaacctttcatatgggttataagagaatggggaaaatatggagatttagcaaattggatgcaacaaagcggatttgaagagcggatcaaagatagaggactggtgatcaaaggttgggcgccgcaagttttcatcctctcacacgcatccattggagggtttttgactcactgtggatggaactcgacactagaaggaattactgcaggagttccattattgacatggcctttgtttgctgaacaattcttgaatgagaagttagttgtgcagatactaaaagcagggttaaagataggagtagagaaattgatgaaatatggaaaagaagaggagataggagcgatggtgagcagagaatgtgtgagaaaagctgtggatgagctaatgggtgatagtgaagaagcagaagagagaagaagaaaagttacagaacttagtgacttggcaaataaggctttggaaaaaggaggatcttcagattctaatatcacattgctcattcaagatattatggagcaatcacaaaatcaattttaa

SEQ ID NO: 96834 - protein, 490 aa, Arabidopsis thaliana
  peptide (1)..(490): Ceres Seq. ID no. 12734873
  misc_feature (1)..(490): Homolog of NCBI NO: 15231758 NR Description: glucosyltransferase - like protein; protein id:
  misc_feature (4)..(489): Homolog of NCBI NO: 15228033 NR Description: putative glucosyl transferase; protein id: supported by cDNA: gi_20856889 [Arabidopsis thaliana]
  misc_feature (6)..(487): Homolog of NCBI NO: 15228031 NR Description: putative glucosyl transferase; protein id: [Arabidopsis thaliana] >gi|25286801|pir||C84784 probable glucosyl
  misc_feature (4)..(487): Homolog of NCBI NO: 15228034 NR Description: putative glucosyl transferase; protein id: supported by cDNA: gi_15028388, supported by cDNA: gi_19310660
  misc_feature (6)..(488): Homolog of NCBI NO: 15228035 NR Description: putative glucosyl transferase; protein id: [Arabidopsis thaliana] >gi|25286803|pir||G84784 probable glucosyl
  misc_feature (6)..(488): Homolog of NCBI NO: 26450153 NR Description: putative glucosyl transferase [Arabidopsis
  misc_feature (6)..(489): Homolog of NCBI NO: 15228032 NR Description: putative glucosyl transferase; protein id: [Arabidopsis thaliana] >gi|25286791|pir||D84784 probable glucosyl
  misc_feature (6)..(487): Homolog of NCBI NO: 15228037 NR Description: putative glucosyl transferase; protein id: supported by cDNA: gi_17065333 [Arabidopsis thaliana]
  misc_feature (20)..(487): Homolog of NCBI NO: 19911211 NR Description: glucosyltransferase-14 [Vigna angularis]
  misc_feature (8)..(489): Homolog of NCBI NO: 19911201 NR Description: glucosyltransferase-9 [Vigna angularis]
MCSHDPLHFVVIPFMAQGHMIPLVDISRLLSQRQGVTVCIITTTQNVAKIKTSLSFSSLFATINIVEVKFLSQQTGLPEGCESLDMLASMGDMVKFFDAANSLEEQVEKAMEEMVQPRPSCIIGDMSLPFTSRLAKKFKIPKLIFHGFSCFSLMSIQVVRESGILKMIESNDEYFDLPGLPDKVEFTKPQVSVLQPVEGNMKESTAKIIEADNDSYGVIVNTFEELEVDYAREYRKARAGKVWCVGPVSLCNRLGLDKAKRGDKASIGQDQCLQWLDSQETGSVLYVCLGSLCNLPLAQLKELGLGLEASNKPFIWVIREWGKYGDLANWMQQSGFEERIKDRGLVIKGWAPQVFILSHASIGGFLTHCGWNSTLEGITAGVPLLTWPLFAEQFLNEKLVVQILKAGLKIGVEKLMKYGKEEEIGAMVSRECVRKAVDELMGDSEEAEERRRKVTELSDLANKALEKGGSSDSNITLLIQDIMEQSQNQF

SEQ ID NO: 96835 - protein, 476 aa, Arabidopsis thaliana
  peptide (1)..(476): Ceres Seq. ID no. 12734874
  misc_feature (1)..(476): Homolog of NCBI NO: 15231758 NR Description: glucosyltransferase - like protein; protein id:
  misc_feature (1)..(475): Homolog of NCBI NO: 15228033 NR Description: putative glucosyl transferase; protein id: supported by cDNA: gi_20856889 [Arabidopsis thaliana]
  misc_feature (1)..(473): Homolog of NCBI NO: 15228031 NR Description: putative glucosyl transferase; protein id: [Arabidopsis thaliana] >gi|25286801|pir||C84784 probable glucosyl
  misc_feature (1)..(473): Homolog of NCBI NO: 15228034 NR Description: putative glucosyl transferase; protein id: supported by cDNA: gi_15028388, supported by cDNA: gi_19310660
  misc_feature (1)..(474): Homolog of NCBI NO: 15228035 NR Description: putative glucosyl transferase; protein id: [Arabidopsis thaliana] >gi|25286803|pir||G84784 probable glucosyl
  misc_feature (1)..(474): Homolog of NCBI NO: 26450153 NR Description: putative glucosyl transferase [Arabidopsis
  misc_feature (1)..(475): Homolog of NCBI NO: 15228032 NR Description: putative glucosyl transferase; protein id: [Arabidopsis thaliana] >gi|25286791|pir||D84784 probable glucosyl
  misc_feature (1)..(473): Homolog of NCBI NO: 15228037 NR Description: putative glucosyl transferase; protein id: supported by cDNA: gi_17065333 [Arabidopsis thaliana]
  misc_feature (6)..(473): Homolog of NCBI NO: 19911211 NR Description: glucosyltransferase-14 [Vigna angularis]
  misc_feature (1)..(475): Homolog of NCBI NO: 19911201 NR Description: glucosyltransferase-9 [Vigna angularis]
MAQGHMIPLVDISRLLSQRQGVTVCIITTTQNVAKIKTSLSFSSLFATINIVEVKFLSQQTGLPEGCESLDMLASMGDMVKFFDAANSLEEQVEKAMEEMVQPRPSCIIGDMSLPFTSRLAKKFKIPKLIFHGFSCFSLMSIQVVRESGILKMIESNDEYFDLPGLPDKVEFTKPQVSVLQPVEGNMKESTAKIIEADNDSYGVIVNTFEELEVDYAREYRKARAGKVWCVGPVSLCNRLGLDKAKRGDKASIGQDQCLQWLDSQETGSVLYVCLGSLCNLPLAQLKELGLGLEASNKPFIWVIREWGKYGDLANWMQQSGFEERIKDRGLVIKGWAPQVFILSHASIGGFLTHCGWNSTLEGITAGVPLLTWPLFAEQFLNEKLVVQILKAGLKIGVEKLMKYGKEEEIGAMVSRECVRKAVDELMGDSEEAEERRRKVTELSDLANKALEKGGSSDSNITLLIQDIMEQSQNQF

SEQ ID NO: 96836 - protein, 471 aa, Arabidopsis thaliana
  peptide (1)..(471): Ceres Seq. ID no. 12734875
  misc_feature (1)..(471): Homolog of NCBI NO: 15231758 NR Description: glucosyltransferase - like protein; protein id:
  misc_feature (1)..(470): Homolog of NCBI NO: 15228033 NR Description: putative glucosyl transferase; protein id: supported by cDNA: gi_20856889 [Arabidopsis thaliana]
  misc_feature (1)..(468): Homolog of NCBI NO: 15228031 NR Description: putative glucosyl transferase; protein id: [Arabidopsis thaliana] >gi|25286801|pir||C84784 probable glucosyl
  misc_feature (1)..(468): Homolog of NCBI NO: 15228034 NR Description: putative glucosyl transferase; protein id: supported by cDNA: gi_15028388, supported by cDNA: gi_19310660
  misc_feature (1)..(469): Homolog of NCBI NO: 15228035 NR Description: putative glucosyl transferase; protein id: [Arabidopsis thaliana] >gi|25286803|pir||G84784 probable glucosyl
  misc_feature (1)..(469): Homolog of NCBI NO: 26450153 NR Description: putative glucosyl transferase [Arabidopsis
  misc_feature (1)..(470): Homolog of NCBI NO: 15228032 NR Description: putative glucosyl transferase; protein id: [Arabidopsis thaliana] >gi|25286791|pir||D84784 probable glucosyl
  misc_feature (1)..(468): Homolog of NCBI NO: 15228037 NR Description: putative glucosyl transferase; protein id: supported by cDNA: gi_17065333 [Arabidopsis thaliana]
  misc_feature (1)..(468): Homolog of NCBI NO: 19911211 NR Description: glucosyltransferase-14 [Vigna angularis]
  misc_feature (1)..(470): Homolog of NCBI NO: 19911201 NR Description: glucosyltransferase-9 [Vigna angularis]
MIPLVDISRLLSQRQGVTVCIITTTQNVAKIKTSLSFSSLFATINIVEVKFLSQQTGLPEGCESLDMLASMGDMVKFFDAANSLEEQVEKAMEEMVQPRPSCIIGDMSLPFTSRLAKKFKIPKLIFHGFSCFSLMSIQVVRESGILKMIESNDEYFDLPGLPDKVEFTKPQVSVLQPVEGNMKESTAKIIEADNDSYGVIVNTFEELEVDYAREYRKARAGKVWCVGPVSLCNRLGLDKAKRGDKASIGQDQCLQWLDSQETGSVLYVCLGSLCNLPLAQLKELGLGLEASNKPFIWVIREWGKYGDLANWMQQSGFEERIKDRGLVIKGWAPQVFILSHASIGGFLTHCGWNSTLEGITAGVPLLTWPLFAEQFLNEKLVVQILKAGLKIGVEKLMKYGKEEEIGAMVSRECVRKAVDELMGDSEEAEERRRKVTELSDLANKALEKGGSSDSNITLLIQDIMEQSQNQF

SEQ ID NO: 96837 - DNA, 2448 bp, Arabidopsis thaliana
  misc_feature (1)..(2448): Ceres Seq. ID no. 12734884
  misc_feature: MA Experiment ID: 20000306 Result: Down-regulated in Transcription
  misc_feature: MA Experiment 20000306 PARAMETER Experiment Name: At_Germinating_Seeds_Sub_P Parameter: Age (hr) Value: 6 vs. 0
  misc_feature: MA Experiment 20000306 PARAMETER Experiment Name: At_Germinating_Seeds_Sub_P Parameter: Organism Value: A. thaliana
  misc_feature: MA Experiment 20000306 PARAMETER Experiment Name: At_Germinating_Seeds_Sub_P Parameter: Plant Line Value: WS
  misc_feature: MA Experiment 20000306 PARAMETER Experiment Name: At_Germinating_Seeds_Sub_P Parameter: Tissue Value: Germinating Seeds
  misc_feature: MA Experiment ID: 20000307 Result: Down-regulated in Transcription
  misc_feature: MA Experiment 20000307 PARAMETER Experiment Name: At_Germinating_Seeds_Sub_P Parameter: Age (hr) Value: 24 vs. 0
  misc_feature: MA Experiment 20000307 PARAMETER Experiment Name: At_Germinating_Seeds_Sub_P Parameter: Organism Value: A. thaliana
  misc_feature: MA Experiment 20000307 PARAMETER Experiment Name: At_Germinating_Seeds_Sub_P Parameter: Plant Line Value: WS
  misc_feature: MA Experiment 20000307 PARAMETER Experiment Name: At_Germinating_Seeds_Sub_P Parameter: Tissue Value: Germinating Seeds
  misc_feature: MA Experiment ID: 20000314 Result: Up-regulated in Transcription
  misc_feature: MA Experiment 20000314 PARAMETER Experiment Name: At_14day_Shoots-Roots_Sub_P Parameter: Age (day) Value: 14
  misc_feature: MA Experiment 20000314 PARAMETER Experiment Name: At_14day_Shoots-Roots_Sub_P Parameter: Organism Value: A. thaliana
  misc_feature: MA Experiment 20000314 PARAMETER Experiment Name: At_14day_Shoots-Roots_Sub_P Parameter: Plant Line Value: WS
  misc_feature: MA Experiment 20000314 PARAMETER Experiment Name: At_14day_Shoots-Roots_Sub_P Parameter: Tissue Value: Roots vs. Whole Plant
  misc_feature: MA Experiment ID: 20000327 Result: Up-regulated in Transcription
  misc_feature: MA Experiment 20000327 PARAMETER Experiment Name: At_42deg_Heat_Sub_P Parameter: Age (day) Value: 14
  misc_feature: MA Experiment 20000327 PARAMETER Experiment Name: At_42deg_Heat_Sub_P Parameter: Organism Value: A. thaliana
  misc_feature: MA Experiment 20000327 PARAMETER Experiment Name: At_42deg_Heat_Sub_P Parameter: Plant Line Value: WS
  misc_feature: MA Experiment 20000327 PARAMETER Experiment Name: At_42deg_Heat_Sub_P Parameter: Temperature (deg C) Value: 42 vs. 22
  misc_feature: MA Experiment 20000327 PARAMETER Experiment Name: At_42deg_Heat_Sub_P Parameter: Timepoint (hr) Value: 1
  misc_feature: MA Experiment 20000327 PARAMETER Experiment Name: At_42deg_Heat_Sub_P Parameter: Tissue Value: Aerial
  misc_feature: MA Experiment ID: 20000328 Result: Up-regulated in Transcription
  misc_feature: MA Experiment 20000328 PARAMETER Experiment Name: At_42deg_Heat_Sub_P Parameter: Age (day) Value: 14
  misc_feature: MA Experiment 20000328 PARAMETER Experiment Name: At_42deg_Heat_Sub_P Parameter: Organism Value: A. thaliana
  misc_feature: MA Experiment 20000328 PARAMETER Experiment Name: At_42deg_Heat_Sub_P Parameter: Plant Line Value: WS
  misc_feature: MA Experiment 20000328 PARAMETER Experiment Name: At_42deg_Heat_Sub_P Parameter: Temperature (deg C) Value: 42 vs. 22
  misc_feature: MA Experiment 20000328 PARAMETER Experiment Name: At_42deg_Heat_Sub_P Parameter: Timepoint (hr) Value: 6
  misc_feature: MA Experiment 20000328 PARAMETER Experiment Name: At_42deg_Heat_Sub_P Parameter: Tissue Value: Aerial
  misc_feature: MA Experiment ID: 20000347 Result: Up-regulated in Transcription
  misc_feature: MA Experiment 20000347 PARAMETER Experiment Name: At_2mM_SA_Sub_P Parameter: Age (day) Value: 14
  misc_feature: MA Experiment 20000347 PARAMETER Experiment Name: At_2mM_SA_Sub_P Parameter: Organism Value: A. thaliana
  misc_feature: MA Experiment 20000347 PARAMETER Experiment Name: At_2mM_SA_Sub_P Parameter: Plant Line Value: WS
  misc_feature: MA Experiment 20000347 PARAMETER Experiment Name: At_2mM_SA_Sub_P Parameter: Timepoint (hr) Value: 6
  misc_feature: MA Experiment 20000347 PARAMETER Experiment Name: At_2mM_SA_Sub_P Parameter: Tissue Value: Aerial
  misc_feature: MA Experiment 20000347 PARAMETER Experiment Name: At_2mM_SA_Sub_P Parameter: Treatment Value: 2mM SA vs. No Treatment
  misc_feature: MA Experiment ID: 20000349 Result: Up-regulated in Transcription
  misc_feature: MA Experiment 20000349 PARAMETER Experiment Name: At_100uM_ABA_Sub_P Parameter: Age (day) Value: 14
  misc_feature: MA Experiment 20000349 PARAMETER Experiment Name: At_100uM_ABA_Sub_P Parameter: Organism Value: A. thaliana
  misc_feature: MA Experiment 20000349 PARAMETER Experiment Name: At_100uM_ABA_Sub_P Parameter: Plant Line Value: WS
  misc_feature: MA Experiment 20000349 PARAMETER Experiment Name: At_100uM_ABA_Sub_P Parameter: Timepoint (hr) Value: 6
  misc_feature: MA Experiment 20000349 PARAMETER Experiment Name: At_100uM_ABA_Sub_P Parameter: Tissue Value: Aerial
  misc_feature: MA Experiment 20000349 PARAMETER Experiment Name: At_100uM_ABA_Sub_P Parameter: Treatment Value: 100uM ABA vs. No Treatment
  misc_feature: MA Experiment ID: 20000355 Result: Down-regulated in Transcription
  misc_feature: MA Experiment 20000355 PARAMETER Experiment Name: At_Siliques_Sub_P Parameter: Age (day) Value: 21
  misc_feature: MA Experiment 20000355 PARAMETER Experiment Name: At_Siliques_Sub_P Parameter: Organism Value: A. thaliana
  misc_feature: MA Experiment 20000355 PARAMETER Experiment Name: At_Siliques_Sub_P Parameter: Plant Line Value: WS
  misc_feature: MA Experiment 20000355 PARAMETER Experiment Name: At_Siliques_Sub_P Parameter: Tissue Value: Less Than 5mm Siliques vs. Whole Plant
  misc_feature: MA Experiment ID: 20000440 Result: Down-regulated in Transcription
  misc_feature: MA Experiment 20000440 PARAMETER Experiment Name: At_Closed-Flower__Sub_P Parameter: Tissue Value: Closed Flower vs. Whole Plant
atggcgaatcaagctgaatcatctgattcgaaggggacgaagaaggattttagcaccgcgattctggagaaaaagaaggcagcgaatcgtttggttgtggatgaagccattaacgatgataactccgtcgtttctcttcaccctgataccatggagaagctacagctttttcgtggtgatactatcttaatcaagggaaagaagaggaaggatactgtgtgtattgctttagctgatgagacatgtgatgaaccaaaaattagaatgaacaaggttgttaggtctaatctcagagttaggcttggggatgttatttctgttcatcaatgtcctgatgtcaagtatgggaaccgtgttcacatcttacctttagatgataccattgaaggagtaagtggcaatatatttgatgcataccttaaaccttatttcttagaggcatatcgtccggtgaggaagggcgatcttttcctagttagaggagggatgagaagtattgagtttaaggttattgaaactgatcctgctgagtactgtgtggttgctccagatacagaaattttctgtgaaggtgaaccgataaagagagaggatgaggagaggttggatgaagttgggtatgatgatgttggtggtgtcaggaaacaaatggctcagattcgtgaacttgttgagctcccattgaggcatccacagctcttcaagtctattggtgtgaaacctcccaaaggaatcttgctctatggccctcctggttctgggaagacacttattgcccgtgctgttgctaatgagactggtgcatttttcttctgtatcaatggtcccgagatcatgtcgaagctagctggtgagagtgaaagtaacctcaggaaagcgtttgaggaagctgagaagaatgccccttcgatcatattcattgatgagatcgattcgattgctccaaaaagagagaagactcacggagaagttgaaagacggattgtatcccagctcttgacacttatggatggtcttaaatccagagcccatgtgattgttatgggagctaccaaccgtcccaacagcattgaccctgctttgagaagatttggacgttttgatagagaaattgatattggtgttcctgatgagattggtcgtcttgaagttctcaggattcacaccaagaacatgaagcttgcggaagatgttgatttggaaagagtatctaaagacacccatgggtatgttggtgctgatcttgcagcattatgcactgaagctgctctccaatgcattagggagaagatggatgtaattgacctagatgacgaggagatagatgctgaaattctcaattctatggctgtcagtaatgatcatttccagactgcccttggtaacagcaatccttcagctctacgtgagactgtcgttgaggtgcctaatgtgtcttgggaggacattggtggtcttgagaatgtcaagagggagctccaagagactgttcaatatccagtggagcatcctgagaaattcgagaagtttgggatgtcaccgtctaaaggagtcctattctatggcccccctggttgtggaaagaccctcttggctaaggctattgcgaacgagtgtcaagccaacttcattagtatcaagggtcctgagctcctcacaatgtggtttggagagagtgaagccaatgtgagagagatattcgacaaggcacgacagtctgccccttgtgttcttttctttgatgagctggactccatcgccactcagagagggaacagtgttggagatgctggtggtgcagcagatagagtattgaaccagcttcttacggagatggatggaatgaatgctaagaagacggtcttcatcatcggagctacaaacagaccagacattattgatcctgcacttctgcgtcctggtcgtctcgatcagctcatctacattcctcttcctgatgaggagtctcgttaccagatctttaagtcttgcttgaggaaatcacctgtggcgaaagatgttgacctgagggctcttgctaagtacacccaaggcttcagtggtgcggacatcacagagatttgccagcgttcttgcaagtatgcgatcagagaaaacatcgagaaggatattgagaaggagaggaagagagcagagtcgccagaagcaatggaagaggatgaggaggagattgcagagattaaagctggtcactttgaggaatccatgaaatacgctaggagatcagtgagtgatgcagacattcgcaagtatcaggcttttgctcagactctccagcaatcacgtgggtttggaagcgagttcaggtttccagatgcgccgacagggactactggagctttccctggagctgctgccacagttgggggagtcgacccgtttgccacatccggaggagcagcggatgatgatgatctctacagttga

SEQ ID NO: 96838 - protein, 815 aa, Arabidopsis thaliana
  peptide (1)..(815): Ceres Seq. ID no. 12734885
  misc_feature (517)..(704): Pfam Name: ATPase family associated with various cellular Pfam Description: ATPase family associated with various cellular
  misc_feature (1)..(815): Homolog of NCBI NO: 39587267 NR Description: Hypothetical protein CBG00746 [Caenorhabditis
  misc_feature (1)..(815): Homolog of NCBI NO: 39597425 NR Description: Hypothetical protein CBG03070 [Caenorhabditis
  misc_feature (33)..(462): Homolog of NCBI NO: 23612492 NR Description: cell division cycle ATPase, putative [Plasmodium
  misc_feature (432)..(765): Homolog of NCBI NO: 23612492 NR Description: cell division cycle ATPase, putative [Plasmodium
  misc_feature (4)..(515): Homolog of NCBI NO: 23481659 NR Description: putative cell division cycle ATPase [Plasmodium
  misc_feature (435)..(765): Homolog of NCBI NO: 23481659 NR Description: putative cell division cycle ATPase [Plasmodium
  misc_feature (31)..(712): Homolog of NCBI NO: 15669345 NR Description: cell division control protein 48 (cdc48), AAA [Methanococcus jannaschii] >gi|2492505|sp|Q58556|YB56_METJA Cell cycle protein 48 homolog MJ1156 >gi|2118117|pir||C64444 cell
  misc_feature (24)..(767): Homolog of NCBI NO: 30088847 NR Description: AAA family ATPase [Sulfolobus acidocaldarius]
  misc_feature (393)..(783): Homolog of NCBI NO: 14521559 NR Description: TRANSITIONAL ENDOPLASMIC RETICULUM ATPASE abyssi] >gi|7435762|pir||D75046 transitional endoplasmic
  misc_feature (162)..(405): Homolog of NCBI NO: 14521559 NR Description: TRANSITIONAL ENDOPLASMIC RETICULUM ATPASE abyssi] >gi|7435762|pir||D75046 transitional endoplasmic
MANQAESSDSKGTKKDFSTAILEKKKAANRLVVDEAINDDNSVVSLHPDTMEKLQLFRGDTILIKGKKRKDTVCIALADETCDEPKIRMNKVVRSNLRVRLGDVISVHQCPDVKYGNRVHILPLDDTIEGVSGNIFDAYLKPYFLEAYRPVRKGDLFLVRGGMRSIEFKVIETDPAEYCVVAPDTEIFCEGEPIKREDEERLDEVGYDDVGGVRKQMAQIRELVELPLRHPQLFKSIGVKPPKGILLYGPPGSGKTLIARAVANETGAFFFCINGPEIMSKLAGESESNLRKAFEEAEKNAPSIIFIDEIDSIAPKREKTHGEVERRIVSQLLTLMDGLKSRAHVIVMGATNRPNSIDPALRRFGRFDREIDIGVPDEIGRLEVLRIHTKNMKLAEDVDLERVSKDTHGYVGADLAALCTEAALQCIREKMDVIDLDDEEIDAEILNSMAVSNDHFQTALGNSNPSALRETVVEVPNVSWEDIGGLENVKRELQETVQYPVEHPEKFEKFGMSPSKGVLFYGPPGCGKTLLAKAIANECQANFISIKGPELLTMWFGESEANVREIFDKARQSAPCVLFFDELDSIATQRGNSVGDAGGAADRVLNQLLTEMDGMNAKKTVFIIGATNRPDIIDPALLRPGRLDQLIYIPLPDEESRYQIFKSCLRKSPVAKDVDLRALAKYTQGFSGADITEICQRSCKYAIRENIEKDIEKERKRAESPEAMEEDEEEIAEIKAGHFEESMKYARRSVSDADIRKYQAFAQTLQQSRGFGSEFRFPDAPTGTTGAFPGAAATVGGVDPFATSGGAADDDDLYS

SEQ ID NO: 96839 - protein, 765 aa, Arabidopsis thaliana
  peptide (1)..(765): Ceres Seq. ID no. 12734886
  misc_feature (467)..(654): Pfam Name: ATPase family associated with various cellular Pfam Description: ATPase family associated with various cellular
  misc_feature (1)..(765): Homolog of NCBI NO: 39587267 NR Description: Hypothetical protein CBG00746 [Caenorhabditis
  misc_feature (1)..(765): Homolog of NCBI NO: 39597425 NR Description: Hypothetical protein CBG03070 [Caenorhabditis
  misc_feature (1)..(412): Homolog of NCBI NO: 23612492 NR Description: cell division cycle ATPase, putative [Plasmodium
  misc_feature (382)..(715): Homolog of NCBI NO: 23612492 NR Description: cell division cycle ATPase, putative [Plasmodium
  misc_feature (1)..(465): Homolog of NCBI NO: 23481659 NR Description: putative cell division cycle ATPase [Plasmodium
  misc_feature (385)..(715): Homolog of NCBI NO: 23481659 NR Description: putative cell division cycle ATPase [Plasmodium
  misc_feature (1)..(662): Homolog of NCBI NO: 15669345 NR Description: cell division control protein 48 (cdc48), AAA [Methanococcus jannaschii] >gi|2492505|sp|Q58556|YB56_METJA Cell cycle protein 48 homolog MJ1156 >gi|2118117|pir||C64444 cell
  misc_feature (1)..(717): Homolog of NCBI NO: 30088847 NR Description: AAA family ATPase [Sulfolobus acidocaldarius]
  misc_feature (343)..(733): Homolog of NCBI NO: 14521559 NR Description: TRANSITIONAL ENDOPLASMIC RETICULUM ATPASE abyssi] >gi|7435762|pir||D75046 transitional endoplasmic
  misc_feature (112)..(355): Homolog of NCBI NO: 14521559 NR Description: TRANSITIONAL ENDOPLASMIC RETICULUM ATPASE abyssi] >gi|7435762|pir||D75046 transitional endoplasmic
MEKLQLFRGDTILIKGKKRKDTVCIALADETCDEPKIRMNKVVRSNLRVRLGDVISVHQCPDVKYGNRVHILPLDDTIEGVSGNIFDAYLKPYFLEAYRPVRKGDLFLVRGGMRSIEFKVIETDPAEYCVVAPDTEIFCEGEPIKREDEERLDEVGYDDVGGVRKQMAQIRELVELPLRHPQLFKSIGVKPPKGILLYGPPGSGKTLIARAVANETGAFFFCINGPEIMSKLAGESESNLRKAFEEAEKNAPSIIFIDEIDSIAPKREKTHGEVERRIVSQLLTLMDGLKSRAHVIVMGATNRPNSIDPALRRFGRFDREIDIGVPDEIGRLEVLRIHTKNMKLAEDVDLERVSKDTHGYVGADLAALCTEAALQCIREKMDVIDLDDEEIDAEILNSMAVSNDHFQTALGNSNPSALRETVVEVPNVSWEDIGGLENVKRELQETVQYPVEHPEKFEKFGMSPSKGVLFYGPPGCGKTLLAKAIANECQANFISIKGPELLTMWFGESEANVREIFDKARQSAPCVLFFDELDSIATQRGNSVGDAGGAADRVLNQLLTEMDGMNAKKTVFIIGATNRPDIIDPALLRPGRLDQLIYIPLPDEESRYQIFKSCLRKSPVAKDVDLRALAKYTQGFSGADITEICQRSCKYAIRENIEKDIEKERKRAESPEAMEEDEEEIAEIKAGHFEESMKYARRSVSDADIRKYQAFAQTLQQSRGFGSEFRFPDAPTGTTGAFPGAAATVGGVDPFATSGGAADDDDLYS

SEQ ID NO: 96840 - protein, 727 aa, Arabidopsis thaliana
  peptide (1)..(727): Ceres Seq. ID no. 12734887
  misc_feature (429)..(616): Pfam Name: ATPase family associated with various cellular Pfam Description: ATPase family associated with various cellular
  misc_feature (1)..(727): Homolog of NCBI NO: 39587267 NR Description: Hypothetical protein CBG00746 [Caenorhabditis
  misc_feature (1)..(727): Homolog of NCBI NO: 39597425 NR Description: Hypothetical protein CBG03070 [Caenorhabditis
  misc_feature (1)..(374): Homolog of NCBI NO: 23612492 NR Description: cell division cycle ATPase, putative [Plasmodium
  misc_feature (344)..(677): Homolog of NCBI NO: 23612492 NR Description: cell division cycle ATPase, putative [Plasmodium
  misc_feature (1)..(427): Homolog of NCBI NO: 23481659 NR Description: putative cell division cycle ATPase [Plasmodium
  misc_feature (347)..(677): Homolog of NCBI NO: 23481659 NR Description: putative cell division cycle ATPase [Plasmodium
  misc_feature (1)..(624): Homolog of NCBI NO: 15669345 NR Description: cell division control protein 48 (cdc48), AAA [Methanococcus jannaschii] >gi|2492505|sp|Q58556|YB56_METJA Cell cycle protein 48 homolog MJ1156 >gi|2118117|pir||C64444 cell
  misc_feature (1)..(679): Homolog of NCBI NO: 30088847 NR Description: AAA family ATPase [Sulfolobus acidocaldarius]
  misc_feature (305)..(695): Homolog of NCBI NO: 14521559 NR Description: TRANSITIONAL ENDOPLASMIC RETICULUM ATPASE abyssi] >gi|7435762|pir||D75046 transitional endoplasmic
  misc_feature (74)..(317): Homolog of NCBI NO: 14521559 NR Description: TRANSITIONAL ENDOPLASMIC RETICULUM ATPASE abyssi] >gi|7435762|pir||D75046 transitional endoplasmic
MNKVVRSNLRVRLGDVISVHQCPDVKYGNRVHILPLDDTIEGVSGNIFDAYLKPYFLEAYRPVRKGDLFLVRGGMRSIEFKVIETDPAEYCVVAPDTEIFCEGEPIKREDEERLDEVGYDDVGGVRKQMAQIRELVELPLRHPQLFKSIGVKPPKGILLYGPPGSGKTLIARAVANETGAFFFCINGPEIMSKLAGESESNLRKAFEEAEKNAPSIIFIDEIDSIAPKREKTHGEVERRIVSQLLTLMDGLKSRAHVIVMGATNRPNSIDPALRRFGRFDREIDIGVPDEIGRLEVLRIHTKNMKLAEDVDLERVSKDTHGYVGADLAALCTEAALQCIREKMDVIDLDDEEIDAEILNSMAVSNDHFQTALGNSNPSALRETVVEVPNVSWEDIGGLENVKRELQETVQYPVEHPEKFEKFGMSPSKGVLFYGPPGCGKTLLAKAIANECQANFISIKGPELLTMWFGESEANVREIFDKARQSAPCVLFFDELDSIATQRGNSVGDAGGAADRVLNQLLTEMDGMNAKKTVFIIGATNRPDIIDPALLRPGRLDQLIYIPLPDEESRYQIFKSCLRKSPVAKDVDLRALAKYTQGFSGADITEICQRSCKYAIRENIEKDIEKERKRAESPEAMEEDEEEIAEIKAGHFEESMKYARRSVSDADIRKYQAFAQTLQQSRGFGSEFRFPDAPTGTTGAFPGAAATVGGVDPFATSGGAADDDDLYS

SEQ ID NO: 96841 - DNA, 1643 bp, Arabidopsis thaliana
  misc_feature (1)..(1643): Ceres Seq. ID no. 12734891
  misc_feature: MA Experiment ID: 20000173 Result: Up-regulated in Transcription
  misc_feature: MA Experiment 20000173 PARAMETER Experiment Name: At_42deg_Heat_P Parameter: Age (day) Value: 14
  misc_feature: MA Experiment 20000173 PARAMETER Experiment Name: At_42deg_Heat_P Parameter: Organism Value: A. thaliana
  misc_feature: MA Experiment 20000173 PARAMETER Experiment Name: At_42deg_Heat_P Parameter: Plant Line Value: WS
  misc_feature: MA Experiment 20000173 PARAMETER Experiment Name: At_42deg_Heat_P Parameter: Temperature (deg C) Value: 42 vs. 22
  misc_feature: MA Experiment 20000173 PARAMETER Experiment Name: At_42deg_Heat_P Parameter: Timepoint (hr) Value: 6
  misc_feature: MA Experiment 20000173 PARAMETER Experiment Name: At_42deg_Heat_P Parameter: Tissue Value: Aerial
  misc_feature: MA Experiment ID: 20000185 Result: Down-regulated in Transcription
  misc_feature: MA Experiment 20000185 PARAMETER Experiment Name: At_Roots__P Parameter: Age (day) Value: 7 vs. 21
  misc_feature: MA Experiment 20000185 PARAMETER Experiment Name: At_Roots__P Parameter: Organism Value: A. thaliana
  misc_feature: MA Experiment 20000185 PARAMETER Experiment Name: At_Roots__P Parameter: Tissue Value: Roots vs. Whole Plant
  misc_feature: MA Experiment ID: 20000234 Result: Down-regulated in Transcription
  misc_feature: MA Experiment 20000234 PARAMETER Experiment Name: At_Siliques_P Parameter: Age (day) Value: 21
  misc_feature: MA Experiment 20000234 PARAMETER Experiment Name: At_Siliques_P Parameter: Organism Value: A. thaliana
  misc_feature: MA Experiment 20000234 PARAMETER Experiment Name: At_Siliques_P Parameter: Plant Line Value: WS
  misc_feature: MA Experiment 20000234 PARAMETER Experiment Name: At_Siliques_P Parameter: Tissue Value: Less Than 5mm Siliques vs. Whole Plant
  misc_feature: MA Experiment ID: 20000264 Result: Down-regulated in Transcription
  misc_feature: MA Experiment 20000264 PARAMETER Experiment Name: At_Open_Flower_P Parameter: Age (day) Value: 21
  misc_feature: MA Experiment 20000264 PARAMETER Experiment Name: At_Open_Flower_P Parameter: Plant Line Value: WS
  misc_feature: MA Experiment 20000264 PARAMETER Experiment Name: At_Open_Flower_P Parameter: Tissue Value: Open Flower vs. Whole Plant
  misc_feature: MA Experiment ID: 20000265 Result: Down-regulated in Transcription
  misc_feature: MA Experiment 20000265 PARAMETER Experiment Name: At_Open_Flower_P Parameter: Age (day) Value: 21
  misc_feature: MA Experiment 20000265 PARAMETER Experiment Name: At_Open_Flower_P Parameter: Plant Line Value: WS
  misc_feature: MA Experiment 20000265 PARAMETER Experiment Name: At_Open_Flower_P Parameter: Tissue Value: Closed Flower vs. Whole Plant
  misc_feature: MA Experiment ID: 20000286 Result: Down-regulated in Transcription
  misc_feature: MA Experiment 20000286 PARAMETER Experiment Name: At_Open_Flower_P Parameter: Age (day) Value: 21
  misc_feature: MA Experiment 20000286 PARAMETER Experiment Name: At_Open_Flower_P Parameter: Plant Line Value: WS
  misc_feature: MA Experiment 20000286 PARAMETER Experiment Name: At_Open_Flower_P Parameter: Tissue Value: Half Open vs. Whole Plant
  misc_feature: MA Experiment ID: 20000439 Result: Down-regulated in Transcription
  misc_feature: MA Experiment 20000439 PARAMETER Experiment Name: At_Roots__P Parameter: Age (day) Value: 14 vs. 21
  misc_feature: MA Experiment 20000439 PARAMETER Experiment Name: At_Roots__P Parameter: Organism Value: A. thaliana
  misc_feature: MA Experiment 20000439 PARAMETER Experiment Name: At_Roots__P Parameter: Tissue Value: Roots vs. Whole Plant
  misc_feature: MA Experiment ID: 20000452 Result: Down-regulated in Transcription
  misc_feature: MA Experiment 20000452 PARAMETER Experiment Name: At_CS6879_Shoots-Roots_P Parameter: Age (day) Value: 14
  misc_feature: MA Experiment 20000452 PARAMETER Experiment Name: At_CS6879_Shoots-Roots_P Parameter: Organism Value: A. thaliana
  misc_feature: MA Experiment 20000452 PARAMETER Experiment Name: At_CS6879_Shoots-Roots_P Parameter: Plant Line Value: CS6879 vs. WS
  misc_feature: MA Experiment 20000452 PARAMETER Experiment Name: At_CS6879_Shoots-Roots_P Parameter: Tissue Value: Shoots
  misc_feature: MA Experiment ID: 20000794 Result: Down-regulated in Transcription
  misc_feature: MA Experiment 20000794 PARAMETER Experiment Name: At_Petals_P Parameter: Age (day) Value: 23-25 days
  misc_feature: MA Experiment 20000794 PARAMETER Experiment Name: At_Petals_P Parameter: Plant Line Value: WS
  misc_feature: MA Experiment 20000794 PARAMETER Experiment Name: At_Petals_P Parameter: Tissue Value: Petals vs. Whole plant
  misc_feature: MA Experiment ID: 20001560 Result: Down-regulated in Transcription
  misc_feature: MA Experiment 20001560 PARAMETER Experiment Name: At_Drought_Soil_Dry_P Parameter: Age (day) Value: 28
  misc_feature: MA Experiment 20001560 PARAMETER Experiment Name: At_Drought_Soil_Dry_P Parameter: Organism Value: A. thaliana
  misc_feature: MA Experiment 20001560 PARAMETER Experiment Name: At_Drought_Soil_Dry_P Parameter: Plant Line Value: WS
  misc_feature: MA Experiment 20001560 PARAMETER Experiment Name: At_Drought_Soil_Dry_P Parameter: Post Timepoint (hr) Value: None
  misc_feature: MA Experiment 20001560 PARAMETER Experiment Name: At_Drought_Soil_Dry_P Parameter: Post-Treatment Value: None
  misc_feature: MA Experiment 20001560 PARAMETER Experiment Name: At_Drought_Soil_Dry_P Parameter: Timepoint (day) Value: 14
  misc_feature: MA Experiment 20001560 PARAMETER Experiment Name: At_Drought_Soil_Dry_P Parameter: Treatment Value: Drought vs. No Drought
gataagaaaatgtctatctttctttgtttcctcttacttcttccactctctttaatcttcttgaaaaagctcttaccgtcgaaagggaagcttcctccgggacctaagggtcttccgatcatcggtaacttgcaccagtttggaagatttcttcacaaatctcttcacaaaatctcccaagaatatggaccggtgatgcttctccatttcggggtggtccctgtgataattgtctcttccaaagaaggagctgaggaagtgctcaagactcacgatcttgagacttgtagccgacctaagacggtggggagcgggttgtttacttacaactttaaagatattggttttgctccgtatggtgagaattggcgagagatgaggaaaattgcggtttccgagctctttagccagaagaagctcaaatctttcaggtatattagagaggacgagagccaattgttggtccggaaggtatcaaaatctgctcttgagacaccaacttcatcagttaatttgaggaaggtcatttttaccttcgcggcaagtatcatttgtagactttcttttggacaaaatttttgcgattttgtcgatatggagacagtggaagagttggtgcttgaatcggagaccaacctcggctccctggcgtttgctgacttcttacctgcagggtggatcatagatcggatctccggtcagcattccacggtgatgaaagccttttccaaactcaccaatttctttgaacttgtgattgatgatcatttgaagagtgggaaaatcgaagatcactcagacatcatcagtgtcatgttggatatgatcaacaaacccaccgaagttggttcttataaagtcaccgatgatcatctcaaaggacttatgtcggatgtgtttttggctggagtgaacgcgggttccatcacaatgatatggacgatgacagagttaagtagacatccgagagtgatgagaaaacttcaagaagagattcgagcagcgctcggacccaacaaagagaaaatcacagaagaagacctcgagaaagttgagtacttgaagatggtgatcgaggaagcattcagattacacccaccggctcctctcttactcccaagactaacaatgtccgacatcaatattcaaggctacagcattccaaagaacaccatgatccaaatcaacacgtacacaattggacgtgaccccaaaaactggacaaaacccgacgagttcatccccgagaggtttgtcgataaccctatcgaatacaagggtcaacattttgagctattgccgtttggagccggacgtagggtctgtcccgggatggccacggggatcaccatcgtcgagcttgggcttcttagccttctttacttcttcgattggagtttgcccaatggaatgaccactaaagatattgacatggaagaagacggagcttttgtcatcgccaagaaagtctctcttgagctcgtaccaactcttcatcgctggtgaagcatgcaactataactatgttaaataatgacaagaattctatatttatgtccactttactaccggtttggattttgctttgttcatgtaatccgcatgtttcatgttatctttcaagttctgtttttatgttattg

SEQ ID NO: 96842 - protein, 501 aa, Arabidopsis thaliana
  peptide (1)..(501): Ceres Seq. ID no. 12734892
  misc_feature (32)..(494): Pfam Name: Cytochrome P450 Pfam Description: Cytochrome P450
  misc_feature (4)..(501): Homolog of NCBI NO: 15231782 NR Description: cytochrome P450 monooxygenase; protein id: supported by cDNA: gi_3164131 [Arabidopsis thaliana]
  misc_feature (66)..(501): Homolog of NCBI NO: 15724230 NR Description: AT3g53280/T4D2_200 [Arabidopsis thaliana]
  misc_feature (66)..(501): Homolog of NCBI NO: 22655216 NR Description: cytochrome P450 71B5 [Arabidopsis thaliana]
  misc_feature (4)..(501): Homolog of NCBI NO: 15229913 NR Description: cytochrome p450 family; protein id: At3g44250.1
  misc_feature (4)..(501): Homolog of NCBI NO: 15231525 NR Description: cytochrome p450 family; protein id: At3g26200.1, by cDNA: gi_13430717 [Arabidopsis thaliana] Cytochrome P450 71B22 >gi|11994439|dbj|BAB02441.1| cytochrome
  misc_feature (4)..(499): Homolog of NCBI NO: 15231524 NR Description: cytochrome p450 family; protein id: At3g26190.1 thaliana] >gi|13878385|sp|Q9LTM2|C72L_ARATH Cytochrome P450 71B21
  misc_feature (5)..(498): Homolog of NCBI NO: 13878369 NR Description: CYTOCHROME P450 71B8
  misc_feature (4)..(498): Homolog of NCBI NO: 15231786 NR Description: cytochrome p450 family; protein id: At3g53300.1, by cDNA: gi_15810490 [Arabidopsis thaliana] Cytochrome P450 71B31 >gi|11249493|pir||T46176 probable
  misc_feature (4)..(498): Homolog of NCBI NO: 15810491 NR Description: putative cytochrome P450 protein [Arabidopsis
  misc_feature (4)..(499): Homolog of NCBI NO: 15222182 NR Description: cytochrome p450 family; protein id: At1g13110.1, by cDNA: gi_18087622 [Arabidopsis thaliana]
DKKMSIFLCFLLLLPLSLIFLKKLLPSKGKLPPGPKGLPIIGNLHQFGRFLHKSLHKISQEYGPVMLLHFGVVPVIIVSSKEGAEEVLKTHDLETCSRPKTVGSGLFTYNFKDIGFAPYGENWREMRKIAVSELFSQKKLKSFRYIREDESQLLVRKVSKSALETPTSSVNLRKVIFTFAASIICRLSFGQNFCDFVDMETVEELVLESETNLGSLAFADFLPAGWIIDRISGQHSTVMKAFSKLTNFFELVIDDHLKSGKIEDHSDIISVMLDMINKPTEVGSYKVTDDHLKGLMSDVFLAGVNAGSITMIWTMTELSRHPRVMRKLQEEIRAALGPNKEKITEEDLEKVEYLKMVIEEAFRLHPPAPLLLPRLTMSDINIQGYSIPKNTMIQINTYTIGRDPKNWTKPDEFIPERFVDNPIEYKGQHFELLPFGAGRRVCPGMATGITIVELGLLSLLYFFDWSLPNGMTTKDIDMEEDGAFVIAKKVSLELVPTLHRW

SEQ ID NO: 96843 - protein, 498 aa, Arabidopsis thaliana
  peptide (1)..(498): Ceres Seq. ID no. 12734893
  misc_feature (29)..(491): Pfam Name: Cytochrome P450 Pfam Description: Cytochrome P450
  misc_feature (1)..(498): Homolog of NCBI NO: 15231782 NR Description: cytochrome P450 monooxygenase; protein id: supported by cDNA: gi_3164131 [Arabidopsis thaliana]
  misc_feature (63)..(498): Homolog of NCBI NO: 15724230 NR Description: AT3g53280/T4D2_200 [Arabidopsis thaliana]
  misc_feature (63)..(498): Homolog of NCBI NO: 22655216 NR Description: cytochrome P450 71B5 [Arabidopsis thaliana]
  misc_feature (1)..(498): Homolog of NCBI NO: 15229913 NR Description: cytochrome p450 family; protein id: At3g44250.1
  misc_feature (1)..(498): Homolog of NCBI NO: 15231525 NR Description: cytochrome p450 family; protein id: At3g26200.1, by cDNA: gi_13430717 [Arabidopsis thaliana] Cytochrome P450 71B22 >gi|11994439|dbj|BAB02441.1| cytochrome
  misc_feature (1)..(496): Homolog of NCBI NO: 15231524 NR Description: cytochrome p450 family; protein id: At3g26190.1 thaliana] >gi|13878385|sp|Q9LTM2|C72L_ARATH Cytochrome P450 71B21
  misc_feature (2)..(495): Homolog of NCBI NO: 13878369 NR Description: CYTOCHROME P450 71B8
  misc_feature (1)..(495): Homolog of NCBI NO: 15231786 NR Description: cytochrome p450 family; protein id: At3g53300.1, by cDNA: gi_15810490 [Arabidopsis thaliana] Cytochrome P450 71B31 >gi|11249493|pir||T46176 probable
  misc_feature (1)..(495): Homolog of NCBI NO: 15810491 NR Description: putative cytochrome P450 protein [Arabidopsis
  misc_feature (1)..(496): Homolog of NCBI NO: 15222182 NR Description: cytochrome p450 family; protein id: At1g13110.1, by cDNA: gi_18087622 [Arabidopsis thaliana]
MSIFLCFLLLLPLSLIFLKKLLPSKGKLPPGPKGLPIIGNLHQFGRFLHKSLHKISQEYGPVMLLHFGVVPVIIVSSKEGAEEVLKTHDLETCSRPKTVGSGLFTYNFKDIGFAPYGENWREMRKIAVSELFSQKKLKSFRYIREDESQLLVRKVSKSALETPTSSVNLRKVIFTFAASIICRLSFGQNFCDFVDMETVEELVLESETNLGSLAFADFLPAGWIIDRISGQHSTVMKAFSKLTNFFELVIDDHLKSGKIEDHSDIISVMLDMINKPTEVGSYKVTDDHLKGLMSDVFLAGVNAGSITMIWTMTELSRHPRVMRKLQEEIRAALGPNKEKITEEDLEKVEYLKMVIEEAFRLHPPAPLLLPRLTMSDINIQGYSIPKNTMIQINTYTIGRDPKNWTKPDEFIPERFVDNPIEYKGQHFELLPFGAGRRVCPGMATGITIVELGLLSLLYFFDWSLPNGMTTKDIDMEEDGAFVIAKKVSLELVPTLHRW

SEQ ID NO: 96844 - protein, 436 aa, Arabidopsis thaliana
  peptide (1)..(436): Ceres Seq. ID no. 12734894
  misc_feature (1)..(429): Pfam Name: Cytochrome P450 Pfam Description: Cytochrome P450
  misc_feature (1)..(436): Homolog of NCBI NO: 15231782 NR Description: cytochrome P450 monooxygenase; protein id: supported by cDNA: gi_3164131 [Arabidopsis thaliana]
  misc_feature (1)..(436): Homolog of NCBI NO: 15724230 NR Description: AT3g53280/T4D2_200 [Arabidopsis thaliana]
  misc_feature (1)..(436): Homolog of NCBI NO: 22655216 NR Description: cytochrome P450 71B5 [Arabidopsis thaliana]
  misc_feature (1)..(436): Homolog of NCBI NO: 15229913 NR Description: cytochrome p450 family; protein id: At3g44250.1
  misc_feature (1)..(436): Homolog of NCBI NO: 15231525 NR Description: cytochrome p450 family; protein id: At3g26200.1, by cDNA: gi_13430717 [Arabidopsis thaliana] Cytochrome P450 71B22 >gi|11994439|dbj|BAB02441.1| cytochrome
  misc_feature (1)..(434): Homolog of NCBI NO: 15231524 NR Description: cytochrome p450 family; protein id: At3g26190.1 thaliana] >gi|13878385|sp|Q9LTM2|C72L_ARATH Cytochrome P450 71B21
  misc_feature (1)..(433): Homolog of NCBI NO: 13878369 NR Description: CYTOCHROME P450 71B8
  misc_feature (1)..(433): Homolog of NCBI NO: 15231786 NR Description: cytochrome p450 family; protein id: At3g53300.1, by cDNA: gi_15810490 [Arabidopsis thaliana] Cytochrome P450 71B31 >gi|11249493|pir||T46176 probable
  misc_feature (1)..(433): Homolog of NCBI NO: 15810491 NR Description: putative cytochrome P450 protein [Arabidopsis
  misc_feature (1)..(434): Homolog of NCBI NO: 15222182 NR Description: cytochrome p450 family; protein id: At1g13110.1, by cDNA: gi_18087622 [Arabidopsis thaliana]
MLLHFGVVPVIIVSSKEGAEEVLKTHDLETCSRPKTVGSGLFTYNFKDIGFAPYGENWREMRKIAVSELFSQKKLKSFRYIREDESQLLVRKVSKSALETPTSSVNLRKVIFTFAASIICRLSFGQNFCDFVDMETVEELVLESETNLGSLAFADFLPAGWIIDRISGQHSTVMKAFSKLTNFFELVIDDHLKSGKIEDHSDIISVMLDMINKPTEVGSYKVTDDHLKGLMSDVFLAGVNAGSITMIWTMTELSRHPRVMRKLQEEIRAALGPNKEKITEEDLEKVEYLKMVIEEAFRLHPPAPLLLPRLTMSDINIQGYSIPKNTMIQINTYTIGRDPKNWTKPDEFIPERFVDNPIEYKGQHFELLPFGAGRRVCPGMATGITIVELGLLSLLYFFDWSLPNGMTTKDIDMEEDGAFVIAKKVSLELVPTLHRW

SEQ ID NO: 96845 - DNA, 1224 bp, Arabidopsis thaliana
  misc_feature (1)..(1224): Ceres Seq. ID no. 12734895
  misc_feature: MA Experiment ID: 20000173 Result: Up-regulated in Transcription
  misc_feature: MA Experiment 20000173 PARAMETER Experiment Name: At_42deg_Heat_P Parameter: Age (day) Value: 14
  misc_feature: MA Experiment 20000173 PARAMETER Experiment Name: At_42deg_Heat_P Parameter: Organism Value: A. thaliana
  misc_feature: MA Experiment 20000173 PARAMETER Experiment Name: At_42deg_Heat_P Parameter: Plant Line Value: WS
  misc_feature: MA Experiment 20000173 PARAMETER Experiment Name: At_42deg_Heat_P Parameter: Temperature (deg C) Value: 42 vs. 22
  misc_feature: MA Experiment 20000173 PARAMETER Experiment Name: At_42deg_Heat_P Parameter: Timepoint (hr) Value: 6
  misc_feature: MA Experiment 20000173 PARAMETER Experiment Name: At_42deg_Heat_P Parameter: Tissue Value: Aerial
  misc_feature: MA Experiment ID: 20000234 Result: Down-regulated in Transcription
  misc_feature: MA Experiment 20000234 PARAMETER Experiment Name: At_Siliques_P Parameter: Age (day) Value: 21
  misc_feature: MA Experiment 20000234 PARAMETER Experiment Name: At_Siliques_P Parameter: Organism Value: A. thaliana
  misc_feature: MA Experiment 20000234 PARAMETER Experiment Name: At_Siliques_P Parameter: Plant Line Value: WS
  misc_feature: MA Experiment 20000234 PARAMETER Experiment Name: At_Siliques_P Parameter: Tissue Value: Less Than 5mm Siliques vs. Whole Plant
  misc_feature: MA Experiment ID: 20000235 Result: Down-regulated in Transcription
  misc_feature: MA Experiment 20000235 PARAMETER Experiment Name: At_Siliques_P Parameter: Age (day) Value: 21
  misc_feature: MA Experiment 20000235 PARAMETER Experiment Name: At_Siliques_P Parameter: Organism Value: A. thaliana
  misc_feature: MA Experiment 20000235 PARAMETER Experiment Name: At_Siliques_P Parameter: Plant Line Value: WS
  misc_feature: MA Experiment 20000235 PARAMETER Experiment Name: At_Siliques_P Parameter: Tissue Value: 5-10mm Siliques vs. Whole Plant
  misc_feature: MA Experiment ID: 20000452 Result: Down-regulated in Transcription
  misc_feature: MA Experiment 20000452 PARAMETER Experiment Name: At_CS6879_Shoots-Roots_P Parameter: Age (day) Value: 14
  misc_feature: MA Experiment 20000452 PARAMETER Experiment Name: At_CS6879_Shoots-Roots_P Parameter: Organism Value: A. thaliana
  misc_feature: MA Experiment 20000452 PARAMETER Experiment Name: At_CS6879_Shoots-Roots_P Parameter: Plant Line Value: CS6879 vs. WS
  misc_feature: MA Experiment 20000452 PARAMETER Experiment Name: At_CS6879_Shoots-Roots_P Parameter: Tissue Value: Shoots
  misc_feature: MA Experiment ID: 20000794 Result: Up-regulated in Transcription
  misc_feature: MA Experiment 20000794 PARAMETER Experiment Name: At_Petals_P Parameter: Age (day) Value: 23-25 days
  misc_feature: MA Experiment 20000794 PARAMETER Experiment Name: At_Petals_P Parameter: Plant Line Value: WS
  misc_feature: MA Experiment 20000794 PARAMETER Experiment Name: At_Petals_P Parameter: Tissue Value: Petals vs. Whole plant
  misc_feature: MA Experiment ID: 20001909 Result: Up-regulated in Transcription
  misc_feature: MA Experiment 20001909 PARAMETER Experiment Name: At_Drought_Reproduction_P Parameter: Age (day) Value: 35
  misc_feature: MA Experiment 20001909 PARAMETER Experiment Name: At_Drought_Reproduction_P Parameter: Organism Value: A. thaliana
  misc_feature: MA Experiment 20001909 PARAMETER Experiment Name: At_Drought_Reproduction_P Parameter: Plant Line Value: WS
  misc_feature: MA Experiment 20001909 PARAMETER Experiment Name: At_Drought_Reproduction_P Parameter: Timepoint (day) Value: 5
  misc_feature: MA Experiment 20001909 PARAMETER Experiment Name: At_Drought_Reproduction_P Parameter: Tissue Value: Flowers
  misc_feature: MA Experiment 20001909 PARAMETER Experiment Name: At_Drought_Reproduction_P Parameter: Treatment Value: Drought vs. No Drought
atgttcttttatctttatttatcatcatcagctaaagaagttctcaagactcatgacctagagacatgcactcgacctaagatggtcacgaccggtttgttttcttacaacttcaaagacattggtttcactcaatatggagaggaatggggagagatgaaaaagcttatagggcttgagctctttagtccaaaaacgcaaaagtcttttaggtatatcagagaggaagagagtgacttgctggtcaagaaaatttcaaaatctgctcaaacacaaaccctagtggatttgggaaaaccccttttctccttcactgccggtattatatttagacttgcgtttggacagaacttccgtaagtgcgattttatcgatagggagagagtcgaagagctggtggtagagtcagagaccaacgtaggcaccttggcattttctgacttcttccccacgggtctcggatggcttatagaccggctctctggtcaaagttcgaggatgaacaaagtcttttccaaactcaccaatttatttgaacatgtgattgatgatcatttaaagactgaacaacatcaagatcactcaaacctcatcagtgccatgttgaatatgatcaataaacccaccaatataggctctttcaagatcacttccgatcatctcaaaggagtcatgtcggttagtgtgtatgatttcttaactggtactctgattcgagcaacactcggttccaacaaagagagaatcacagaagaagatctagagaaagttgagtacctaaagatggtgatcgaggaaacattcagactacacccacctgctccactcttgctcccaagattaacaatgtccgacgtcacaattcaaggctacaacattcccaaaaacaccatgattgagatcaacacttataccataggtcgtgatccaaaatgttggactaaccctgaagaattcattcctgagaggttttccaacacctctataaactacaagggtcagcatttcgagctcttgccctttggagctggtcgtaggagctgtcccggaatgtccttgggaatcaccattcttgagctaggccttcttaaccttctttatttctttgattggcgtttgcccaatggaatgaccattgctgacattgacatggaagaagttggagctttaaacatagctaagaaagtacctcttgagctcgtaccaactcttcatcattcgtga

SEQ ID NO: 96846 - protein, 407 aa, Arabidopsis thaliana
  peptide (1)..(407): Ceres Seq. ID no. 12734896
  misc_feature (8)..(226): Pfam Name: Cytochrome P450 Pfam Description: Cytochrome P450
  misc_feature (1)..(407): Homolog of NCBI NO: 15231784 NR Description: cytochrome p450 family; protein id: At3g53290.1 thaliana] >gi|11249499|pir||T46175 probable cytochrome P450
  misc_feature (8)..(226): Homolog of NCBI NO: 15231786 NR Description: cytochrome p450 family; protein id: At3g53300.1, by cDNA: gi_15810490 [Arabidopsis thaliana] Cytochrome P450 71B31 >gi|11249493|pir||T46176 probable
  misc_feature (238)..(404): Homolog of NCBI NO: 15231786 NR Description: cytochrome p450 family; protein id: At3g53300.1, by cDNA: gi_15810490 [Arabidopsis thaliana] Cytochrome P450 71B31 >gi|11249493|pir||T46176 probable
  misc_feature (10)..(226): Homolog of NCBI NO: 15231524 NR Description: cytochrome p450 family; protein id: At3g26190.1 thaliana] >gi|13878385|sp|Q9LTM2|C72L_ARATH Cytochrome P450 71B21
  misc_feature (238)..(406): Homolog of NCBI NO: 15231524 NR Description: cytochrome p450 family; protein id: At3g26190.1 thaliana] >gi|13878385|sp|Q9LTM2|C72L_ARATH Cytochrome P450 71B21
  misc_feature (8)..(226): Homolog of NCBI NO: 15810491 NR Description: putative cytochrome P450 protein [Arabidopsis
  misc_feature (238)..(404): Homolog of NCBI NO: 15810491 NR Description: putative cytochrome P450 protein [Arabidopsis
  misc_feature (10)..(226): Homolog of NCBI NO: 15231525 NR Description: cytochrome p450 family; protein id: At3g26200.1, by cDNA: gi_13430717 [Arabidopsis thaliana] Cytochrome P450 71B22 >gi|11994439|dbj|BAB02441.1| cytochrome
  misc_feature (238)..(405): Homolog of NCBI NO: 15231525 NR Description: cytochrome p450 family; protein id: At3g26200.1, by cDNA: gi_13430717 [Arabidopsis thaliana] Cytochrome P450 71B22 >gi|11994439|dbj|BAB02441.1| cytochrome
  misc_feature (11)..(226): Homolog of NCBI NO: 30923413 NR Description: Cytochrome P450 71B38
MFFYLYLSSSAKEVLKTHDLETCTRPKMVTTGLFSYNFKDIGFTQYGEEWGEMKKLIGLELFSPKTQKSFRYIREEESDLLVKKISKSAQTQTLVDLGKPLFSFTAGIIFRLAFGQNFRKCDFIDRERVEELVVESETNVGTLAFSDFFPTGLGWLIDRLSGQSSRMNKVFSKLTNLFEHVIDDHLKTEQHQDHSNLISAMLNMINKPTNIGSFKITSDHLKGVMSVSVYDFLTGTLIRATLGSNKERITEEDLEKVEYLKMVIEETFRLHPPAPLLLPRLTMSDVTIQGYNIPKNTMIEINTYTIGRDPKCWTNPEEFIPERFSNTSINYKGQHFELLPFGAGRRSCPGMSLGITILELGLLNLLYFFDWRLPNGMTIADIDMEEVGALNIAKKVPLELVPTLHHS

SEQ ID NO: 96847 - protein, 380 aa, Arabidopsis thaliana
  peptide (1)..(380): Ceres Seq. ID no. 12734897
  misc_feature (1)..(199): Pfam Name: Cytochrome P450 Pfam Description: Cytochrome P450
  misc_feature (1)..(380): Homolog of NCBI NO: 15231784 NR Description: cytochrome p450 family; protein id: At3g53290.1 thaliana] >gi|11249499|pir||T46175 probable cytochrome P450
  misc_feature (1)..(199): Homolog of NCBI NO: 15231786 NR Description: cytochrome p450 family; protein id: At3g53300.1, by cDNA: gi_15810490 [Arabidopsis thaliana] Cytochrome P450 71B31 >gi|11249493|pir||T46176 probable
  misc_feature (211)..(377): Homolog of NCBI NO: 15231786 NR Description: cytochrome p450 family; protein id: At3g53300.1, by cDNA: gi_15810490 [Arabidopsis thaliana] Cytochrome P450 71B31 >gi|11249493|pir||T46176 probable
  misc_feature (1)..(199): Homolog of NCBI NO: 15231524 NR Description: cytochrome p450 family; protein id: At3g26190.1 thaliana] >gi|13878385|sp|Q9LTM2|C72L_ARATH Cytochrome P450 71B21
  misc_feature (211)..(379): Homolog of NCBI NO: 15231524 NR Description: cytochrome p450 family; protein id: At3g26190.1 thaliana] >gi|13878385|sp|Q9LTM2|C72L_ARATH Cytochrome P450 71B21
  misc_feature (1)..(199): Homolog of NCBI NO: 15810491 NR Description: putative cytochrome P450 protein [Arabidopsis
  misc_feature (211)..(377): Homolog of NCBI NO: 15810491 NR Description: putative cytochrome P450 protein [Arabidopsis
  misc_feature (1)..(199): Homolog of NCBI NO: 15231525 NR Description: cytochrome p450 family; protein id: At3g26200.1, by cDNA: gi_13430717 [Arabidopsis thaliana] Cytochrome P450 71B22 >gi|11994439|dbj|BAB02441.1| cytochrome
  misc_feature (211)..(378): Homolog of NCBI NO: 15231525 NR Description: cytochrome p450 family; protein id: At3g26200.1, by cDNA: gi_13430717 [Arabidopsis thaliana] Cytochrome P450 71B22 >gi|11994439|dbj|BAB02441.1| cytochrome
  misc_feature (1)..(199): Homolog of NCBI NO: 30923413 NR Description: Cytochrome P450 71B38
MVTTGLFSYNFKDIGFTQYGEEWGEMKKLIGLELFSPKTQKSFRYIREEESDLLVKKISKSAQTQTLVDLGKPLFSFTAGIIFRLAFGQNFRKCDFIDRERVEELVVESETNVGTLAFSDFFPTGLGWLIDRLSGQSSRMNKVFSKLTNLFEHVIDDHLKTEQHQDHSNLISAMLNMINKPTNIGSFKITSDHLKGVMSVSVYDFLTGTLIRATLGSNKERITEEDLEKVEYLKMVIEETFRLHPPAPLLLPRLTMSDVTIQGYNIPKNTMIEINTYTIGRDPKCWTNPEEFIPERFSNTSINYKGQHFELLPFGAGRRSCPGMSLGITILELGLLNLLYFFDWRLPNGMTIADIDMEEVGALNIAKKVPLELVPTLHHS

SEQ ID NO: 96848 - protein, 355 aa, Arabidopsis thaliana
  peptide (1)..(355): Ceres Seq. ID no. 12734898
  misc_feature (1)..(174): Pfam Name: Cytochrome P450 Pfam Description: Cytochrome P450
  misc_feature (1)..(355): Homolog of NCBI NO: 15231784 NR Description: cytochrome p450 family; protein id: At3g53290.1 thaliana] >gi|11249499|pir||T46175 probable cytochrome P450
  misc_feature (1)..(174): Homolog of NCBI NO: 15231786 NR Description: cytochrome p450 family; protein id: At3g53300.1, by cDNA: gi_15810490 [Arabidopsis thaliana] Cytochrome P450 71B31 >gi|11249493|pir||T46176 probable
  misc_feature (186)..(352): Homolog of NCBI NO: 15231786 NR Description: cytochrome p450 family; protein id: At3g53300.1, by cDNA: gi_15810490 [Arabidopsis thaliana] Cytochrome P450 71B31 >gi|11249493|pir||T46176 probable
  misc_feature (1)..(174): Homolog of NCBI NO: 15231524 NR Description: cytochrome p450 family; protein id: At3g26190.1 thaliana] >gi|13878385|sp|Q9LTM2|C72L_ARATH Cytochrome P450 71B21
  misc_feature (186)..(354): Homolog of NCBI NO: 15231524 NR Description: cytochrome p450 family; protein id: At3g26190.1 thaliana] >gi|13878385|sp|Q9LTM2|C72L_ARATH Cytochrome P450 71B21
  misc_feature (1)..(174): Homolog of NCBI NO: 15810491 NR Description: putative cytochrome P450 protein [Arabidopsis
  misc_feature (186)..(352): Homolog of NCBI NO: 15810491 NR Description: putative cytochrome P450 protein [Arabidopsis
  misc_feature (1)..(174): Homolog of NCBI NO: 15231525 NR Description: cytochrome p450 family; protein id: At3g26200.1, by cDNA: gi_13430717 [Arabidopsis thaliana] Cytochrome P450 71B22 >gi|11994439|dbj|BAB02441.1| cytochrome
  misc_feature (186)..(353): Homolog of NCBI NO: 15231525 NR Description: cytochrome p450 family; protein id: At3g26200.1, by cDNA: gi_13430717 [Arabidopsis thaliana] Cytochrome P450 71B22 >gi|11994439|dbj|BAB02441.1| cytochrome
  misc_feature (1)..(174): Homolog of NCBI NO: 30923413 NR Description: Cytochrome P450 71B38
MKKLIGLELFSPKTQKSFRYIREEESDLLVKKISKSAQTQTLVDLGKPLFSFTAGIIFRLAFGQNFRKCDFIDRERVEELVVESETNVGTLAFSDFFPTGLGWLIDRLSGQSSRMNKVFSKLTNLFEHVIDDHLKTEQHQDHSNLISAMLNMINKPTNIGSFKITSDHLKGVMSVSVYDFLTGTLIRATLGSNKERITEEDLEKVEYLKMVIEETFRLHPPAPLLLPRLTMSDVTIQGYNIPKNTMIEINTYTIGRDPKCWTNPEEFIPERFSNTSINYKGQHFELLPFGAGRRSCPGMSLGITILELGLLNLLYFFDWRLPNGMTIADIDMEEVGALNIAKKVPLELVPTLHHS

SEQ ID NO: 96849 - DNA, 1017 bp, Arabidopsis thaliana
  misc_feature (1)..(1017): Ceres Seq. ID no. 12734899
  misc_feature: MA Experiment ID: 20001451 Result: Up-regulated in Transcription
  misc_feature: MA Experiment 20001451 PARAMETER Experiment Name: At_Far-red-induction_P Parameter: Age (day) Value: 7
  misc_feature: MA Experiment 20001451 PARAMETER Experiment Name: At_Far-red-induction_P Parameter: Light Value: Far-red vs. White
  misc_feature: MA Experiment 20001451 PARAMETER Experiment Name: At_Far-red-induction_P Parameter: Organism Value: A. thaliana
  misc_feature: MA Experiment 20001451 PARAMETER Experiment Name: At_Far-red-induction_P Parameter: Plant Line Value: Columbia
  misc_feature: MA Experiment 20001451 PARAMETER Experiment Name: At_Far-red-induction_P Parameter: Timepoint (hr) Value: 24
  misc_feature: MA Experiment 20001451 PARAMETER Experiment Name: At_Far-red-induction_P Parameter: Tissue Value: Whole Plant
atgcttctccgttttggagttgtccctgtggtcgtgttctcttccaaggaagcagctaaagaagttctcaaaactcatgacttagatacttgcacccgacctaagctagtcgcgaatgggttgttttctcgcaacttcaaagacattggtttcactcagtacggtgaagactggcgagagatgaaaaagctggtggggcttgagctctttagtccgaaaaagcataagtctttcaggtatatcagagaggaagaaggtgacttgctggtcaagaaaatatcaaattccgctcaaacacagaccctaatagatttgagaaaagcctctttctccttcaccgccggtacaatcttcagactagcctttggacagaacttccaccagtgcgatttcatggatatggacagacttgaagagctggtgctagaggcggaaaccaacggatgcatcttggcactcacagacttcttacccacgggtcttggttggcttgtagaccggatatctggatgtggttttggcgggagtgaatgcgggaacaatcacaatgatctacaaaaagtcgagtacttgaatatggtgatcaaagaaacattcagattacatccaccatctcccctcttgctaccaagagaaacaatgtccgatatcgagattcaaggctaccacattcccaagaacgcccttatcaggatcaacacttacactataggacgtgatctgaaatgttggtctaaccctgagaggtttttgaatacctcaatcaactacaaaggtcaggattacaagctcttgcccttcggagcaggccgtagaagctgtcctggtatgaacttgggaatcaccattcttgagctaggccttcttaacattctttacttctttgattggagttttcccaatggaatgaccattgaagacattgacatggaggaaaacggagctttaaacaaaacccttgagctcataccaactcttccatcagcactgtcagatggatcatctggatggagatga

SEQ ID NO: 96850 - protein, 338 aa, Arabidopsis thaliana
  peptide (1)..(338): Ceres Seq. ID no. 12734900
  misc_feature (1)..(170): Pfam Name: Cytochrome P450 Pfam Description: Cytochrome P450
  misc_feature (1)..(338): Homolog of NCBI NO: 22331763 NR Description: similar to cytochrome p450 family; protein id:
  misc_feature (1)..(170): Homolog of NCBI NO: 13878369 NR Description: CYTOCHROME P450 71B8
  misc_feature (184)..(330): Homolog of NCBI NO: 13878369 NR Description: CYTOCHROME P450 71B8
  misc_feature (1)..(170): Homolog of NCBI NO: 15810491 NR Description: putative cytochrome P450 protein [Arabidopsis
  misc_feature (184)..(327): Homolog of NCBI NO: 15810491 NR Description: putative cytochrome P450 protein [Arabidopsis
  misc_feature (1)..(170): Homolog of NCBI NO: 15231786 NR Description: cytochrome p450 family; protein id: At3g53300.1, by cDNA: gi_15810490 [Arabidopsis thaliana] Cytochrome P450 71B31 >gi|11249493|pir||T46176 probable
  misc_feature (184)..(327): Homolog of NCBI NO: 15231786 NR Description: cytochrome p450 family; protein id: At3g53300.1, by cDNA: gi_15810490 [Arabidopsis thaliana] Cytochrome P450 71B31 >gi|11249493|pir||T46176 probable
  misc_feature (10)..(170): Homolog of NCBI NO: 22327366 NR Description: similar to cytochrome p450 family; protein id:
  misc_feature (184)..(330): Homolog of NCBI NO: 22327366 NR Description: similar to cytochrome p450 family; protein id:
  misc_feature (18)..(170): Homolog of NCBI NO: 15231784 NR Description: cytochrome p450 family; protein id: At3g53290.1 thaliana] >gi|11249499|pir||T46175 probable cytochrome P450
MLLRFGVVPVVVFSSKEAAKEVLKTHDLDTCTRPKLVANGLFSRNFKDIGFTQYGEDWREMKKLVGLELFSPKKHKSFRYIREEEGDLLVKKISNSAQTQTLIDLRKASFSFTAGTIFRLAFGQNFHQCDFMDMDRLEELVLEAETNGCILALTDFLPTGLGWLVDRISGCGFGGSECGNNHNDLQKVEYLNMVIKETFRLHPPSPLLLPRETMSDIEIQGYHIPKNALIRINTYTIGRDLKCWSNPERFLNTSINYKGQDYKLLPFGAGRRSCPGMNLGITILELGLLNILYFFDWSFPNGMTIEDIDMEENGALNKTLELIPTLPSALSDGSSGWR

SEQ ID NO: 96851 - protein, 278 aa, Arabidopsis thaliana
  peptide (1)..(278): Ceres Seq. ID no. 12734901
  misc_feature (1)..(110): Pfam Name: Cytochrome P450 Pfam Description: Cytochrome P450
  misc_feature (1)..(278): Homolog of NCBI NO: 22331763 NR Description: similar to cytochrome p450 family; protein id:
  misc_feature (1)..(110): Homolog of NCBI NO: 13878369 NR Description: CYTOCHROME P450 71B8
  misc_feature (124)..(270): Homolog of NCBI NO: 13878369 NR Description: CYTOCHROME P450 71B8
  misc_feature (1)..(110): Homolog of NCBI NO: 15810491 NR Description: putative cytochrome P450 protein [Arabidopsis
  misc_feature (124)..(267): Homolog of NCBI NO: 15810491 NR Description: putative cytochrome P450 protein [Arabidopsis
  misc_feature (1)..(110): Homolog of NCBI NO: 15231786 NR Description: cytochrome p450 family; protein id: At3g53300.1, by cDNA: gi_15810490 [Arabidopsis thaliana] Cytochrome P450 71B31 >gi|11249493|pir||T46176 probable
  misc_feature (124)..(267): Homolog of NCBI NO: 15231786 NR Description: cytochrome p450 family; protein id: At3g53300.1, by cDNA: gi_15810490 [Arabidopsis thaliana] Cytochrome P450 71B31 >gi|11249493|pir||T46176 probable
  misc_feature (1)..(110): Homolog of NCBI NO: 22327366 NR Description: similar to cytochrome p450 family; protein id:
  misc_feature (124)..(270): Homolog of NCBI NO: 22327366 NR Description: similar to cytochrome p450 family; protein id:
  misc_feature (1)..(110): Homolog of NCBI NO: 15231784 NR Description: cytochrome p450 family; protein id: At3g53290.1 thaliana] >gi|11249499|pir||T46175 probable cytochrome P450
MKKLVGLELFSPKKHKSFRYIREEEGDLLVKKISNSAQTQTLIDLRKASFSFTAGTIFRLAFGQNFHQCDFMDMDRLEELVLEAETNGCILALTDFLPTGLGWLVDRISGCGFGGSECGNNHNDLQKVEYLNMVIKETFRLHPPSPLLLPRETMSDIEIQGYHIPKNALIRINTYTIGRDLKCWSNPERFLNTSINYKGQDYKLLPFGAGRRSCPGMNLGITILELGLLNILYFFDWSFPNGMTIEDIDMEENGALNKTLELIPTLPSALSDGSSGWR

SEQ ID NO: 96852 - protein, 207 aa, Arabidopsis thaliana
  peptide (1)..(207): Ceres Seq. ID no. 12734902
  misc_feature (53)..(186): Pfam Name: Cytochrome P450 Pfam Description: Cytochrome P450
  misc_feature (1)..(207): Homolog of NCBI NO: 22331763 NR Description: similar to cytochrome p450 family; protein id:
  misc_feature (1)..(39): Homolog of NCBI NO: 13878369 NR Description: CYTOCHROME P450 71B8
  misc_feature (53)..(199): Homolog of NCBI NO: 13878369 NR Description: CYTOCHROME P450 71B8
  misc_feature (1)..(39): Homolog of NCBI NO: 15810491 NR Description: putative cytochrome P450 protein [Arabidopsis
  misc_feature (53)..(196): Homolog of NCBI NO: 15810491 NR Description: putative cytochrome P450 protein [Arabidopsis
  misc_feature (1)..(39): Homolog of NCBI NO: 15231786 NR Description: cytochrome p450 family; protein id: At3g53300.1, by cDNA: gi_15810490 [Arabidopsis thaliana] Cytochrome P450 71B31 >gi|11249493|pir||T46176 probable
  misc_feature (53)..(196): Homolog of NCBI NO: 15231786 NR Description: cytochrome p450 family; protein id: At3g53300.1, by cDNA: gi_15810490 [Arabidopsis thaliana] Cytochrome P450 71B31 >gi|11249493|pir||T46176 probable
  misc_feature (1)..(39): Homolog of NCBI NO: 22327366 NR Description: similar to cytochrome p450 family; protein id:
  misc_feature (53)..(199): Homolog of NCBI NO: 22327366 NR Description: similar to cytochrome p450 family; protein id:
  misc_feature (1)..(39): Homolog of NCBI NO: 15231784 NR Description: cytochrome p450 family; protein id: At3g53290.1 thaliana] >gi|11249499|pir||T46175 probable cytochrome P450
MDMDRLEELVLEAETNGCILALTDFLPTGLGWLVDRISGCGFGGSECGNNHNDLQKVEYLNMVIKETFRLHPPSPLLLPRETMSDIEIQGYHIPKNALIRINTYTIGRDLKCWSNPERFLNTSINYKGQDYKLLPFGAGRRSCPGMNLGITILELGLLNILYFFDWSFPNGMTIEDIDMEENGALNKTLELIPTLPSALSDGSSGWR

SEQ ID NO: 96853 - DNA, 2307 bp, Arabidopsis thaliana
  misc_feature (1)..(2307): Ceres Seq. ID no. 12734907
  misc_feature: MA Experiment ID: 20001451 Result: Down-regulated in Transcription
  misc_feature: MA Experiment 20001451 PARAMETER Experiment Name: At_Far-red-induction_P Parameter: Age (day) Value: 7
  misc_feature: MA Experiment 20001451 PARAMETER Experiment Name: At_Far-red-induction_P Parameter: Light Value: Far-red vs. White
  misc_feature: MA Experiment 20001451 PARAMETER Experiment Name: At_Far-red-induction_P Parameter: Organism Value: A. thaliana
  misc_feature: MA Experiment 20001451 PARAMETER Experiment Name: At_Far-red-induction_P Parameter: Plant Line Value: Columbia
  misc_feature: MA Experiment 20001451 PARAMETER Experiment Name: At_Far-red-induction_P Parameter: Timepoint (hr) Value: 24
  misc_feature: MA Experiment 20001451 PARAMETER Experiment Name: At_Far-red-induction_P Parameter: Tissue Value: Whole Plant
atggcgacaatgttacggttgggagctagagtttccgtcagcaacagtcagatactggcaacatcaagtgttgtatcaaccatcaagaccgaagaattaatgaatgatcacattaattccctatgtaaaagtaatttctaccgggaagcattggaagcgtttgattttgcgcagaagaactcaagcttcaagataaggttaagaacctacatctctttaatttgtgcttgctcttcatcgagatctctagcacaaggcagaaagatacatgatcacattttgaattccaactgcaagtatgatactattcttaataatcacattctaagtatgtatggaaaatgtggctcgctgagggatgccagagaggtttttgattttatgcctgaaaggaatttggtctcttacacatctgtcattactggctattcacagaacggtcagggagccgaggctatcagattatacttgaaaatgcttcaggaagatttagttcctgaccagtttgcatttggaagcattatcaaagcatgtgccagtagtagtgatgttgggttagggaagcaactgcatgctcaagtcattaagttggaatccagttctcatcttattgctcaaaatgctctgattgctatgtatgttcgcttcaatcaaatgtcagatgctagcagagtgttttatggtatcccaatgaaggatctaatttcgtggagttcaatcattgcagggttctcgcaacttgggtttgagtttgaagccctgagccacctaaaagaaatgttgtcttttggtgttttccatccaaatgaatatatatttggtagttctttaaaagcttgtagcagtctccttagaccagattatggaagccaaatacatgggttatgcattaagtcggagttagctggaaacgcaattgcaggctgttcgctctgtgacatgtatgctagatgcggtttcctgaattctgcaaggagagtgtttgatcagatagaaagacccgatacagcatcatggaatgtgatcattgctggacttgcaaataatggttacgctgatgaggctgtatcagttttctctcagatgaggagttctggttttattcctgatgccatctccttgcgttctttgctttgtgctcagacaaaaccaatggctttgtctcaaggaatgcaaattcactcttacattatcaagtggggtttcctggcagatcttacggtttgcaactctctgcttaccatgtacaccttctgctcagacttgtattgttgttttaatttatttgaagatttcagaaacaacgcagattctgtttcttggaatactattctgacggcttgtttgcaacacgaacagccagtagagatgttgagattgtttaagctgatgcttgtgtctgaatgtgagccagatcacataactatgggtaatctgttgcggggttgtgtggaaatctcatctctaaagttgggaagccaagtccattgctatagtttgaaaaccgggttggcgcctgagcaatttataaaaaatggactgattgatatgtatgccaagtgtggatcactggggcaagcgagaaggatttttgattcaatggataacagagatgtagtttcgtggagcaccttgatagttggatatgcacagtctggatttggagaggaagctctcatattgttcaaggaaatgaaaagtgcgggcatagagccaaatcatgtaacttttgtcggtgttcttactgcctgtagtcatgttgggctggtggaagaaggcttgaaactgtatgcgaccatgcaaactgaacacgggatttcaccaacaaaagagcactgctcttgcgtggtggacttactggctcgtgctggccgtttaaatgaagctgagagattcatcgatgaaatgaagttggaacctgatgttgtcgtgtggaagactctactgtctgcatgtaaaacccaaggaaatgttcatctcgcccaaaaagctgctgaaaatattctgaaaatcgatcctttcaactctacagctcatgtattgctctgcagcatgcatgcttcttctggaaattgggaaaatgctgcattgttgaggagctcaatgaaaaagcatgatgttaaaaaaattccaggacagagctggatcgaaattgaggacaaaattcatatattctttgctgaggatatttttcatccagagagggacgatatatatacagtcctgcacaacatctggtcgcagatgctagatgagtgtaatccgcaacacaagaaaagactccagtttatccatgaaaccggataa

SEQ ID NO: 96854 - protein, 768 aa, Arabidopsis thaliana
  peptide (1)..(768): Ceres Seq. ID no. 12734908
  misc_feature (439)..(473): Pfam Name: PPR repeat Pfam Description: PPR repeat
  misc_feature (40)..(749): Homolog of NCBI NO: 15235115 NR Description: putative protein; protein id: At4g39530.1
  misc_feature (25)..(752): Homolog of NCBI NO: 15228590 NR Description: hypothetical protein; protein id: At3g03580.1 thaliana] >gi|6091764|gb|AAF03474.1|AC009327_13 hypothetical [Arabidopsis thaliana] >gi|28393735|gb|AAO42278.1| unknown
  misc_feature (35)..(749): Homolog of NCBI NO: 37536800 NR Description: putative PPR-repeat protein [Oryza sativa
  misc_feature (70)..(745): Homolog of NCBI NO: 15236324 NR Description: putative protein; protein id: At4g13650.1
  misc_feature (86)..(742): Homolog of NCBI NO: 34915012 NR Description: P0458A05.10 [Oryza sativa (japonica
  misc_feature (3)..(755): Homolog of NCBI NO: 15232006 NR Description: hypothetical protein; protein id: At3g09040.1 thaliana] >gi|5923669|gb|AAD56320.1|AC009326_7 hypothetical
  misc_feature (72)..(747): Homolog of NCBI NO: 38423978 NR Description: PPR-repeat protein-like [Oryza sativa (japonica
  misc_feature (12)..(419): Homolog of NCBI NO: 15232885 NR Description: hypothetical protein; protein id: At3g02330.1
  misc_feature (439)..(749): Homolog of NCBI NO: 15232885 NR Description: hypothetical protein; protein id: At3g02330.1
  misc_feature (5)..(752): Homolog of NCBI NO: 15234006 NR Description: putative protein; protein id: At4g18750.1
MATMLRLGARVSVSNSQILATSSVVSTIKTEELMNDHINSLCKSNFYREALEAFDFAQKNSSFKIRLRTYISLICACSSSRSLAQGRKIHDHILNSNCKYDTILNNHILSMYGKCGSLRDAREVFDFMPERNLVSYTSVITGYSQNGQGAEAIRLYLKMLQEDLVPDQFAFGSIIKACASSSDVGLGKQLHAQVIKLESSSHLIAQNALIAMYVRFNQMSDASRVFYGIPMKDLISWSSIIAGFSQLGFEFEALSHLKEMLSFGVFHPNEYIFGSSLKACSSLLRPDYGSQIHGLCIKSELAGNAIAGCSLCDMYARCGFLNSARRVFDQIERPDTASWNVIIAGLANNGYADEAVSVFSQMRSSGFIPDAISLRSLLCAQTKPMALSQGMQIHSYIIKWGFLADLTVCNSLLTMYTFCSDLYCCFNLFEDFRNNADSVSWNTILTACLQHEQPVEMLRLFKLMLVSECEPDHITMGNLLRGCVEISSLKLGSQVHCYSLKTGLAPEQFIKNGLIDMYAKCGSLGQARRIFDSMDNRDVVSWSTLIVGYAQSGFGEEALILFKEMKSAGIEPNHVTFVGVLTACSHVGLVEEGLKLYATMQTEHGISPTKEHCSCVVDLLARAGRLNEAERFIDEMKLEPDVVVWKTLLSACKTQGNVHLAQKAAENILKIDPFNSTAHVLLCSMHASSGNWENAALLRSSMKKHDVKKIPGQSWIEIEDKIHIFFAEDIFHPERDDIYTVLHNIWSQMLDECNPQHKKRLQFIHETG

SEQ ID NO: 96855 - protein, 765 aa, Arabidopsis thaliana
  peptide (1)..(765): Ceres Seq. ID no. 12734909
  misc_feature (436)..(470): Pfam Name: PPR repeat Pfam Description: PPR repeat
  misc_feature (37)..(746): Homolog of NCBI NO: 15235115 NR Description: putative protein; protein id: At4g39530.1
  misc_feature (22)..(749): Homolog of NCBI NO: 15228590 NR Description: hypothetical protein; protein id: At3g03580.1 thaliana] >gi|6091764|gb|AAF03474.1|AC009327_13 hypothetical [Arabidopsis thaliana] >gi|28393735|gb|AAO42278.1| unknown
  misc_feature (32)..(746): Homolog of NCBI NO: 37536800 NR Description: putative PPR-repeat protein [Oryza sativa
  misc_feature (67)..(742): Homolog of NCBI NO: 15236324 NR Description: putative protein; protein id: At4g13650.1
  misc_feature (83)..(739): Homolog of NCBI NO: 34915012 NR Description: P0458A05.10 [Oryza sativa (japonica
  misc_feature (1)..(752): Homolog of NCBI NO: 15232006 NR Description: hypothetical protein; protein id: At3g09040.1 thaliana] >gi|5923669|gb|AAD56320.1|AC009326_7 hypothetical
  misc_feature (69)..(744): Homolog of NCBI NO: 38423978 NR Description: PPR-repeat protein-like [Oryza sativa (japonica
  misc_feature (9)..(416): Homolog of NCBI NO: 15232885 NR Description: hypothetical protein; protein id: At3g02330.1
  misc_feature (436)..(746): Homolog of NCBI NO: 15232885 NR Description: hypothetical protein; protein id: At3g02330.1
  misc_feature (2)..(749): Homolog of NCBI NO: 15234006 NR Description: putative protein; protein id: At4g18750.1
MLRLGARVSVSNSQILATSSVVSTIKTEELMNDHINSLCKSNFYREALEAFDFAQKNSSFKIRLRTYISLICACSSSRSLAQGRKIHDHILNSNCKYDTILNNHILSMYGKCGSLRDAREVFDFMPERNLVSYTSVITGYSQNGQGAEAIRLYLKMLQEDLVPDQFAFGSIIKACASSSDVGLGKQLHAQVIKLESSSHLIAQNALIAMYVRFNQMSDASRVFYGIPMKDLISWSSIIAGFSQLGFEFEALSHLKEMLSFGVFHPNEYIFGSSLKACSSLLRPDYGSQIHGLCIKSELAGNAIAGCSLCDMYARCGFLNSARRVFDQIERPDTASWNVIIAGLANNGYADEAVSVFSQMRSSGFIPDAISLRSLLCAQTKPMALSQGMQIHSYIIKWGFLADLTVCNSLLTMYTFCSDLYCCFNLFEDFRNNADSVSWNTILTACLQHEQPVEMLRLFKLMLVSECEPDHITMGNLLRGCVEISSLKLGSQVHCYSLKTGLAPEQFIKNGLIDMYAKCGSLGQARRIFDSMDNRDVVSWSTLIVGYAQSGFGEEALILFKEMKSAGIEPNHVTFVGVLTACSHVGLVEEGLKLYATMQTEHGISPTKEHCSCVVDLLARAGRLNEAERFIDEMKLEPDVVVWKTLLSACKTQGNVHLAQKAAENILKIDPFNSTAHVLLCSMHASSGNWENAALLRSSMKKHDVKKIPGQSWIEIEDKIHIFFAEDIFHPERDDIYTVLHNIWSQMLDECNPQHKKRLQFIHETG

SEQ ID NO: 96856 - protein, 735 aa, Arabidopsis thaliana
  peptide (1)..(735): Ceres Seq. ID no. 12734910
  misc_feature (406)..(440): Pfam Name: PPR repeat Pfam Description: PPR repeat
  misc_feature (7)..(716): Homolog of NCBI NO: 15235115 NR Description: putative protein; protein id: At4g39530.1
  misc_feature (1)..(719): Homolog of NCBI NO: 15228590 NR Description: hypothetical protein; protein id: At3g03580.1 thaliana] >gi|6091764|gb|AAF03474.1|AC009327_13 hypothetical [Arabidopsis thaliana] >gi|28393735|gb|AAO42278.1| unknown
  misc_feature (2)..(716): Homolog of NCBI NO: 37536800 NR Description: putative PPR-repeat protein [Oryza sativa
  misc_feature (37)..(712): Homolog of NCBI NO: 15236324 NR Description: putative protein; protein id: At4g13650.1
  misc_feature (53)..(709): Homolog of NCBI NO: 34915012 NR Description: P0458A05.10 [Oryza sativa (japonica
  misc_feature (1)..(722): Homolog of NCBI NO: 15232006 NR Description: hypothetical protein; protein id: At3g09040.1 thaliana] >gi|5923669|gb|AAD56320.1|AC009326_7 hypothetical
  misc_feature (39)..(714): Homolog of NCBI NO: 38423978 NR Description: PPR-repeat protein-like [Oryza sativa (japonica
  misc_feature (1)..(386): Homolog of NCBI NO: 15232885 NR Description: hypothetical protein; protein id: At3g02330.1
  misc_feature (406)..(716): Homolog of NCBI NO: 15232885 NR Description: hypothetical protein; protein id: At3g02330.1
  misc_feature (1)..(719): Homolog of NCBI NO: 15234006 NR Description: putative protein; protein id: At4g18750.1
MNDHINSLCKSNFYREALEAFDFAQKNSSFKIRLRTYISLICACSSSRSLAQGRKIHDHILNSNCKYDTILNNHILSMYGKCGSLRDAREVFDFMPERNLVSYTSVITGYSQNGQGAEAIRLYLKMLQEDLVPDQFAFGSIIKACASSSDVGLGKQLHAQVIKLESSSHLIAQNALIAMYVRFNQMSDASRVFYGIPMKDLISWSSIIAGFSQLGFEFEALSHLKEMLSFGVFHPNEYIFGSSLKACSSLLRPDYGSQIHGLCIKSELAGNAIAGCSLCDMYARCGFLNSARRVFDQIERPDTASWNVIIAGLANNGYADEAVSVFSQMRSSGFIPDAISLRSLLCAQTKPMALSQGMQIHSYIIKWGFLADLTVCNSLLTMYTFCSDLYCCFNLFEDFRNNADSVSWNTILTACLQHEQPVEMLRLFKLMLVSECEPDHITMGNLLRGCVEISSLKLGSQVHCYSLKTGLAPEQFIKNGLIDMYAKCGSLGQARRIFDSMDNRDVVSWSTLIVGYAQSGFGEEALILFKEMKSAGIEPNHVTFVGVLTACSHVGLVEEGLKLYATMQTEHGISPTKEHCSCVVDLLARAGRLNEAERFIDEMKLEPDVVVWKTLLSACKTQGNVHLAQKAAENILKIDPFNSTAHVLLCSMHASSGNWENAALLRSSMKKHDVKKIPGQSWIEIEDKIHIFFAEDIFHPERDDIYTVLHNIWSQMLDECNPQHKKRLQFIHETG

SEQ ID NO: 96857 - DNA, 417 bp, Arabidopsis thaliana
  misc_feature (1)..(417): Ceres Seq. ID no. 12734943
  misc_feature: MA Experiment ID: 20000327 Result: Down-regulated in Transcription
  misc_feature: MA Experiment 20000327 PARAMETER Experiment Name: At_42deg_Heat_Sub_P Parameter: Age (day) Value: 14
  misc_feature: MA Experiment 20000327 PARAMETER Experiment Name: At_42deg_Heat_Sub_P Parameter: Organism Value: A. thaliana
  misc_feature: MA Experiment 20000327 PARAMETER Experiment Name: At_42deg_Heat_Sub_P Parameter: Plant Line Value: WS
  misc_feature: MA Experiment 20000327 PARAMETER Experiment Name: At_42deg_Heat_Sub_P Parameter: Temperature (deg C) Value: 42 vs. 22
  misc_feature: MA Experiment 20000327 PARAMETER Experiment Name: At_42deg_Heat_Sub_P Parameter: Timepoint (hr) Value: 1
  misc_feature: MA Experiment 20000327 PARAMETER Experiment Name: At_42deg_Heat_Sub_P Parameter: Tissue Value: Aerial
  misc_feature: MA Experiment ID: 20000328 Result: Down-regulated in Transcription
  misc_feature: MA Experiment 20000328 PARAMETER Experiment Name: At_42deg_Heat_Sub_P Parameter: Age (day) Value: 14
  misc_feature: MA Experiment 20000328 PARAMETER Experiment Name: At_42deg_Heat_Sub_P Parameter: Organism Value: A. thaliana
  misc_feature: MA Experiment 20000328 PARAMETER Experiment Name: At_42deg_Heat_Sub_P Parameter: Plant Line Value: WS
  misc_feature: MA Experiment 20000328 PARAMETER Experiment Name: At_42deg_Heat_Sub_P Parameter: Temperature (deg C) Value: 42 vs. 22
  misc_feature: MA Experiment 20000328 PARAMETER Experiment Name: At_42deg_Heat_Sub_P Parameter: Timepoint (hr) Value: 6
  misc_feature: MA Experiment 20000328 PARAMETER Experiment Name: At_42deg_Heat_Sub_P Parameter: Tissue Value: Aerial
atggctccgaaagcggcagagaagaaaccggctgggaagaagccagcagaaaaagctccggcagagaaattaccaaaggcggagaagaagatcaccaaggaaggtggaagcgaaaagaagaagaagaaatcgaagaagaacatcgagacgtacaagatctacatcttcaaggttctgaaacaagttcatcctgatatcggaatctccgggaaagcgatggggatcatgaacagtttcatcaacgacatcttcgagaaactagctcaggaatcatcgcgattggctaggtacaacaagaaaccgacgatcacttctcgggaaattcagacggcggtgagacttgtgttgcctggagagctctcgaaacacgctgtttctgaaggcactaaggcggttactaaattcactagctcgtag

SEQ ID NO: 96858 - protein, 138 aa, Arabidopsis thaliana
  peptide (1)..(138): Ceres Seq. ID no. 12734944
  misc_feature (6)..(137): Pfam Name: Core histone H2A/H2B/H3/H4 Pfam Description: Core histone H2A/H2B/H3/H4
  misc_feature (1)..(138): Homolog of NCBI NO: 15231854 NR Description: histone H2B - like protein; protein id:
  misc_feature (1)..(137): Homolog of NCBI NO: 15224292 NR Description: putative histone H2B; protein id: At2g37470.1, by cDNA: 31973. [Arabidopsis thaliana] >gi|25294273|pir||B84793
  misc_feature (1)..(138): Homolog of NCBI NO: 7635498 NR Description: histone H2B [Cicer arietinum]
  misc_feature (1)..(138): Homolog of NCBI NO: 30024116 NR Description: putative histone H4 [Pinus pinaster]
  misc_feature (1)..(138): Homolog of NCBI NO: 7387726 NR Description: Histone H2B >gi|7439759|pir||T09722 histone H2B1 upland cotton >gi|2558962|gb|AAB97163.1| histone H2B1 [Gossypium
  misc_feature (2)..(138): Homolog of NCBI NO: 7439753 NR Description: histone H2B-2 - tomato (fragment)
  misc_feature (1)..(138): Homolog of NCBI NO: 7439756 NR Description: histone H2B - tomato >gi|3021489|emb|CAA12233.1|
  misc_feature (1)..(138): Homolog of NCBI NO: 15231313 NR Description: histone H2B -like protein; protein id: supported by cDNA: 10517. [Arabidopsis thaliana]
  misc_feature (1)..(138): Homolog of NCBI NO: 7387727 NR Description: Histone H2B (CaH2B) >gi|7439757|pir||T08063 H2B - pepper >gi|2746719|gb|AAB94923.1| histone H2B [Capsicum
  misc_feature (1)..(138): Homolog of NCBI NO: 15238563 NR Description: histone H2B - like protein; protein id: supported by cDNA: 20822., supported by cDNA: gi_16323078 thaliana] >gi|27735192|sp|P40283|H2B_ARATH Histone H2B
MAPKAAEKKPAGKKPAEKAPAEKLPKAEKKITKEGGSEKKKKKSKKNIETYKIYIFKVLKQVHPDIGISGKAMGIMNSFINDIFEKLAQESSRLARYNKKPTITSREIQTAVRLVLPGELSKHAVSEGTKAVTKFTSS

SEQ ID NO: 96859 - DNA, 2393 bp, Arabidopsis thaliana
  misc_feature (1)..(2393): Ceres Seq. ID no. 12734949
  misc_feature: MA Experiment ID: 20000171 Result: Down-regulated in Transcription
  misc_feature: MA Experiment 20000171 PARAMETER Experiment Name: At_42deg_Heat_P Parameter: Age (day) Value: 14
  misc_feature: MA Experiment 20000171 PARAMETER Experiment Name: At_42deg_Heat_P Parameter: Organism Value: A. thaliana
  misc_feature: MA Experiment 20000171 PARAMETER Experiment Name: At_42deg_Heat_P Parameter: Plant Line Value: WS
  misc_feature: MA Experiment 20000171 PARAMETER Experiment Name: At_42deg_Heat_P Parameter: Temperature (deg C) Value: 42 vs. 22
  misc_feature: MA Experiment 20000171 PARAMETER Experiment Name: At_42deg_Heat_P Parameter: Timepoint (hr) Value: 1
  misc_feature: MA Experiment 20000171 PARAMETER Experiment Name: At_42deg_Heat_P Parameter: Tissue Value: Aerial
  misc_feature: MA Experiment ID: 20000182 Result: Down-regulated in Transcription
  misc_feature: MA Experiment 20000182 PARAMETER Experiment Name: At_2mM_SA_P Parameter: Age (day) Value: 14
  misc_feature: MA Experiment 20000182 PARAMETER Experiment Name: At_2mM_SA_P Parameter: Organism Value: A. thaliana
  misc_feature: MA Experiment 20000182 PARAMETER Experiment Name: At_2mM_SA_P Parameter: Plant Line Value: WS
  misc_feature: MA Experiment 20000182 PARAMETER Experiment Name: At_2mM_SA_P Parameter: Timepoint (hr) Value: 6
  misc_feature: MA Experiment 20000182 PARAMETER Experiment Name: At_2mM_SA_P Parameter: Tissue Value: Aerial
  misc_feature: MA Experiment 20000182 PARAMETER Experiment Name: At_2mM_SA_P Parameter: Treatment Value: 2mM SA vs. No Treatment
  misc_feature: MA Experiment ID: 20000185 Result: Down-regulated in Transcription
  misc_feature: MA Experiment 20000185 PARAMETER Experiment Name: At_Roots__P Parameter: Age (day) Value: 7 vs. 21
  misc_feature: MA Experiment 20000185 PARAMETER Experiment Name: At_Roots__P Parameter: Organism Value: A. thaliana
  misc_feature: MA Experiment 20000185 PARAMETER Experiment Name: At_Roots__P Parameter: Tissue Value: Roots vs. Whole Plant
  misc_feature: MA Experiment ID: 20000437 Result: Down-regulated in Transcription
  misc_feature: MA Experiment 20000437 PARAMETER Experiment Name: At_Drought_P Parameter: Age (day) Value: 8
  misc_feature: MA Experiment 20000437 PARAMETER Experiment Name: At_Drought_P Parameter: Organism Value: A. thaliana
  misc_feature: MA Experiment 20000437 PARAMETER Experiment Name: At_Drought_P Parameter: Plant Line Value: WS
  misc_feature: MA Experiment 20000437 PARAMETER Experiment Name: At_Drought_P Parameter: Timepoint (hr) Value: 24
  misc_feature: MA Experiment 20000437 PARAMETER Experiment Name: At_Drought_P Parameter: Tissue Value: Whole Plant
  misc_feature: MA Experiment 20000437 PARAMETER Experiment Name: At_Drought_P Parameter: Treatment Value: Drought vs. No Drought
  misc_feature: MA Experiment ID: 20001558 Result: Up-regulated in Transcription
  misc_feature: MA Experiment 20001558 PARAMETER Experiment Name: At_Drought_Soil_Dry_P Parameter: Age (day) Value: 27
  misc_feature: MA Experiment 20001558 PARAMETER Experiment Name: At_Drought_Soil_Dry_P Parameter: Organism Value: A. thaliana
  misc_feature: MA Experiment 20001558 PARAMETER Experiment Name: At_Drought_Soil_Dry_P Parameter: Plant Line Value: WS
  misc_feature: MA Experiment 20001558 PARAMETER Experiment Name: At_Drought_Soil_Dry_P Parameter: Post Timepoint (hr) Value: 6
  misc_feature: MA Experiment 20001558 PARAMETER Experiment Name: At_Drought_Soil_Dry_P Parameter: Post-Treatment Value: Re-Water vs. No Drought
  misc_feature: MA Experiment 20001558 PARAMETER Experiment Name: At_Drought_Soil_Dry_P Parameter: Timepoint (day) Value: 13
  misc_feature: MA Experiment 20001558 PARAMETER Experiment Name: At_Drought_Soil_Dry_P Parameter: Treatment Value: Drought vs. No Drought
  misc_feature: MA Experiment ID: 20001905 Result: Down-regulated in Transcription
  misc_feature: MA Experiment 20001905 PARAMETER Experiment Name: At_Drought_Reproduction_P Parameter: Age (day) Value: 40
  misc_feature: MA Experiment 20001905 PARAMETER Experiment Name: At_Drought_Reproduction_P Parameter: Organism Value: A. thaliana
  misc_feature: MA Experiment 20001905 PARAMETER Experiment Name: At_Drought_Reproduction_P Parameter: Plant Line Value: WS
  misc_feature: MA Experiment 20001905 PARAMETER Experiment Name: At_Drought_Reproduction_P Parameter: Timepoint (day) Value: 10
  misc_feature: MA Experiment 20001905 PARAMETER Experiment Name: At_Drought_Reproduction_P Parameter: Tissue Value: Rosettes
  misc_feature: MA Experiment 20001905 PARAMETER Experiment Name: At_Drought_Reproduction_P Parameter: Treatment Value: Drought vs. No Drought
  misc_feature: MA Experiment ID: 20001911 Result: Down-regulated in Transcription
  misc_feature: MA Experiment 20001911 PARAMETER Experiment Name: At_Drought_Reproduction_P Parameter: Age (day) Value: 40
  misc_feature: MA Experiment 20001911 PARAMETER Experiment Name: At_Drought_Reproduction_P Parameter: Organism Value: A. thaliana
  misc_feature: MA Experiment 20001911 PARAMETER Experiment Name: At_Drought_Reproduction_P Parameter: Plant Line Value: WS
  misc_feature: MA Experiment 20001911 PARAMETER Experiment Name: At_Drought_Reproduction_P Parameter: Timepoint (day) Value: 10
  misc_feature: MA Experiment 20001911 PARAMETER Experiment Name: At_Drought_Reproduction_P Parameter: Tissue Value: Flowers
  misc_feature: MA Experiment 20001911 PARAMETER Experiment Name: At_Drought_Reproduction_P Parameter: Treatment Value: Drought vs. No Drought
atcttctctggaaactgaaaactatggctttctcttcatgtctcaaattctatccattttctatctctcaagctgtaaccctaactcatcattccttctctctcaatctaactcctccttcttctaccatctccttcgcttctcctcactcagcagctctctcctctaccgatgtcaagcttctcgactcactccgtagccagcctgatgattccgccgcacttcgtctctttaatctggcctctaagaagccaaatttctcacctgaacctgctctatacgaagagattctccttcggctaggtcggtctggttcgtttgatgacatgaagaaaattcttgaagacatgaagagttccagatgcgaaatgggtacttctactttcttgatattaatcgagagttatgctcagttcgaattgcaagatgagattttaagtgttgttgattggatgattgacgaattcgggttaaaacccgatacccatttttataaccggatgttgaatcttctcgttgatgggaatagtctgaaactcgttgagatttctcacgcgaagatgagtgtctgggggattaaaccagatgtatctacgtttaatgttttgatcaaagctttgtgtagagctcatcagcttagacctgcgattttgatgttggaggatatgcctagttacggtcttgttcctgatgagaagacatttacaacggttatgcaaggctatattgaagaaggggacttggatggagctttgaggattagggaacagatggttgagtttggttgttcatggtctaatgtgagtgttaatgttattgttcatggtttttgtaaggaagggagagtcgaagacgctctcaatttcattcaggagatgtctaatcaagacgggttttttccggatcagtacacgtttaatacgttagttaatggtttgtgtaaagcagggcatgtgaagcatgctattgagattatggatgtgatgcttcaagaagggtatgatccagatgtgtatacttataactcggtgatttcgggtttgtgtaagcttggagaggtgaaagaagcagtggaggttcttgatcagatgattactagagattgttctccgaacacggttacttacaacactttgatcagcacgttatgtaaagagaatcaggtcgaggaagctacggagcttgcccgtgttctcaccagcaaagggatccttcctgacgtttgtacatttaactctttgatccaaggtttgtgtttgactaggaatcaccgggttgcgatggagttgtttgaagagatgaggagcaaaggatgtgagcctgacgagttcacttacaatatgctgattgatagcttatgctccaaagggaagctagatgaagctctgaacatgcttaaacaaatggaattgagtggttgtgcacggagtgtgataacttacaacactttgattgatgggttttgcaaagccaacaagactagagaagccgaggagatatttgatgagatggaagtacatggagtttcaagaaactctgttacatacaacacactcatcgatgggctttgtaaaagcaggcgagtagaggacgcggctcagctcatggatcaaatgattatggaaggacagaaacctgacaagtacacatacaactcgcttttaacacatttctgcagaggaggtgacataaagaaagctgcggatatcgtgcaagccatgacctcaaatgggtgtgaaccagacattgtgacctatggaaccttgataagcggtttgtgtaaagctggtagagttgaagttgcaagtaagcttttgaggtcaattcagatgaaagggattaatttgacaccgcatgcttataatccggtgattcaagggttgtttagaaagaggaaaacaacagaagctataaatttgtttagagaaatgcttgaacagaatgaagctccaccagatgcagtatcctacagaatcgttttccgtgggctatgtaatggaggtggaccaatccgtgaagcagtggactttcttgttgagctgttagagaaaggatttgtacctgagttttcttctttgtacatgttggctgaaggtcttctcactttgtcaatggaagaaacactagtcaagttagtgaacatggtgatgcagaaagctagattctcggaggaagaggtttcaatggtgaaaggtttgcttaaaatcaggaaatttcaggacgctttggccactcttggcggcgtcttggacagtcgccagccgaggagaacctaccggtcaagatgatagatacctttagaaaaagtatcgttcccaatttcgtagaagatatgtatgatgttatgaatatgatttcctataaagttttggggtaattcatccatttaatac

SEQ ID NO: 96860 - protein, 761 aa, Arabidopsis thaliana
  peptide (1)..(761): Ceres Seq. ID no. 12734950
  misc_feature (548)..(582): Pfam Name: PPR repeat Pfam Description: PPR repeat
  misc_feature (46)..(759): Homolog of NCBI NO: 34896698 NR Description: putative pentatricopeptide repeat protein [Oryza
  misc_feature (242)..(731): Homolog of NCBI NO: 15218325 NR Description: hypothetical protein; protein id: At1g09900.1
  misc_feature (60)..(699): Homolog of NCBI NO: 15232008 NR Description: hypothetical protein; protein id: At3g09060.1 thaliana] >gi|5923671|gb|AAD56322.1|AC009326_9 hypothetical
  misc_feature (121)..(713): Homolog of NCBI NO: 25518293 NR Description: hypothetical protein F13K23.2 - Arabidopsis >gi|8698724|gb|AAF78482.1|AC012187_2 Contains similarity to an protein F16M19.7 gi|6598837 from Arabidopsis thaliana BAC
  misc_feature (148)..(708): Homolog of NCBI NO: 25404377 NR Description: hypothetical protein F16P17.5 [imported] - thaliana >gi|8493578|gb|AAF75801.1|AC011000_4 Contains a RepB protein domain and multiple PPR PF|01535 repeats. [Arabidopsis
  misc_feature (71)..(708): Homolog of NCBI NO: 15237662 NR Description: putative protein; protein id: At5g64320.1
  misc_feature (148)..(692): Homolog of NCBI NO: 15221621 NR Description: unknown protein; protein id: At1g62910.1
  misc_feature (142)..(713): Homolog of NCBI NO: 15220990 NR Description: unknown protein; protein id: At1g12770.1
  misc_feature (79)..(691): Homolog of NCBI NO: 34394163 NR Description: putative fertility restorer homologue [Oryza
  misc_feature (164)..(713): Homolog of NCBI NO: 15221691 NR Description: unknown protein; protein id: At1g63130.1
LLWKLKTMAFSSCLKFYPFSISQAVTLTHHSFSLNLTPPSSTISFASPHSAALSSTDVKLLDSLRSQPDDSAALRLFNLASKKPNFSPEPALYEEILLRLGRSGSFDDMKKILEDMKSSRCEMGTSTFLILIESYAQFELQDEILSVVDWMIDEFGLKPDTHFYNRMLNLLVDGNSLKLVEISHAKMSVWGIKPDVSTFNVLIKALCRAHQLRPAILMLEDMPSYGLVPDEKTFTTVMQGYIEEGDLDGALRIREQMVEFGCSWSNVSVNVIVHGFCKEGRVEDALNFIQEMSNQDGFFPDQYTFNTLVNGLCKAGHVKHAIEIMDVMLQEGYDPDVYTYNSVISGLCKLGEVKEAVEVLDQMITRDCSPNTVTYNTLISTLCKENQVEEATELARVLTSKGILPDVCTFNSLIQGLCLTRNHRVAMELFEEMRSKGCEPDEFTYNMLIDSLCSKGKLDEALNMLKQMELSGCARSVITYNTLIDGFCKANKTREAEEIFDEMEVHGVSRNSVTYNTLIDGLCKSRRVEDAAQLMDQMIMEGQKPDKYTYNSLLTHFCRGGDIKKAADIVQAMTSNGCEPDIVTYGTLISGLCKAGRVEVASKLLRSIQMKGINLTPHAYNPVIQGLFRKRKTTEAINLFREMLEQNEAPPDAVSYRIVFRGLCNGGGPIREAVDFLVELLEKGFVPEFSSLYMLAEGLLTLSMEETLVKLVNMVMQKARFSEEEVSMVKGLLKIRKFQDALATLGGVLDSRQPRRTYRSR

SEQ ID NO: 96861 - protein, 754 aa, Arabidopsis thaliana
  peptide (1)..(754): Ceres Seq. ID no. 12734951
  misc_feature (541)..(575): Pfam Name: PPR repeat Pfam Description: PPR repeat
  misc_feature (39)..(752): Homolog of NCBI NO: 34896698 NR Description: putative pentatricopeptide repeat protein [Oryza
  misc_feature (235)..(724): Homolog of NCBI NO: 15218325 NR Description: hypothetical protein; protein id: At1g09900.1
  misc_feature (53)..(692): Homolog of NCBI NO: 15232008 NR Description: hypothetical protein; protein id: At3g09060.1 thaliana] >gi|5923671|gb|AAD56322.1|AC009326_9 hypothetical
  misc_feature (114)..(706): Homolog of NCBI NO: 25518293 NR Description: hypothetical protein F13K23.2 - Arabidopsis >gi|8698724|gb|AAF78482.1|AC012187_2 Contains similarity to an protein F16M19.7 gi|6598837 from Arabidopsis thaliana BAC
  misc_feature (141)..(701): Homolog of NCBI NO: 25404377 NR Description: hypothetical protein F16P17.5 [imported] - thaliana >gi|8493578|gb|AAF75801.1|AC011000_4 Contains a RepB protein domain and multiple PPR PF|01535 repeats. [Arabidopsis
  misc_feature (64)..(701): Homolog of NCBI NO: 15237662 NR Description: putative protein; protein id: At5g64320.1
  misc_feature (141)..(685): Homolog of NCBI NO: 15221621 NR Description: unknown protein; protein id: At1g62910.1
  misc_feature (135)..(706): Homolog of NCBI NO: 15220990 NR Description: unknown protein; protein id: At1g12770.1
  misc_feature (72)..(684): Homolog of NCBI NO: 34394163 NR Description: putative fertility restorer homologue [Oryza
  misc_feature (157)..(706): Homolog of NCBI NO: 15221691 NR Description: unknown protein; protein id: At1g63130.1
MAFSSCLKFYPFSISQAVTLTHHSFSLNLTPPSSTISFASPHSAALSSTDVKLLDSLRSQPDDSAALRLFNLASKKPNFSPEPALYEEILLRLGRSGSFDDMKKILEDMKSSRCEMGTSTFLILIESYAQFELQDEILSVVDWMIDEFGLKPDTHFYNRMLNLLVDGNSLKLVEISHAKMSVWGIKPDVSTFNVLIKALCRAHQLRPAILMLEDMPSYGLVPDEKTFTTVMQGYIEEGDLDGALRIREQMVEFGCSWSNVSVNVIVHGFCKEGRVEDALNFIQEMSNQDGFFPDQYTFNTLVNGLCKAGHVKHAIEIMDVMLQEGYDPDVYTYNSVISGLCKLGEVKEAVEVLDQMITRDCSPNTVTYNTLISTLCKENQVEEATELARVLTSKGILPDVCTFNSLIQGLCLTRNHRVAMELFEEMRSKGCEPDEFTYNMLIDSLCSKGKLDEALNMLKQMELSGCARSVITYNTLIDGFCKANKTREAEEIFDEMEVHGVSRNSVTYNTLIDGLCKSRRVEDAAQLMDQMIMEGQKPDKYTYNSLLTHFCRGGDIKKAADIVQAMTSNGCEPDIVTYGTLISGLCKAGRVEVASKLLRSIQMKGINLTPHAYNPVIQGLFRKRKTTEAINLFREMLEQNEAPPDAVSYRIVFRGLCNGGGPIREAVDFLVELLEKGFVPEFSSLYMLAEGLLTLSMEETLVKLVNMVMQKARFSEEEVSMVKGLLKIRKFQDALATLGGVLDSRQPRRTYRSR

SEQ ID NO: 96862 - protein, 653 aa, Arabidopsis thaliana
  peptide (1)..(653): Ceres Seq. ID no. 12734952
  misc_feature (440)..(474): Pfam Name: PPR repeat Pfam Description: PPR repeat
  misc_feature (1)..(651): Homolog of NCBI NO: 34896698 NR Description: putative pentatricopeptide repeat protein [Oryza
  misc_feature (134)..(623): Homolog of NCBI NO: 15218325 NR Description: hypothetical protein; protein id: At1g09900.1
  misc_feature (1)..(591): Homolog of NCBI NO: 15232008 NR Description: hypothetical protein; protein id: At3g09060.1 thaliana] >gi|5923671|gb|AAD56322.1|AC009326_9 hypothetical
  misc_feature (13)..(605): Homolog of NCBI NO: 25518293 NR Description: hypothetical protein F13K23.2 - Arabidopsis >gi|8698724|gb|AAF78482.1|AC012187_2 Contains similarity to an protein F16M19.7 gi|6598837 from Arabidopsis thaliana BAC
  misc_feature (40)..(600): Homolog of NCBI NO: 25404377 NR Description: hypothetical protein F16P17.5 [imported] - thaliana >gi|8493578|gb|AAF75801.1|AC011000_4 Contains a RepB protein domain and multiple PPR PF|01535 repeats. [Arabidopsis
  misc_feature (1)..(600): Homolog of NCBI NO: 15237662 NR Description: putative protein; protein id: At5g64320.1
  misc_feature (40)..(584): Homolog of NCBI NO: 15221621 NR Description: unknown protein; protein id: At1g62910.1
  misc_feature (34)..(605): Homolog of NCBI NO: 15220990 NR Description: unknown protein; protein id: At1g12770.1
  misc_feature (1)..(583): Homolog of NCBI NO: 34394163 NR Description: putative fertility restorer homologue [Oryza
  misc_feature (56)..(605): Homolog of NCBI NO: 15221691 NR Description: unknown protein; protein id: At1g63130.1
MKKILEDMKSSRCEMGTSTFLILIESYAQFELQDEILSVVDWMIDEFGLKPDTHFYNRMLNLLVDGNSLKLVEISHAKMSVWGIKPDVSTFNVLIKALCRAHQLRPAILMLEDMPSYGLVPDEKTFTTVMQGYIEEGDLDGALRIREQMVEFGCSWSNVSVNVIVHGFCKEGRVEDALNFIQEMSNQDGFFPDQYTFNTLVNGLCKAGHVKHAIEIMDVMLQEGYDPDVYTYNSVISGLCKLGEVKEAVEVLDQMITRDCSPNTVTYNTLISTLCKENQVEEATELARVLTSKGILPDVCTFNSLIQGLCLTRNHRVAMELFEEMRSKGCEPDEFTYNMLIDSLCSKGKLDEALNMLKQMELSGCARSVITYNTLIDGFCKANKTREAEEIFDEMEVHGVSRNSVTYNTLIDGLCKSRRVEDAAQLMDQMIMEGQKPDKYTYNSLLTHFCRGGDIKKAADIVQAMTSNGCEPDIVTYGTLISGLCKAGRVEVASKLLRSIQMKGINLTPHAYNPVIQGLFRKRKTTEAINLFREMLEQNEAPPDAVSYRIVFRGLCNGGGPIREAVDFLVELLEKGFVPEFSSLYMLAEGLLTLSMEETLVKLVNMVMQKARFSEEEVSMVKGLLKIRKFQDALATLGGVLDSRQPRRTYRSR

SEQ ID NO: 96863 - DNA, 1623 bp, Arabidopsis thaliana
  misc_feature (1)..(1623): Ceres Seq. ID no. 12734957
  misc_feature: MA Experiment ID: 20000166 Result: Up-regulated in Transcription
  misc_feature: MA Experiment 20000166 PARAMETER Experiment Name: At_100uM_ABA_P Parameter: Age (day) Value: 14
  misc_feature: MA Experiment 20000166 PARAMETER Experiment Name: At_100uM_ABA_P Parameter: Organism Value: A. thaliana
  misc_feature: MA Experiment 20000166 PARAMETER Experiment Name: At_100uM_ABA_P Parameter: Plant Line Value: WS
  misc_feature: MA Experiment 20000166 PARAMETER Experiment Name: At_100uM_ABA_P Parameter: Timepoint (hr) Value: 1
  misc_feature: MA Experiment 20000166 PARAMETER Experiment Name: At_100uM_ABA_P Parameter: Tissue Value: Aerial
  misc_feature: MA Experiment 20000166 PARAMETER Experiment Name: At_100uM_ABA_P Parameter: Treatment Value: 100uM ABA vs. No Treatment
  misc_feature: MA Experiment ID: 20000173 Result: Down-regulated in Transcription
  misc_feature: MA Experiment 20000173 PARAMETER Experiment Name: At_42deg_Heat_P Parameter: Age (day) Value: 14
  misc_feature: MA Experiment 20000173 PARAMETER Experiment Name: At_42deg_Heat_P Parameter: Organism Value: A. thaliana
  misc_feature: MA Experiment 20000173 PARAMETER Experiment Name: At_42deg_Heat_P Parameter: Plant Line Value: WS
  misc_feature: MA Experiment 20000173 PARAMETER Experiment Name: At_42deg_Heat_P Parameter: Temperature (deg C) Value: 42 vs. 22
  misc_feature: MA Experiment 20000173 PARAMETER Experiment Name: At_42deg_Heat_P Parameter: Timepoint (hr) Value: 6
  misc_feature: MA Experiment 20000173 PARAMETER Experiment Name: At_42deg_Heat_P Parameter: Tissue Value: Aerial
  misc_feature: MA Experiment ID: 20000182 Result: Up-regulated in Transcription
  misc_feature: MA Experiment 20000182 PARAMETER Experiment Name: At_2mM_SA_P Parameter: Age (day) Value: 14
  misc_feature: MA Experiment 20000182 PARAMETER Experiment Name: At_2mM_SA_P Parameter: Organism Value: A. thaliana
  misc_feature: MA Experiment 20000182 PARAMETER Experiment Name: At_2mM_SA_P Parameter: Plant Line Value: WS
  misc_feature: MA Experiment 20000182 PARAMETER Experiment Name: At_2mM_SA_P Parameter: Timepoint (hr) Value: 6
  misc_feature: MA Experiment 20000182 PARAMETER Experiment Name: At_2mM_SA_P Parameter: Tissue Value: Aerial
  misc_feature: MA Experiment 20000182 PARAMETER Experiment Name: At_2mM_SA_P Parameter: Treatment Value: 2mM SA vs. No Treatment
  misc_feature: MA Experiment ID: 20000234 Result: Down-regulated in Transcription
  misc_feature: MA Experiment 20000234 PARAMETER Experiment Name: At_Siliques_P Parameter: Age (day) Value: 21
  misc_feature: MA Experiment 20000234 PARAMETER Experiment Name: At_Siliques_P Parameter: Organism Value: A. thaliana
  misc_feature: MA Experiment 20000234 PARAMETER Experiment Name: At_Siliques_P Parameter: Plant Line Value: WS
  misc_feature: MA Experiment 20000234 PARAMETER Experiment Name: At_Siliques_P Parameter: Tissue Value: Less Than 5mm Siliques vs. Whole Plant
  misc_feature: MA Experiment ID: 20000235 Result: Down-regulated in Transcription
  misc_feature: MA Experiment 20000235 PARAMETER Experiment Name: At_Siliques_P Parameter: Age (day) Value: 21
  misc_feature: MA Experiment 20000235 PARAMETER Experiment Name: At_Siliques_P Parameter: Organism Value: A. thaliana
  misc_feature: MA Experiment 20000235 PARAMETER Experiment Name: At_Siliques_P Parameter: Plant Line Value: WS
  misc_feature: MA Experiment 20000235 PARAMETER Experiment Name: At_Siliques_P Parameter: Tissue Value: 5-10mm Siliques vs. Whole Plant
  misc_feature: MA Experiment ID: 20001560 Result: Down-regulated in Transcription
  misc_feature: MA Experiment 20001560 PARAMETER Experiment Name: At_Drought_Soil_Dry_P Parameter: Age (day) Value: 28
  misc_feature: MA Experiment 20001560 PARAMETER Experiment Name: At_Drought_Soil_Dry_P Parameter: Organism Value: A. thaliana
  misc_feature: MA Experiment 20001560 PARAMETER Experiment Name: At_Drought_Soil_Dry_P Parameter: Plant Line Value: WS
  misc_feature: MA Experiment 20001560 PARAMETER Experiment Name: At_Drought_Soil_Dry_P Parameter: Post Timepoint (hr) Value: None
  misc_feature: MA Experiment 20001560 PARAMETER Experiment Name: At_Drought_Soil_Dry_P Parameter: Post-Treatment Value: None
  misc_feature: MA Experiment 20001560 PARAMETER Experiment Name: At_Drought_Soil_Dry_P Parameter: Timepoint (day) Value: 14
  misc_feature: MA Experiment 20001560 PARAMETER Experiment Name: At_Drought_Soil_Dry_P Parameter: Treatment Value: Drought vs. No Drought
atttatttttcttactaaaacttttgtttataaattagtttgtaaacaattttgagacacgaaataacataacttttcctttttttgttttgatgattgttttttaggaaccatgtgtgatgcatatttggtaaagaccattgacttatttaactctttcctttttttcttgttttcagactcaaaaactccaaccaaaatttgcttattgttgtatagattgaactttgcacttagctcccaaagtccaacacccgattaaaaactcccataaagagctaaacacgaaacctaatttctccctacacacatctcaaatctctccaattttgttcaaagctcgaattctgttcaaagctcggatttttaattgcttcaatgggtgagaaagattcagaaacagctccgatttgggggaaaactcgagagagagagaggagcaacaacaacaatatacagccaatggatttagagtcgtcctcttctgtatctgggcaacaacgatcgttgactcagagtcgaagttcttatgaagaacgaggtagaggagttaaagagtttcggagttggtttccttggctcattccttgtttcgttgttgctaacgttgccgtcttcgtgatcaccataacaccagagaaaatcctcttctgggtccttcctctctcacgttacaaacaatgggtggattagatgttaaaaaagtggttaaaggagatgaaggatggcgtctactttcttgcaattggttacatggaggagttgttcatttactgatgaacatgttgactcttttattcatcggtatacgtatggaacgtgaatttggttttattcggattggattgctttatttgatatcagggtttggaggaagcatattgtcagctcttttcctccgttcaaacatctctgttggagcatctggtgccgtgtttggtttacttggaggaatgctctctgagatctttatcaactggacaatctattctaacaaggttgtgacgattgtaactcttgtattgattgtggcggtgaacttggggctcggtgtgctccctggagtagataactttgctcatatcggagggtttgctacaggttttcttcttggatttgtgctcttaatccgtccccattacggatggatcaaccaaagaaacggtcctggagctaaaccccacaggttcaagatatatcagggcatattatggactatctctcttctcatcttggtcgctgggttcattgttggattgatctctctcttcaacaatgtcgatggaaacgaacattgttcgtggtgtcattatctttcatgtgttccaacatctaaatggagctgtaaccgagaaccagcctcttgcacgacgactcaattaggtaaccaattgagcatgacttgtttgaggaatgggaaatcagcatcttacattttggcaaatccctcggattcacggattaatagcttatgtgttcagctttgccgttgatttactgatttttagaaatattattatgtacacaaacacactctacactgtatctatcatatttttttcttgcttattatgtgtatgttttatagaggcccttgttcaataaataatacaatgttttcct

SEQ ID NO: 96864 - protein, 270 aa, Arabidopsis thaliana
  peptide (1)..(270): Ceres Seq. ID no. 12734958
  misc_feature (1)..(270): Homolog of NCBI NO: 30693911 NR Description: membrane protein, Rhomboid family [Arabidopsis
  misc_feature (1)..(270): Homolog of NCBI NO: 11357824 NR Description: hypothetical protein F5K20.80 - Arabidopsis >gi|7629998|emb|CAB88340.1| putative protein [Arabidopsis
  misc_feature (1)..(270): Homolog of NCBI NO: 18409916 NR Description: putative protein; protein id: At3g53780.1
  misc_feature (1)..(223): Homolog of NCBI NO: 294845 NR Description: membrane protein [Saccharum hybrid cultivar
  misc_feature (1)..(223): Homolog of NCBI NO: 15240744 NR Description: membrane protein; protein id: At5g07250.1, by cDNA: gi_16648761, supported by cDNA: gi_20466142 [Arabidopsis
  misc_feature (1)..(222): Homolog of NCBI NO: 15221690 NR Description: membrane protein, putative; protein id: [Arabidopsis thaliana] >gi|25404407|pir||F96656 probable membrane
  misc_feature (1)..(222): Homolog of NCBI NO: 15222058 NR Description: membrane protein, putative; protein id: supported by cDNA: gi_17529033 [Arabidopsis thaliana] putative membrane protein [Arabidopsis thaliana]
  misc_feature (1)..(222): Homolog of NCBI NO: 25402744 NR Description: protein T12C24.28 [imported] - Arabidopsis >gi|9502383|gb|AAF88090.1|AC025417_18 T12C24.28 [Arabidopsis
  misc_feature (1)..(178): Homolog of NCBI NO: 34895778 NR Description: putative membrane protein [Oryza sativa (japonica group)] >gi|12328478|dbj|BAB21138.1| putative membrane protein
  misc_feature (1)..(224): Homolog of NCBI NO: 38344377 NR Description: OSJNBb0032E06.11 [Oryza sativa (japonica
MGGLDVKKVVKGDEGWRLLSCNWLHGGVVHLLMNMLTLLFIGIRMEREFGFIRIGLLYLISGFGGSILSALFLRSNISVGASGAVFGLLGGMLSEIFINWTIYSNKVVTIVTLVLIVAVNLGLGVLPGVDNFAHIGGFATGFLLGFVLLIRPHYGWINQRNGPGAKPHRFKIYQGILWTISLLILVAGFIVGLISLFNNVDGNEHCSWCHYLSCVPTSKWSCNREPASCTTTQLGNQLSMTCLRNGKSASYILANPSDSRINSLCVQLCR

SEQ ID NO: 96865 - protein, 238 aa, Arabidopsis thaliana
  peptide (1)..(238): Ceres Seq. ID no. 12734959
  misc_feature (1)..(238): Homolog of NCBI NO: 30693911 NR Description: membrane protein, Rhomboid family [Arabidopsis
  misc_feature (1)..(238): Homolog of NCBI NO: 11357824 NR Description: hypothetical protein F5K20.80 - Arabidopsis >gi|7629998|emb|CAB88340.1| putative protein [Arabidopsis
  misc_feature (1)..(238): Homolog of NCBI NO: 18409916 NR Description: putative protein; protein id: At3g53780.1
  misc_feature (1)..(191): Homolog of NCBI NO: 294845 NR Description: membrane protein [Saccharum hybrid cultivar
  misc_feature (1)..(191): Homolog of NCBI NO: 15240744 NR Description: membrane protein; protein id: At5g07250.1, by cDNA: gi_16648761, supported by cDNA: gi_20466142 [Arabidopsis
  misc_feature (1)..(190): Homolog of NCBI NO: 15221690 NR Description: membrane protein, putative; protein id: [Arabidopsis thaliana] >gi|25404407|pir||F96656 probable membrane
  misc_feature (1)..(190): Homolog of NCBI NO: 15222058 NR Description: membrane protein, putative; protein id: supported by cDNA: gi_17529033 [Arabidopsis thaliana] putative membrane protein [Arabidopsis thaliana]
  misc_feature (1)..(190): Homolog of NCBI NO: 25402744 NR Description: protein T12C24.28 [imported] - Arabidopsis >gi|9502383|gb|AAF88090.1|AC025417_18 T12C24.28 [Arabidopsis
  misc_feature (1)..(146): Homolog of NCBI NO: 34895778 NR Description: putative membrane protein [Oryza sativa (japonica group)] >gi|12328478|dbj|BAB21138.1| putative membrane protein
  misc_feature (1)..(192): Homolog of NCBI NO: 38344377 NR Description: OSJNBb0032E06.11 [Oryza sativa (japonica
MNMLTLLFIGIRMEREFGFIRIGLLYLISGFGGSILSALFLRSNISVGASGAVFGLLGGMLSEIFINWTIYSNKVVTIVTLVLIVAVNLGLGVLPGVDNFAHIGGFATGFLLGFVLLIRPHYGWINQRNGPGAKPHRFKIYQGILWTISLLILVAGFIVGLISLFNNVDGNEHCSWCHYLSCVPTSKWSCNREPASCTTTQLGNQLSMTCLRNGKSASYILANPSDSRINSLCVQLCR

SEQ ID NO: 96866 - protein, 236 aa, Arabidopsis thaliana
  peptide (1)..(236): Ceres Seq. ID no. 12734960
  misc_feature (1)..(236): Homolog of NCBI NO: 30693911 NR Description: membrane protein, Rhomboid family [Arabidopsis
  misc_feature (1)..(236): Homolog of NCBI NO: 11357824 NR Description: hypothetical protein F5K20.80 - Arabidopsis >gi|7629998|emb|CAB88340.1| putative protein [Arabidopsis
  misc_feature (1)..(236): Homolog of NCBI NO: 18409916 NR Description: putative protein; protein id: At3g53780.1
  misc_feature (1)..(189): Homolog of NCBI NO: 294845 NR Description: membrane protein [Saccharum hybrid cultivar
  misc_feature (1)..(189): Homolog of NCBI NO: 15240744 NR Description: membrane protein; protein id: At5g07250.1, by cDNA: gi_16648761, supported by cDNA: gi_20466142 [Arabidopsis
  misc_feature (1)..(188): Homolog of NCBI NO: 15221690 NR Description: membrane protein, putative; protein id: [Arabidopsis thaliana] >gi|25404407|pir||F96656 probable membrane
  misc_feature (1)..(188): Homolog of NCBI NO: 15222058 NR Description: membrane protein, putative; protein id: supported by cDNA: gi_17529033 [Arabidopsis thaliana] putative membrane protein [Arabidopsis thaliana]
  misc_feature (1)..(188): Homolog of NCBI NO: 25402744 NR Description: protein T12C24.28 [imported] - Arabidopsis >gi|9502383|gb|AAF88090.1|AC025417_18 T12C24.28 [Arabidopsis
  misc_feature (1)..(144): Homolog of NCBI NO: 34895778 NR Description: putative membrane protein [Oryza sativa (japonica group)] >gi|12328478|dbj|BAB21138.1| putative membrane protein
  misc_feature (1)..(190): Homolog of NCBI NO: 38344377 NR Description: OSJNBb0032E06.11 [Oryza sativa (japonica
MLTLLFIGIRMEREFGFIRIGLLYLISGFGGSILSALFLRSNISVGASGAVFGLLGGMLSEIFINWTIYSNKVVTIVTLVLIVAVNLGLGVLPGVDNFAHIGGFATGFLLGFVLLIRPHYGWINQRNGPGAKPHRFKIYQGILWTISLLILVAGFIVGLISLFNNVDGNEHCSWCHYLSCVPTSKWSCNREPASCTTTQLGNQLSMTCLRNGKSASYILANPSDSRINSLCVQLCR

SEQ ID NO: 96867 - DNA, 2034 bp, Arabidopsis thaliana
  misc_feature (1)..(2034): Ceres Seq. ID no. 12734965
  misc_feature: MA Experiment ID: 20000173 Result: Up-regulated in Transcription
  misc_feature: MA Experiment 20000173 PARAMETER Experiment Name: At_42deg_Heat_P Parameter: Age (day) Value: 14
  misc_feature: MA Experiment 20000173 PARAMETER Experiment Name: At_42deg_Heat_P Parameter: Organism Value: A. thaliana
  misc_feature: MA Experiment 20000173 PARAMETER Experiment Name: At_42deg_Heat_P Parameter: Plant Line Value: WS
  misc_feature: MA Experiment 20000173 PARAMETER Experiment Name: At_42deg_Heat_P Parameter: Temperature (deg C) Value: 42 vs. 22
  misc_feature: MA Experiment 20000173 PARAMETER Experiment Name: At_42deg_Heat_P Parameter: Timepoint (hr) Value: 6
  misc_feature: MA Experiment 20000173 PARAMETER Experiment Name: At_42deg_Heat_P Parameter: Tissue Value: Aerial
  misc_feature: MA Experiment ID: 20000235 Result: Down-regulated in Transcription
  misc_feature: MA Experiment 20000235 PARAMETER Experiment Name: At_Siliques_P Parameter: Age (day) Value: 21
  misc_feature: MA Experiment 20000235 PARAMETER Experiment Name: At_Siliques_P Parameter: Organism Value: A. thaliana
  misc_feature: MA Experiment 20000235 PARAMETER Experiment Name: At_Siliques_P Parameter: Plant Line Value: WS
  misc_feature: MA Experiment 20000235 PARAMETER Experiment Name: At_Siliques_P Parameter: Tissue Value: 5-10mm Siliques vs. Whole Plant
  misc_feature: MA Experiment ID: 20000265 Result: Down-regulated in Transcription
  misc_feature: MA Experiment 20000265 PARAMETER Experiment Name: At_Open_Flower_P Parameter: Age (day) Value: 21
  misc_feature: MA Experiment 20000265 PARAMETER Experiment Name: At_Open_Flower_P Parameter: Plant Line Value: WS
  misc_feature: MA Experiment 20000265 PARAMETER Experiment Name: At_Open_Flower_P Parameter: Tissue Value: Closed Flower vs. Whole Plant
  misc_feature: MA Experiment ID: 20001905 Result: Up-regulated in Transcription
  misc_feature: MA Experiment 20001905 PARAMETER Experiment Name: At_Drought_Reproduction_P Parameter: Age (day) Value: 40
  misc_feature: MA Experiment 20001905 PARAMETER Experiment Name: At_Drought_Reproduction_P Parameter: Organism Value: A. thaliana
  misc_feature: MA Experiment 20001905 PARAMETER Experiment Name: At_Drought_Reproduction_P Parameter: Plant Line Value: WS
  misc_feature: MA Experiment 20001905 PARAMETER Experiment Name: At_Drought_Reproduction_P Parameter: Timepoint (day) Value: 10
  misc_feature: MA Experiment 20001905 PARAMETER Experiment Name: At_Drought_Reproduction_P Parameter: Tissue Value: Rosettes
  misc_feature: MA Experiment 20001905 PARAMETER Experiment Name: At_Drought_Reproduction_P Parameter: Treatment Value: Drought vs. No Drought
atgttcgtcaagctcaagctcatcttcttcttcttcctactctgtcaaattatgatttcttcctctcaaaatctcaacttcacctacaatggtttccatcctccattaacagatatctcactccaaggtctcgcaacagtaacacccaatggtctcttgaagcttaccaacacatcggtacaaaaaaccggtcacgccttctgtactgaacgaatccggttcaaagattcccaaaacggcaacgtatcatccttctccacaaccttcgtcttcgcgatacattctcagatcccaacactaagcggccatggaatcgccttcgttgtagctccaacgctaggtcttccttttgcacttcctagtcaatacatcggtctcttcaacatctctaacaatggtaacgacacgaatcacatctttgccgtcgaattcgatacaatccagagtagcgagtttggagatccaaacgataatcacgtcggaatcgatctcaacggtttacgatcggcgaattactcgacggcgggatatagggatgatcacgataagtttcagaatctgagtttgattagtcgcaaacggatccaagtttggatcgattacgataatcgtagtcatcgaattgatgtcaccgtggctccgtttgattctgataaacctagaaaacctctagtttcgtatgtgagagatctttcttcgattcttctagaagatatgtatgtaggtttctcatctgcgactggttcagttctctcggagcatttcttagtcggatggagtttccggttaaacggagaagctccgatgctctcgttatcgaaactcccgaagcttcctcgatttgagcctagaagaatctctgaattctacaaaatcggtatgcctttgatttcactatctctgatcttctctatcatcttcctcgctttctacatcgtgaggaggaagaagaagtacgaggaagagcttgatgattgggaaacagagtttgggaagaatcgattcagattcaaggagctctatcacgcgaccaaaggttttaaggagaaggatcttctcggctccggtggatttgggagagtttacagaggcattttaccaacgacgaagcttgaagtcgctgtgaagagagtctcacatgattcaaaacaaggtatgaaagagtttgtggcggagattgtgagtattggtaggatgagtcaccggaatttagttcctctcttgggttactgtcgccggagaggagagcttcttttggtttacgattacatgcctaatgggagcttagataagtatctttacaacaatccggagactaccttagattggaaacaaagatctacgattatcaaaggagttgcttcaggattgttctatcttcatgaggaatgggaacaagttgtgattcaccgtgacgtgaaagctagcaatgttctgttagatgctgatttcaatggtagactcggtgattttgggttggctcggttgtatgatcacggctcggatcctcagaccactcacgttgttggaacattgggttacttagcacctgaacattcccggactggacgtgccactaccacgactgatgtctatgcgtttggtgcgtttcttttagaagttgtttccggtagacgacccatcgagttccatagtgcaagcgatgatacgttcttgcttgtggaatgggttttcagtttgtggctcagaggtaacataatggaagcgaaagatccgaagctcggttcttcaggttatgatcttgaagaggttgaaatggtattgaaactcggtctgttgtgttcgcattcagaccctcgggctagaccaagtatgaggcaggtcttacaatatctaagaggagacatggcactgcctgaattaacgcccttggatttgtcggcggggagcgtgatgaatctgggaggccgggacggttttagcggtattgcaatgactgatttttccactgtgtttaaagggtttaccggcggatcttccattgctgactctctactctccggtgggaggtga

SEQ ID NO: 96868 - protein, 677 aa, Arabidopsis thaliana
  peptide (1)..(677): Ceres Seq. ID no. 12734966
  misc_feature (1)..(677): Homolog of NCBI NO: 15224347 NR Description: putative receptor-like protein kinase; protein At2g37710.1, supported by cDNA: gi_20259540 [Arabidopsis
  misc_feature (1)..(634): Homolog of NCBI NO: 11346411 NR Description: receptor-type protein kinase LRK1 [imported] - thaliana >gi|1418331|emb|CAA65153.1| receptor like protein kinase
  misc_feature (2)..(677): Homolog of NCBI NO: 18411937 NR Description: contains similarity to a protein kinase domain score: 125.64) and legume lectins alpha domain [Arabidopsis
  misc_feature (1)..(677): Homolog of NCBI NO: 18411935 NR Description: contains similarity to a protein kinase domain pkinase.hmm, score: 166.20) and to legume lectins beta domain lectin_legB.hmm, score: 139.32); protein id: At4g02410.1,
  misc_feature (25)..(630): Homolog of NCBI NO: 37534762 NR Description: putative serine/threonine-specific kinase like
  misc_feature (7)..(677): Homolog of NCBI NO: 34395075 NR Description: putative receptor kinase Lecrk [Oryza sativa
  misc_feature (27)..(676): Homolog of NCBI NO: 34395073 NR Description: putative receptor kinase Lecrk [Oryza sativa
  misc_feature (19)..(637): Homolog of NCBI NO: 15239263 NR Description: receptor like protein kinase; protein id:
  misc_feature (19)..(637): Homolog of NCBI NO: 15810557 NR Description: putative receptor protein kinase [Arabidopsis
  misc_feature (5)..(675): Homolog of NCBI NO: 11346438 NR Description: receptor like protein kinase - Arabidopsis >gi|7327815|emb|CAB82272.1| receptor like protein kinase
MFVKLKLIFFFFLLCQIMISSSQNLNFTYNGFHPPLTDISLQGLATVTPNGLLKLTNTSVQKTGHAFCTERIRFKDSQNGNVSSFSTTFVFAIHSQIPTLSGHGIAFVVAPTLGLPFALPSQYIGLFNISNNGNDTNHIFAVEFDTIQSSEFGDPNDNHVGIDLNGLRSANYSTAGYRDDHDKFQNLSLISRKRIQVWIDYDNRSHRIDVTVAPFDSDKPRKPLVSYVRDLSSILLEDMYVGFSSATGSVLSEHFLVGWSFRLNGEAPMLSLSKLPKLPRFEPRRISEFYKIGMPLISLSLIFSIIFLAFYIVRRKKKYEEELDDWETEFGKNRFRFKELYHATKGFKEKDLLGSGGFGRVYRGILPTTKLEVAVKRVSHDSKQGMKEFVAEIVSIGRMSHRNLVPLLGYCRRRGELLLVYDYMPNGSLDKYLYNNPETTLDWKQRSTIIKGVASGLFYLHEEWEQVVIHRDVKASNVLLDADFNGRLGDFGLARLYDHGSDPQTTHVVGTLGYLAPEHSRTGRATTTTDVYAFGAFLLEVVSGRRPIEFHSASDDTFLLVEWVFSLWLRGNIMEAKDPKLGSSGYDLEEVEMVLKLGLLCSHSDPRARPSMRQVLQYLRGDMALPELTPLDLSAGSVMNLGGRDGFSGIAMTDFSTVFKGFTGGSSIADSLLSGGR

SEQ ID NO: 96869 - protein, 660 aa, Arabidopsis thaliana
  peptide (1)..(660): Ceres Seq. ID no. 12734967
  misc_feature (1)..(660): Homolog of NCBI NO: 15224347 NR Description: putative receptor-like protein kinase; protein At2g37710.1, supported by cDNA: gi_20259540 [Arabidopsis
  misc_feature (1)..(617): Homolog of NCBI NO: 11346411 NR Description: receptor-type protein kinase LRK1 [imported] - thaliana >gi|1418331|emb|CAA65153.1| receptor like protein kinase
  misc_feature (1)..(660): Homolog of NCBI NO: 18411937 NR Description: contains similarity to a protein kinase domain score: 125.64) and legume lectins alpha domain [Arabidopsis
  misc_feature (1)..(660): Homolog of NCBI NO: 18411935 NR Description: contains similarity to a protein kinase domain pkinase.hmm, score: 166.20) and to legume lectins beta domain lectin_legB.hmm, score: 139.32); protein id: At4g02410.1,
  misc_feature (8)..(613): Homolog of NCBI NO: 37534762 NR Description: putative serine/threonine-specific kinase like
  misc_feature (1)..(660): Homolog of NCBI NO: 34395075 NR Description: putative receptor kinase Lecrk [Oryza sativa
  misc_feature (10)..(659): Homolog of NCBI NO: 34395073 NR Description: putative receptor kinase Lecrk [Oryza sativa
  misc_feature (2)..(620): Homolog of NCBI NO: 15239263 NR Description: receptor like protein kinase; protein id:
  misc_feature (2)..(620): Homolog of NCBI NO: 15810557 NR Description: putative receptor protein kinase [Arabidopsis
  misc_feature (1)..(658): Homolog of NCBI NO: 11346438 NR Description: receptor like protein kinase - Arabidopsis >gi|7327815|emb|CAB82272.1| receptor like protein kinase
MISSSQNLNFTYNGFHPPLTDISLQGLATVTPNGLLKLTNTSVQKTGHAFCTERIRFKDSQNGNVSSFSTTFVFAIHSQIPTLSGHGIAFVVAPTLGLPFALPSQYIGLFNISNNGNDTNHIFAVEFDTIQSSEFGDPNDNHVGIDLNGLRSANYSTAGYRDDHDKFQNLSLISRKRIQVWIDYDNRSHRIDVTVAPFDSDKPRKPLVSYVRDLSSILLEDMYVGFSSATGSVLSEHFLVGWSFRLNGEAPMLSLSKLPKLPRFEPRRISEFYKIGMPLISLSLIFSIIFLAFYIVRRKKKYEEELDDWETEFGKNRFRFKELYHATKGFKEKDLLGSGGFGRVYRGILPTTKLEVAVKRVSHDSKQGMKEFVAEIVSIGRMSHRNLVPLLGYCRRRGELLLVYDYMPNGSLDKYLYNNPETTLDWKQRSTIIKGVASGLFYLHEEWEQVVIHRDVKASNVLLDADFNGRLGDFGLARLYDHGSDPQTTHVVGTLGYLAPEHSRTGRATTTTDVYAFGAFLLEVVSGRRPIEFHSASDDTFLLVEWVFSLWLRGNIMEAKDPKLGSSGYDLEEVEMVLKLGLLCSHSDPRARPSMRQVLQYLRGDMALPELTPLDLSAGSVMNLGGRDGFSGIAMTDFSTVFKGFTGGSSIADSLLSGGR

SEQ ID NO: 96870 - protein, 439 aa, Arabidopsis thaliana
  peptide (1)..(439): Ceres Seq. ID no. 12734968
  misc_feature (1)..(439): Homolog of NCBI NO: 15224347 NR Description: putative receptor-like protein kinase; protein At2g37710.1, supported by cDNA: gi_20259540 [Arabidopsis
  misc_feature (1)..(396): Homolog of NCBI NO: 11346411 NR Description: receptor-type protein kinase LRK1 [imported] - thaliana >gi|1418331|emb|CAA65153.1| receptor like protein kinase
  misc_feature (1)..(439): Homolog of NCBI NO: 18411937 NR Description: contains similarity to a protein kinase domain score: 125.64) and legume lectins alpha domain [Arabidopsis
  misc_feature (1)..(439): Homolog of NCBI NO: 18411935 NR Description: contains similarity to a protein kinase domain pkinase.hmm, score: 166.20) and to legume lectins beta domain lectin_legB.hmm, score: 139.32); protein id: At4g02410.1,
  misc_feature (1)..(392): Homolog of NCBI NO: 37534762 NR Description: putative serine/threonine-specific kinase like
  misc_feature (1)..(439): Homolog of NCBI NO: 34395075 NR Description: putative receptor kinase Lecrk [Oryza sativa
  misc_feature (1)..(438): Homolog of NCBI NO: 34395073 NR Description: putative receptor kinase Lecrk [Oryza sativa
  misc_feature (1)..(399): Homolog of NCBI NO: 15239263 NR Description: receptor like protein kinase; protein id:
  misc_feature (1)..(399): Homolog of NCBI NO: 15810557 NR Description: putative receptor protein kinase [Arabidopsis
  misc_feature (1)..(437): Homolog of NCBI NO: 11346438 NR Description: receptor like protein kinase - Arabidopsis >gi|7327815|emb|CAB82272.1| receptor like protein kinase
MYVGFSSATGSVLSEHFLVGWSFRLNGEAPMLSLSKLPKLPRFEPRRISEFYKIGMPLISLSLIFSIIFLAFYIVRRKKKYEEELDDWETEFGKNRFRFKELYHATKGFKEKDLLGSGGFGRVYRGILPTTKLEVAVKRVSHDSKQGMKEFVAEIVSIGRMSHRNLVPLLGYCRRRGELLLVYDYMPNGSLDKYLYNNPETTLDWKQRSTIIKGVASGLFYLHEEWEQVVIHRDVKASNVLLDADFNGRLGDFGLARLYDHGSDPQTTHVVGTLGYLAPEHSRTGRATTTTDVYAFGAFLLEVVSGRRPIEFHSASDDTFLLVEWVFSLWLRGNIMEAKDPKLGSSGYDLEEVEMVLKLGLLCSHSDPRARPSMRQVLQYLRGDMALPELTPLDLSAGSVMNLGGRDGFSGIAMTDFSTVFKGFTGGSSIADSLLSGGR

SEQ ID NO: 96871 - DNA, 1134 bp, Arabidopsis thaliana
  misc_feature (1)..(1134): Ceres Seq. ID no. 12734972
  misc_feature: MA Experiment ID: 20000495 Result: Down-regulated in Transcription
  misc_feature: MA Experiment 20000495 PARAMETER Experiment Name: At_Guard_Cells_P Parameter: Harvest Date Value: 8/2/2002
  misc_feature: MA Experiment 20000495 PARAMETER Experiment Name: At_Guard_Cells_P Parameter: Organism Value: A. thaliana
  misc_feature: MA Experiment 20000495 PARAMETER Experiment Name: At_Guard_Cells_P Parameter: Tissue Value: Guard Cells vs. Leaves
  misc_feature: MA Experiment ID: 20001451 Result: Down-regulated in Transcription
  misc_feature: MA Experiment 20001451 PARAMETER Experiment Name: At_Far-red-induction_P Parameter: Age (day) Value: 7
  misc_feature: MA Experiment 20001451 PARAMETER Experiment Name: At_Far-red-induction_P Parameter: Light Value: Far-red vs. White
  misc_feature: MA Experiment 20001451 PARAMETER Experiment Name: At_Far-red-induction_P Parameter: Organism Value: A. thaliana
  misc_feature: MA Experiment 20001451 PARAMETER Experiment Name: At_Far-red-induction_P Parameter: Plant Line Value: Columbia
  misc_feature: MA Experiment 20001451 PARAMETER Experiment Name: At_Far-red-induction_P Parameter: Timepoint (hr) Value: 24
  misc_feature: MA Experiment 20001451 PARAMETER Experiment Name: At_Far-red-induction_P Parameter: Tissue Value: Whole Plant
  misc_feature: MA Experiment ID: 20001560 Result: Down-regulated in Transcription
  misc_feature: MA Experiment 20001560 PARAMETER Experiment Name: At_Drought_Soil_Dry_P Parameter: Age (day) Value: 28
  misc_feature: MA Experiment 20001560 PARAMETER Experiment Name: At_Drought_Soil_Dry_P Parameter: Organism Value: A. thaliana
  misc_feature: MA Experiment 20001560 PARAMETER Experiment Name: At_Drought_Soil_Dry_P Parameter: Plant Line Value: WS
  misc_feature: MA Experiment 20001560 PARAMETER Experiment Name: At_Drought_Soil_Dry_P Parameter: Post Timepoint (hr) Value: None
  misc_feature: MA Experiment 20001560 PARAMETER Experiment Name: At_Drought_Soil_Dry_P Parameter: Post-Treatment Value: None
  misc_feature: MA Experiment 20001560 PARAMETER Experiment Name: At_Drought_Soil_Dry_P Parameter: Timepoint (day) Value: 14
  misc_feature: MA Experiment 20001560 PARAMETER Experiment Name: At_Drought_Soil_Dry_P Parameter: Treatment Value: Drought vs. No Drought
gaacgaacactctcgagacggaatcgatggcgaattctcagacggtgatggctatgatcaggttggctagacctcctttccgcaacaatcacgataaggttgctttcgctattcactcttctttcgtcgcttccggttatatcctcaccgccaccggacggcctgctttcgccgacgaggctctctcttcgtcttctcagaatgatgttggaatcgaaggatggaacgaattcgagggagagtatgcgtttgtctatgcgaatccgaagaaagggtcaaagaaaattctggttaagtgtttggcgatggatgataaacttcttgttgatgccatagctgatggtggagcagaacctgctcatcttgagattaaagttggggattatgctgaggaaagcaatgagggggattactctgcgcagttcaagaatttggataagttagtgactgatttgcagagtgagattatcgataagcttgatggaaaaccaaaacctgttgcttcgagagcacagtccagctctgagactaatgaagagcctagatattacgatgatacgcctaatccattaggccctcagattcacccctcaggcgtggtagttcctccgatacctggtaatggtggttacagtgatctcttccctggcccaggtgctggaatgtaccctggcaggggtggttttggggatggaagcatgcttgtaggacctactgatcctcgctttttcccatttggtgatggttctgatcgacctggcttcatgggaccaccacacccgggtatgccacctcctggtgcgcgttttgatccttatggtccacccggtgttccaggttttgagccaggccggttcacaagacaacctccaagagggccaggaggtgggcatccagacctcgagcattttcccggcggttcagattttatatagtaaagtaaagccatcgccaaggaaatagagaaagtgtgtgcacaacttaaagtatggtagtaactacatatagacaataggatctatgtggtttgttttttctcagctgtttttttgtttggtggtgttgttggttttattccccagcacactttttataacttcaataaatatataaataaagacttggtttatttcg

SEQ ID NO: 96872 - protein, 310 aa, Arabidopsis thaliana
  peptide (1)..(310): Ceres Seq. ID no. 12734973
  misc_feature (234)..(298): Pfam Name: Collagen triple helix repeat (20 copies) Pfam Description: Collagen triple helix repeat (20 copies)
  misc_feature (9)..(310): Homolog of NCBI NO: 15232382 NR Description: putative protein; protein id: At3g53970.1, by cDNA: gi_17381083 [Arabidopsis thaliana] Putative proteasome inhibitor >gi|11357821|pir||T45937
  misc_feature (9)..(176): Homolog of NCBI NO: 15221211 NR Description: hypothetical protein; protein id: At1g48530.1
  misc_feature (9)..(293): Homolog of NCBI NO: 34898580 NR Description: P0534A03.16 [Oryza sativa (japonica
  misc_feature (121)..(305): Homolog of NCBI NO: 34898580 NR Description: P0534A03.16 [Oryza sativa (japonica
  misc_feature (22)..(292): Homolog of NCBI NO: 10432572 NR Description: dJ545L17.3 (proteasome (prosome, macropain)
  misc_feature (22)..(292): Homolog of NCBI NO: 5803123 NR Description: proteasome (prosome, macropain) inhibitor subunit (PI31); proteasome inhibitor [Homo sapiens] Proteasome inhibitor PI31 subunit (hPI31)
  misc_feature (241)..(309): Homolog of NCBI NO: 7489377 NR Description: hypothetical protein - barley (fragment)
  misc_feature (22)..(290): Homolog of NCBI NO: 26337673 NR Description: unnamed protein product [Mus musculus] unnamed protein product [Mus musculus]
  misc_feature (22)..(290): Homolog of NCBI NO: 26327249 NR Description: unnamed protein product [Mus musculus]
  misc_feature (183)..(295): Homolog of NCBI NO: 21355275 NR Description: CG10625-PA [Drosophila melanogaster]
TNTLETESMANSQTVMAMIRLARPPFRNNHDKVAFAIHSSFVASGYILTATGRPAFADEALSSSSQNDVGIEGWNEFEGEYAFVYANPKKGSKKILVKCLAMDDKLLVDAIADGGAEPAHLEIKVGDYAEESNEGDYSAQFKNLDKLVTDLQSEIIDKLDGKPKPVASRAQSSSETNEEPRYYDDTPNPLGPQIHPSGVVVPPIPGNGGYSDLFPGPGAGMYPGRGGFGDGSMLVGPTDPRFFPFGDGSDRPGFMGPPHPGMPPPGARFDPYGPPGVPGFEPGRFTRQPPRGPGGGHPDLEHFPGGSDFI

SEQ ID NO: 96873 - protein, 302 aa, Arabidopsis thaliana
  peptide (1)..(302): Ceres Seq. ID no. 12734974
  misc_feature (226)..(290): Pfam Name: Collagen triple helix repeat (20 copies) Pfam Description: Collagen triple helix repeat (20 copies)
  misc_feature (1)..(302): Homolog of NCBI NO: 15232382 NR Description: putative protein; protein id: At3g53970.1, by cDNA: gi_17381083 [Arabidopsis thaliana] Putative proteasome inhibitor >gi|11357821|pir||T45937
  misc_feature (1)..(168): Homolog of NCBI NO: 15221211 NR Description: hypothetical protein; protein id: At1g48530.1
  misc_feature (1)..(285): Homolog of NCBI NO: 34898580 NR Description: P0534A03.16 [Oryza sativa (japonica
  misc_feature (113)..(297): Homolog of NCBI NO: 34898580 NR Description: P0534A03.16 [Oryza sativa (japonica
  misc_feature (14)..(284): Homolog of NCBI NO: 10432572 NR Description: dJ545L17.3 (proteasome (prosome, macropain)
  misc_feature (14)..(284): Homolog of NCBI NO: 5803123 NR Description: proteasome (prosome, macropain) inhibitor subunit (PI31); proteasome inhibitor [Homo sapiens] Proteasome inhibitor PI31 subunit (hPI31)
  misc_feature (233)..(301): Homolog of NCBI NO: 7489377 NR Description: hypothetical protein - barley (fragment)
  misc_feature (14)..(282): Homolog of NCBI NO: 26337673 NR Description: unnamed protein product [Mus musculus] unnamed protein product [Mus musculus]
  misc_feature (14)..(282): Homolog of NCBI NO: 26327249 NR Description: unnamed protein product [Mus musculus]
  misc_feature (175)..(287): Homolog of NCBI NO: 21355275 NR Description: CG10625-PA [Drosophila melanogaster]
MANSQTVMAMIRLARPPFRNNHDKVAFAIHSSFVASGYILTATGRPAFADEALSSSSQNDVGIEGWNEFEGEYAFVYANPKKGSKKILVKCLAMDDKLLVDAIADGGAEPAHLEIKVGDYAEESNEGDYSAQFKNLDKLVTDLQSEIIDKLDGKPKPVASRAQSSSETNEEPRYYDDTPNPLGPQIHPSGVVVPPIPGNGGYSDLFPGPGAGMYPGRGGFGDGSMLVGPTDPRFFPFGDGSDRPGFMGPPHPGMPPPGARFDPYGPPGVPGFEPGRFTRQPPRGPGGGHPDLEHFPGGSDFI

SEQ ID NO: 96874 - protein, 295 aa, Arabidopsis thaliana
  peptide (1)..(295): Ceres Seq. ID no. 12734975
  misc_feature (219)..(283): Pfam Name: Collagen triple helix repeat (20 copies) Pfam Description: Collagen triple helix repeat (20 copies)
  misc_feature (1)..(295): Homolog of NCBI NO: 15232382 NR Description: putative protein; protein id: At3g53970.1, by cDNA: gi_17381083 [Arabidopsis thaliana] Putative proteasome inhibitor >gi|11357821|pir||T45937
  misc_feature (1)..(161): Homolog of NCBI NO: 15221211 NR Description: hypothetical protein; protein id: At1g48530.1
  misc_feature (1)..(278): Homolog of NCBI NO: 34898580 NR Description: P0534A03.16 [Oryza sativa (japonica
  misc_feature (106)..(290): Homolog of NCBI NO: 34898580 NR Description: P0534A03.16 [Oryza sativa (japonica
  misc_feature (7)..(277): Homolog of NCBI NO: 10432572 NR Description: dJ545L17.3 (proteasome (prosome, macropain)
  misc_feature (7)..(277): Homolog of NCBI NO: 5803123 NR Description: proteasome (prosome, macropain) inhibitor subunit (PI31); proteasome inhibitor [Homo sapiens] Proteasome inhibitor PI31 subunit (hPI31)
  misc_feature (226)..(294): Homolog of NCBI NO: 7489377 NR Description: hypothetical protein - barley (fragment)
  misc_feature (7)..(275): Homolog of NCBI NO: 26337673 NR Description: unnamed protein product [Mus musculus] unnamed protein product [Mus musculus]
  misc_feature (7)..(275): Homolog of NCBI NO: 26327249 NR Description: unnamed protein product [Mus musculus]
  misc_feature (168)..(280): Homolog of NCBI NO: 21355275 NR Description: CG10625-PA [Drosophila melanogaster]
MAMIRLARPPFRNNHDKVAFAIHSSFVASGYILTATGRPAFADEALSSSSQNDVGIEGWNEFEGEYAFVYANPKKGSKKILVKCLAMDDKLLVDAIADGGAEPAHLEIKVGDYAEESNEGDYSAQFKNLDKLVTDLQSEIIDKLDGKPKPVASRAQSSSETNEEPRYYDDTPNPLGPQIHPSGVVVPPIPGNGGYSDLFPGPGAGMYPGRGGFGDGSMLVGPTDPRFFPFGDGSDRPGFMGPPHPGMPPPGARFDPYGPPGVPGFEPGRFTRQPPRGPGGGHPDLEHFPGGSDFI

SEQ ID NO: 96875 - DNA, 960 bp, Arabidopsis thaliana
  misc_feature (1)..(960): Ceres Seq. ID no. 12734980
  misc_feature: MA Experiment ID: 20000180 Result: Up-regulated in Transcription
  misc_feature: MA Experiment 20000180 PARAMETER Experiment Name: At_Germinating_Seeds_P Parameter: Age (hr) Value: 24 vs. 0
  misc_feature: MA Experiment 20000180 PARAMETER Experiment Name: At_Germinating_Seeds_P Parameter: Tissue Value: Germinating Seeds
  misc_feature: MA Experiment ID: 20000185 Result: Up-regulated in Transcription
  misc_feature: MA Experiment 20000185 PARAMETER Experiment Name: At_Roots__P Parameter: Age (day) Value: 7 vs. 21
  misc_feature: MA Experiment 20000185 PARAMETER Experiment Name: At_Roots__P Parameter: Organism Value: A. thaliana
  misc_feature: MA Experiment 20000185 PARAMETER Experiment Name: At_Roots__P Parameter: Tissue Value: Roots vs. Whole Plant
  misc_feature: MA Experiment ID: 20000234 Result: Down-regulated in Transcription
  misc_feature: MA Experiment 20000234 PARAMETER Experiment Name: At_Siliques_P Parameter: Age (day) Value: 21
  misc_feature: MA Experiment 20000234 PARAMETER Experiment Name: At_Siliques_P Parameter: Organism Value: A. thaliana
  misc_feature: MA Experiment 20000234 PARAMETER Experiment Name: At_Siliques_P Parameter: Plant Line Value: WS
  misc_feature: MA Experiment 20000234 PARAMETER Experiment Name: At_Siliques_P Parameter: Tissue Value: Less Than 5mm Siliques vs. Whole Plant
  misc_feature: MA Experiment ID: 20000264 Result: Down-regulated in Transcription
  misc_feature: MA Experiment 20000264 PARAMETER Experiment Name: At_Open_Flower_P Parameter: Age (day) Value: 21
  misc_feature: MA Experiment 20000264 PARAMETER Experiment Name: At_Open_Flower_P Parameter: Plant Line Value: WS
  misc_feature: MA Experiment 20000264 PARAMETER Experiment Name: At_Open_Flower_P Parameter: Tissue Value: Open Flower vs. Whole Plant
  misc_feature: MA Experiment ID: 20000265 Result: Down-regulated in Transcription
  misc_feature: MA Experiment 20000265 PARAMETER Experiment Name: At_Open_Flower_P Parameter: Age (day) Value: 21
  misc_feature: MA Experiment 20000265 PARAMETER Experiment Name: At_Open_Flower_P Parameter: Plant Line Value: WS
  misc_feature: MA Experiment 20000265 PARAMETER Experiment Name: At_Open_Flower_P Parameter: Tissue Value: Closed Flower vs. Whole Plant
  misc_feature: MA Experiment ID: 20000286 Result: Down-regulated in Transcription
  misc_feature: MA Experiment 20000286 PARAMETER Experiment Name: At_Open_Flower_P Parameter: Age (day) Value: 21
  misc_feature: MA Experiment 20000286 PARAMETER Experiment Name: At_Open_Flower_P Parameter: Plant Line Value: WS
  misc_feature: MA Experiment 20000286 PARAMETER Experiment Name: At_Open_Flower_P Parameter: Tissue Value: Half Open vs. Whole Plant
  misc_feature: MA Experiment ID: 20000460 Result: Down-regulated in Transcription
  misc_feature: MA Experiment 20000460 PARAMETER Experiment Name: At_10percent_PEG_P Parameter: Age (day) Value: 12
  misc_feature: MA Experiment 20000460 PARAMETER Experiment Name: At_10percent_PEG_P Parameter: Organism Value: A. thaliana
  misc_feature: MA Experiment 20000460 PARAMETER Experiment Name: At_10percent_PEG_P Parameter: Plant Line Value: WS
  misc_feature: MA Experiment 20000460 PARAMETER Experiment Name: At_10percent_PEG_P Parameter: Timepoint (day) Value: 12
  misc_feature: MA Experiment 20000460 PARAMETER Experiment Name: At_10percent_PEG_P Parameter: Tissue Value: Whole Plant
  misc_feature: MA Experiment 20000460 PARAMETER Experiment Name: At_10percent_PEG_P Parameter: Treatment Value: 10percent PEG vs. No Treatment
  misc_feature: MA Experiment ID: 20000527 Result: Down-regulated in Transcription
  misc_feature: MA Experiment 20000527 PARAMETER Experiment Name: At_10percent_PEG_P Parameter: Age (day) Value: 20
  misc_feature: MA Experiment 20000527 PARAMETER Experiment Name: At_10percent_PEG_P Parameter: Organism Value: A. thaliana
  misc_feature: MA Experiment 20000527 PARAMETER Experiment Name: At_10percent_PEG_P Parameter: Plant Line Value: WS
  misc_feature: MA Experiment 20000527 PARAMETER Experiment Name: At_10percent_PEG_P Parameter: Timepoint (day) Value: 20
  misc_feature: MA Experiment 20000527 PARAMETER Experiment Name: At_10percent_PEG_P Parameter: Tissue Value: Whole Plant
  misc_feature: MA Experiment 20000527 PARAMETER Experiment Name: At_10percent_PEG_P Parameter: Treatment Value: 10percent PEG vs. No Treatment
  misc_feature: MA Experiment ID: 20000794 Result: Down-regulated in Transcription
  misc_feature: MA Experiment 20000794 PARAMETER Experiment Name: At_Petals_P Parameter: Age (day) Value: 23-25 days
  misc_feature: MA Experiment 20000794 PARAMETER Experiment Name: At_Petals_P Parameter: Plant Line Value: WS
  misc_feature: MA Experiment 20000794 PARAMETER Experiment Name: At_Petals_P Parameter: Tissue Value: Petals vs. Whole plant
  misc_feature: MA Experiment ID: 20001450 Result: Down-regulated in Transcription
  misc_feature: MA Experiment 20001450 PARAMETER Experiment Name: At_Far-red-induction_P Parameter: Age (day) Value: 7
  misc_feature: MA Experiment 20001450 PARAMETER Experiment Name: At_Far-red-induction_P Parameter: Light Value: Far-red vs. White
  misc_feature: MA Experiment 20001450 PARAMETER Experiment Name: At_Far-red-induction_P Parameter: Organism Value: A. thaliana
  misc_feature: MA Experiment 20001450 PARAMETER Experiment Name: At_Far-red-induction_P Parameter: Plant Line Value: Columbia
  misc_feature: MA Experiment 20001450 PARAMETER Experiment Name: At_Far-red-induction_P Parameter: Timepoint (hr) Value: 8
  misc_feature: MA Experiment 20001450 PARAMETER Experiment Name: At_Far-red-induction_P Parameter: Tissue Value: Whole Plant
  misc_feature: MA Experiment ID: 20001555 Result: Up-regulated in Transcription
  misc_feature: MA Experiment 20001555 PARAMETER Experiment Name: At_Drought_Soil_Dry_P Parameter: Age (day) Value: 24
  misc_feature: MA Experiment 20001555 PARAMETER Experiment Name: At_Drought_Soil_Dry_P Parameter: Organism Value: A. thaliana
  misc_feature: MA Experiment 20001555 PARAMETER Experiment Name: At_Drought_Soil_Dry_P Parameter: Plant Line Value: WS
  misc_feature: MA Experiment 20001555 PARAMETER Experiment Name: At_Drought_Soil_Dry_P Parameter: Post Timepoint (hr) Value: None
  misc_feature: MA Experiment 20001555 PARAMETER Experiment Name: At_Drought_Soil_Dry_P Parameter: Post-Treatment Value: None
  misc_feature: MA Experiment 20001555 PARAMETER Experiment Name: At_Drought_Soil_Dry_P Parameter: Timepoint (day) Value: 10
  misc_feature: MA Experiment 20001555 PARAMETER Experiment Name: At_Drought_Soil_Dry_P Parameter: Treatment Value: Drought vs. No Drought
  misc_feature: MA Experiment ID: 20001556 Result: Down-regulated in Transcription
  misc_feature: MA Experiment 20001556 PARAMETER Experiment Name: At_Drought_Soil_Dry_P Parameter: Age (day) Value: 26
  misc_feature: MA Experiment 20001556 PARAMETER Experiment Name: At_Drought_Soil_Dry_P Parameter: Organism Value: A. thaliana
  misc_feature: MA Experiment 20001556 PARAMETER Experiment Name: At_Drought_Soil_Dry_P Parameter: Plant Line Value: WS
  misc_feature: MA Experiment 20001556 PARAMETER Experiment Name: At_Drought_Soil_Dry_P Parameter: Post Timepoint (hr) Value: None
  misc_feature: MA Experiment 20001556 PARAMETER Experiment Name: At_Drought_Soil_Dry_P Parameter: Post-Treatment Value: None
  misc_feature: MA Experiment 20001556 PARAMETER Experiment Name: At_Drought_Soil_Dry_P Parameter: Timepoint (day) Value: 12
  misc_feature: MA Experiment 20001556 PARAMETER Experiment Name: At_Drought_Soil_Dry_P Parameter: Treatment Value: Drought vs. No Drought
  misc_feature: MA Experiment ID: 20001558 Result: Down-regulated in Transcription
  misc_feature: MA Experiment 20001558 PARAMETER Experiment Name: At_Drought_Soil_Dry_P Parameter: Age (day) Value: 27
  misc_feature: MA Experiment 20001558 PARAMETER Experiment Name: At_Drought_Soil_Dry_P Parameter: Organism Value: A. thaliana
  misc_feature: MA Experiment 20001558 PARAMETER Experiment Name: At_Drought_Soil_Dry_P Parameter: Plant Line Value: WS
  misc_feature: MA Experiment 20001558 PARAMETER Experiment Name: At_Drought_Soil_Dry_P Parameter: Post Timepoint (hr) Value: 6
  misc_feature: MA Experiment 20001558 PARAMETER Experiment Name: At_Drought_Soil_Dry_P Parameter: Post-Treatment Value: Re-Water vs. No Drought
  misc_feature: MA Experiment 20001558 PARAMETER Experiment Name: At_Drought_Soil_Dry_P Parameter: Timepoint (day) Value: 13
  misc_feature: MA Experiment 20001558 PARAMETER Experiment Name: At_Drought_Soil_Dry_P Parameter: Treatment Value: Drought vs. No Drought
  misc_feature: MA Experiment ID: 20001560 Result: Down-regulated in Transcription
  misc_feature: MA Experiment 20001560 PARAMETER Experiment Name: At_Drought_Soil_Dry_P Parameter: Age (day) Value: 28
  misc_feature: MA Experiment 20001560 PARAMETER Experiment Name: At_Drought_Soil_Dry_P Parameter: Organism Value: A. thaliana
  misc_feature: MA Experiment 20001560 PARAMETER Experiment Name: At_Drought_Soil_Dry_P Parameter: Plant Line Value: WS
  misc_feature: MA Experiment 20001560 PARAMETER Experiment Name: At_Drought_Soil_Dry_P Parameter: Post Timepoint (hr) Value: None
  misc_feature: MA Experiment 20001560 PARAMETER Experiment Name: At_Drought_Soil_Dry_P Parameter: Post-Treatment Value: None
  misc_feature: MA Experiment 20001560 PARAMETER Experiment Name: At_Drought_Soil_Dry_P Parameter: Timepoint (day) Value: 14
  misc_feature: MA Experiment 20001560 PARAMETER Experiment Name: At_Drought_Soil_Dry_P Parameter: Treatment Value: Drought vs. No Drought
  misc_feature: MA Experiment ID: 20001773 Result: Up-regulated in Transcription
  misc_feature: MA Experiment 20001773 PARAMETER Experiment Name: At_Far-red-enriched-adult_P Parameter: Age (day) Value: 30
  misc_feature: MA Experiment 20001773 PARAMETER Experiment Name: At_Far-red-enriched-adult_P Parameter: Light Value: Far-red enriched vs. White
  misc_feature: MA Experiment 20001773 PARAMETER Experiment Name: At_Far-red-enriched-adult_P Parameter: Organism Value: A. thaliana
  misc_feature: MA Experiment 20001773 PARAMETER Experiment Name: At_Far-red-enriched-adult_P Parameter: Plant Line Value: Columbia
  misc_feature: MA Experiment 20001773 PARAMETER Experiment Name: At_Far-red-enriched-adult_P Parameter: Timepoint (hr) Value: 48
  misc_feature: MA Experiment 20001773 PARAMETER Experiment Name: At_Far-red-enriched-adult_P Parameter: Tissue Value: Aerial
aacatatacgcgtcctatttccacgttctctctatattacatttttccttgaaaacatctcgaggttcaaaatctttaacccctacaaatcaagaaaaggagacagaggagaagagagaaaagaaaaacgcagaaacaatgtctttttcttccctcaaattgccaatctttctcattctctcaagtcttctccatgcggctataggggaaaacattgtttgcgagaatctgccaacaaatatgtgctcgttctcaatatccgcttccgggaaaagatgtatattggagacggctaatgtcgccggagaattcacttgccgcacttccgcagtggacgtggaagggattgtaaaccacgtggagaccgacgagtgcgtttccgcttgtggggttgatcggaaaaccgtagggatctcgtcagactccttgatggaggcaggtttcgccgctaagctttgctcatccgcttgcttggactattgccctaacattcttgatctctatttcaacctcgccgccggtgaaggtgcatttttacctgatctatgtgatgctcaacggatgaatccccagcgttcgatgatggaattcatcagctccggcgccgcaccaggccctgtctccgaaattgcaccaggccccacctccgaagaagtctcatctcctgctctagctccggcttctatgtaaaatgttcattaattccacatgtgtttaatactttatatttatattttcgattgatgatgatccatatataatggaccgtatcttacattttctatgatttgatacggatatcatcaattgattcatatgaaagaagaaggatacagagtgagcttgatttttgtttatgtttcttaatcaacatttcactgtataataacaacttcgtataccagtgtgttgtcttgttcgttaaataaatatacgtatgccaagtgcaatcgcatattt

SEQ ID NO: 96876 - protein, 229 aa, Arabidopsis thaliana
  peptide (1)..(229): Ceres Seq. ID no. 12734981
  misc_feature (47)..(229): Homolog of NCBI NO: 15232407 NR Description: photoassimilate-responsive protein PAR-1b -like protein id: At3g54040.1, supported by cDNA: gi_18252938
  misc_feature (44)..(216): Homolog of NCBI NO: 10798750 NR Description: Elicitor inducible gene product Nt-SubE80
  misc_feature (47)..(227): Homolog of NCBI NO: 21553901 NR Description: photoassimilate-responsive protein PAR-like
  misc_feature (47)..(227): Homolog of NCBI NO: 15237149 NR Description: photoassimilate-responsive protein PAR-like protein id: At5g52390.1, supported by cDNA: 17872., supported by gi_20268724 [Arabidopsis thaliana] >gi|10177405|dbj|BAB10536.1|
  misc_feature (48)..(227): Homolog of NCBI NO: 2129955 NR Description: photoassimilate-responsive protein PAR-1b - common tobacco >gi|871487|emb|CAA58731.1| mRNA inducible by
  misc_feature (48)..(228): Homolog of NCBI NO: 2129957 NR Description: photoassimilate-responsive protein precursor
  misc_feature (48)..(226): Homolog of NCBI NO: 2129956 NR Description: photoassimilate-responsive protein PAR-1c - common tobacco >gi|871489|emb|CAA58732.1| mRNA inducible by
  misc_feature (48)..(228): Homolog of NCBI NO: 1362109 NR Description: PAR-1a protein - common tobacco mRNA inducible by sucrose and salicylic acid and potato virus Y
NIYASYFHVLSILHFSLKTSRGSKSLTPTNQEKETEEKREKKNAETMSFSSLKLPIFLILSSLLHAAIGENIVCENLPTNMCSFSISASGKRCILETANVAGEFTCRTSAVDVEGIVNHVETDECVSACGVDRKTVGISSDSLMEAGFAAKLCSSACLDYCPNILDLYFNLAAGEGAFLPDLCDAQRMNPQRSMMEFISSGAAPGPVSEIAPGPTSEEVSSPALAPASM

SEQ ID NO: 96877 - protein, 183 aa, Arabidopsis thaliana
  peptide (1)..(183): Ceres Seq. ID no. 12734982
  misc_feature (1)..(183): Homolog of NCBI NO: 15232407 NR Description: photoassimilate-responsive protein PAR-1b -like protein id: At3g54040.1, supported by cDNA: gi_18252938
  misc_feature (1)..(170): Homolog of NCBI NO: 10798750 NR Description: Elicitor inducible gene product Nt-SubE80
  misc_feature (1)..(181): Homolog of NCBI NO: 21553901 NR Description: photoassimilate-responsive protein PAR-like
  misc_feature (1)..(181): Homolog of NCBI NO: 15237149 NR Description: photoassimilate-responsive protein PAR-like protein id: At5g52390.1, supported by cDNA: 17872., supported by gi_20268724 [Arabidopsis thaliana] >gi|10177405|dbj|BAB10536.1|
  misc_feature (2)..(181): Homolog of NCBI NO: 2129955 NR Description: photoassimilate-responsive protein PAR-1b - common tobacco >gi|871487|emb|CAA58731.1| mRNA inducible by
  misc_feature (2)..(182): Homolog of NCBI NO: 2129957 NR Description: photoassimilate-responsive protein precursor
  misc_feature (2)..(180): Homolog of NCBI NO: 2129956 NR Description: photoassimilate-responsive protein PAR-1c - common tobacco >gi|871489|emb|CAA58732.1| mRNA inducible by
  misc_feature (2)..(182): Homolog of NCBI NO: 1362109 NR Description: PAR-1a protein - common tobacco mRNA inducible by sucrose and salicylic acid and potato virus Y
MSFSSLKLPIFLILSSLLHAAIGENIVCENLPTNMCSFSISASGKRCILETANVAGEFTCRTSAVDVEGIVNHVETDECVSACGVDRKTVGISSDSLMEAGFAAKLCSSACLDYCPNILDLYFNLAAGEGAFLPDLCDAQRMNPQRSMMEFISSGAAPGPVSEIAPGPTSEEVSSPALAPASM

SEQ ID NO: 96878 - protein, 149 aa, Arabidopsis thaliana
  peptide (1)..(149): Ceres Seq. ID no. 12734983
  misc_feature (1)..(149): Homolog of NCBI NO: 15232407 NR Description: photoassimilate-responsive protein PAR-1b -like protein id: At3g54040.1, supported by cDNA: gi_18252938
  misc_feature (1)..(136): Homolog of NCBI NO: 10798750 NR Description: Elicitor inducible gene product Nt-SubE80
  misc_feature (1)..(147): Homolog of NCBI NO: 21553901 NR Description: photoassimilate-responsive protein PAR-like
  misc_feature (1)..(147): Homolog of NCBI NO: 15237149 NR Description: photoassimilate-responsive protein PAR-like protein id: At5g52390.1, supported by cDNA: 17872., supported by gi_20268724 [Arabidopsis thaliana] >gi|10177405|dbj|BAB10536.1|
  misc_feature (1)..(147): Homolog of NCBI NO: 2129955 NR Description: photoassimilate-responsive protein PAR-1b - common tobacco >gi|871487|emb|CAA58731.1| mRNA inducible by
  misc_feature (1)..(148): Homolog of NCBI NO: 2129957 NR Description: photoassimilate-responsive protein precursor
  misc_feature (1)..(146): Homolog of NCBI NO: 2129956 NR Description: photoassimilate-responsive protein PAR-1c - common tobacco >gi|871489|emb|CAA58732.1| mRNA inducible by
  misc_feature (1)..(148): Homolog of NCBI NO: 1362109 NR Description: PAR-1a protein - common tobacco mRNA inducible by sucrose and salicylic acid and potato virus Y
MCSFSISASGKRCILETANVAGEFTCRTSAVDVEGIVNHVETDECVSACGVDRKTVGISSDSLMEAGFAAKLCSSACLDYCPNILDLYFNLAAGEGAFLPDLCDAQRMNPQRSMMEFISSGAAPGPVSEIAPGPTSEEVSSPALAPASM

SEQ ID NO: 96879 - DNA, 612 bp, Arabidopsis thaliana
  misc_feature (1)..(612): Ceres Seq. ID no. 12734991
  misc_feature: MA Experiment ID: 20000171 Result: Down-regulated in Transcription
  misc_feature: MA Experiment 20000171 PARAMETER Experiment Name: At_42deg_Heat_P Parameter: Age (day) Value: 14
  misc_feature: MA Experiment 20000171 PARAMETER Experiment Name: At_42deg_Heat_P Parameter: Organism Value: A. thaliana
  misc_feature: MA Experiment 20000171 PARAMETER Experiment Name: At_42deg_Heat_P Parameter: Plant Line Value: WS
  misc_feature: MA Experiment 20000171 PARAMETER Experiment Name: At_42deg_Heat_P Parameter: Temperature (deg C) Value: 42 vs. 22
  misc_feature: MA Experiment 20000171 PARAMETER Experiment Name: At_42deg_Heat_P Parameter: Timepoint (hr) Value: 1
  misc_feature: MA Experiment 20000171 PARAMETER Experiment Name: At_42deg_Heat_P Parameter: Tissue Value: Aerial
  misc_feature: MA Experiment ID: 20000173 Result: Down-regulated in Transcription
  misc_feature: MA Experiment 20000173 PARAMETER Experiment Name: At_42deg_Heat_P Parameter: Age (day) Value: 14
  misc_feature: MA Experiment 20000173 PARAMETER Experiment Name: At_42deg_Heat_P Parameter: Organism Value: A. thaliana
  misc_feature: MA Experiment 20000173 PARAMETER Experiment Name: At_42deg_Heat_P Parameter: Plant Line Value: WS
  misc_feature: MA Experiment 20000173 PARAMETER Experiment Name: At_42deg_Heat_P Parameter: Temperature (deg C) Value: 42 vs. 22
  misc_feature: MA Experiment 20000173 PARAMETER Experiment Name: At_42deg_Heat_P Parameter: Timepoint (hr) Value: 6
  misc_feature: MA Experiment 20000173 PARAMETER Experiment Name: At_42deg_Heat_P Parameter: Tissue Value: Aerial
  misc_feature: MA Experiment ID: 20000184 Result: Down-regulated in Transcription
  misc_feature: MA Experiment 20000184 PARAMETER Experiment Name: At_Shoots__P Parameter: Age (day) Value: 7
  misc_feature: MA Experiment 20000184 PARAMETER Experiment Name: At_Shoots__P Parameter: Tissue Value: Shoots vs. Whole Plant
  misc_feature: MA Experiment ID: 20000185 Result: Down-regulated in Transcription
  misc_feature: MA Experiment 20000185 PARAMETER Experiment Name: At_Roots__P Parameter: Age (day) Value: 7 vs. 21
  misc_feature: MA Experiment 20000185 PARAMETER Experiment Name: At_Roots__P Parameter: Organism Value: A. thaliana
  misc_feature: MA Experiment 20000185 PARAMETER Experiment Name: At_Roots__P Parameter: Tissue Value: Roots vs. Whole Plant
  misc_feature: MA Experiment ID: 20000264 Result: Down-regulated in Transcription
  misc_feature: MA Experiment 20000264 PARAMETER Experiment Name: At_Open_Flower_P Parameter: Age (day) Value: 21
  misc_feature: MA Experiment 20000264 PARAMETER Experiment Name: At_Open_Flower_P Parameter: Plant Line Value: WS
  misc_feature: MA Experiment 20000264 PARAMETER Experiment Name: At_Open_Flower_P Parameter: Tissue Value: Open Flower vs. Whole Plant
  misc_feature: MA Experiment ID: 20000438 Result: Down-regulated in Transcription
  misc_feature: MA Experiment 20000438 PARAMETER Experiment Name: At_Shoots__P Parameter: Age (day) Value: 14
  misc_feature: MA Experiment 20000438 PARAMETER Experiment Name: At_Shoots__P Parameter: Tissue Value: Shoots vs. Whole Plant
  misc_feature: MA Experiment ID: 20000794 Result: Down-regulated in Transcription
  misc_feature: MA Experiment 20000794 PARAMETER Experiment Name: At_Petals_P Parameter: Age (day) Value: 23-25 days
  misc_feature: MA Experiment 20000794 PARAMETER Experiment Name: At_Petals_P Parameter: Plant Line Value: WS
  misc_feature: MA Experiment 20000794 PARAMETER Experiment Name: At_Petals_P Parameter: Tissue Value: Petals vs. Whole plant
  misc_feature: MA Experiment ID: 20001560 Result: Up-regulated in Transcription
  misc_feature: MA Experiment 20001560 PARAMETER Experiment Name: At_Drought_Soil_Dry_P Parameter: Age (day) Value: 28
  misc_feature: MA Experiment 20001560 PARAMETER Experiment Name: At_Drought_Soil_Dry_P Parameter: Organism Value: A. thaliana
  misc_feature: MA Experiment 20001560 PARAMETER Experiment Name: At_Drought_Soil_Dry_P Parameter: Plant Line Value: WS
  misc_feature: MA Experiment 20001560 PARAMETER Experiment Name: At_Drought_Soil_Dry_P Parameter: Post Timepoint (hr) Value: None
  misc_feature: MA Experiment 20001560 PARAMETER Experiment Name: At_Drought_Soil_Dry_P Parameter: Post-Treatment Value: None
  misc_feature: MA Experiment 20001560 PARAMETER Experiment Name: At_Drought_Soil_Dry_P Parameter: Timepoint (day) Value: 14
  misc_feature: MA Experiment 20001560 PARAMETER Experiment Name: At_Drought_Soil_Dry_P Parameter: Treatment Value: Drought vs. No Drought
  misc_feature: MA Experiment ID: 20001906 Result: Down-regulated in Transcription
  misc_feature: MA Experiment 20001906 PARAMETER Experiment Name: At_Drought_Reproduction_P Parameter: Age (day) Value: 35
  misc_feature: MA Experiment 20001906 PARAMETER Experiment Name: At_Drought_Reproduction_P Parameter: Organism Value: A. thaliana
  misc_feature: MA Experiment 20001906 PARAMETER Experiment Name: At_Drought_Reproduction_P Parameter: Plant Line Value: WS
  misc_feature: MA Experiment 20001906 PARAMETER Experiment Name: At_Drought_Reproduction_P Parameter: Timepoint (day) Value: 5
  misc_feature: MA Experiment 20001906 PARAMETER Experiment Name: At_Drought_Reproduction_P Parameter: Tissue Value: Siliques
  misc_feature: MA Experiment 20001906 PARAMETER Experiment Name: At_Drought_Reproduction_P Parameter: Treatment Value: Drought vs. No Drought
atgagttcttcttcggacaagttgttcaacagagacaggacaatacatgagattctgggaggaggcattgttgcagatgtgatgctgtggaggaagaagaatgtgagtgttggtatagttacagtgacaatagcttcatggatggtgtttgaggcatttgcttacactatctttactcttatttcaagtgttcttcttctcttgctctctattctcttcctctggtccaaatctgcttccattctcaacaggccatcaccgccgttaccggagtttcaaataagtgaagcgatggcggaagaagcttcgatatggttacgtattcatgtgaacaagctactccaagtttcgcatgacattgcaatggcaagagactcagagttgtataccaaagtagcagtgtcactgtttcttctctcattgatcggaagtctcatggattttcagacactttgccacaccagcgttttggtggttatgacggttccagctttctatgagagatatgaggattacattgttggctctattgagtttatctgcaacaaaactagagagctttaccttagactcgagatatgggctaatccggaaaataagaaactgagctga

SEQ ID NO: 96880 - protein, 203 aa, Arabidopsis thaliana
  peptide (1)..(203): Ceres Seq. ID no. 12734992
  misc_feature (1)..(203): Homolog of NCBI NO: 15232423 NR Description: putative protein; protein id: At3g54120.1
  misc_feature (13)..(173): Homolog of NCBI NO: 38345298 NR Description: OSJNBa0043A12.26 [Oryza sativa (japonica
  misc_feature (6)..(200): Homolog of NCBI NO: 18402246 NR Description: expressed protein; protein id: At3g19460.1, by cDNA: 37065. [Arabidopsis thaliana] gb|AAD26905.1~gene_id:MLD14.20~similar to unknown protein
  misc_feature (6)..(200): Homolog of NCBI NO: 21593206 NR Description: unknown [Arabidopsis thaliana]
  misc_feature (7)..(192): Homolog of NCBI NO: 15238125 NR Description: putative protein; protein id: At5g41600.1, by cDNA: gi_14334529, supported by cDNA: gi_16323068 [Arabidopsis >gi|10178014|dbj|BAB11466.1| contains similarity to 24 kDa seed
  misc_feature (7)..(193): Homolog of NCBI NO: 15222616 NR Description: hypothetical protein; protein id: At1g64090.1, by cDNA: gi_17381217 [Arabidopsis thaliana] F22C12.15 [Arabidopsis thaliana] >gi|17381218|gb|AAL36421.1|
  misc_feature (7)..(173): Homolog of NCBI NO: 34904202 NR Description: P0492F05.25 [Oryza sativa (japonica
  misc_feature (3)..(173): Homolog of NCBI NO: 26450318 NR Description: unknown protein [Arabidopsis thaliana]
  misc_feature (1)..(173): Homolog of NCBI NO: 15236556 NR Description: putative protein; protein id: At4g23630.1, by cDNA: 39185., supported by cDNA: gi_15215585 [Arabidopsis
  misc_feature (29)..(158): Homolog of NCBI NO: 38344513 NR Description: OSJNBa0016N04.6 [Oryza sativa (japonica
MSSSSDKLFNRDRTIHEILGGGIVADVMLWRKKNVSVGIVTVTIASWMVFEAFAYTIFTLISSVLLLLLSILFLWSKSASILNRPSPPLPEFQISEAMAEEASIWLRIHVNKLLQVSHDIAMARDSELYTKVAVSLFLLSLIGSLMDFQTLCHTSVLVVMTVPAFYERYEDYIVGSIEFICNKTRELYLRLEIWANPENKKLS

SEQ ID NO: 96881 - protein, 176 aa, Arabidopsis thaliana
  peptide (1)..(176): Ceres Seq. ID no. 12734993
  misc_feature (1)..(176): Homolog of NCBI NO: 15232423 NR Description: putative protein; protein id: At3g54120.1
  misc_feature (1)..(146): Homolog of NCBI NO: 38345298 NR Description: OSJNBa0043A12.26 [Oryza sativa (japonica
  misc_feature (1)..(173): Homolog of NCBI NO: 18402246 NR Description: expressed protein; protein id: At3g19460.1, by cDNA: 37065. [Arabidopsis thaliana] gb|AAD26905.1~gene_id:MLD14.20~similar to unknown protein
  misc_feature (1)..(173): Homolog of NCBI NO: 21593206 NR Description: unknown [Arabidopsis thaliana]
  misc_feature (1)..(165): Homolog of NCBI NO: 15238125 NR Description: putative protein; protein id: At5g41600.1, by cDNA: gi_14334529, supported by cDNA: gi_16323068 [Arabidopsis >gi|10178014|dbj|BAB11466.1| contains similarity to 24 kDa seed
  misc_feature (1)..(166): Homolog of NCBI NO: 15222616 NR Description: hypothetical protein; protein id: At1g64090.1, by cDNA: gi_17381217 [Arabidopsis thaliana] F22C12.15 [Arabidopsis thaliana] >gi|17381218|gb|AAL36421.1|
  misc_feature (1)..(146): Homolog of NCBI NO: 34904202 NR Description: P0492F05.25 [Oryza sativa (japonica
  misc_feature (1)..(146): Homolog of NCBI NO: 26450318 NR Description: unknown protein [Arabidopsis thaliana]
  misc_feature (1)..(146): Homolog of NCBI NO: 15236556 NR Description: putative protein; protein id: At4g23630.1, by cDNA: 39185., supported by cDNA: gi_15215585 [Arabidopsis
  misc_feature (2)..(131): Homolog of NCBI NO: 38344513 NR Description: OSJNBa0016N04.6 [Oryza sativa (japonica
MLWRKKNVSVGIVTVTIASWMVFEAFAYTIFTLISSVLLLLLSILFLWSKSASILNRPSPPLPEFQISEAMAEEASIWLRIHVNKLLQVSHDIAMARDSELYTKVAVSLFLLSLIGSLMDFQTLCHTSVLVVMTVPAFYERYEDYIVGSIEFICNKTRELYLRLEIWANPENKKLS

SEQ ID NO: 96882 - protein, 156 aa, Arabidopsis thaliana
  peptide (1)..(156): Ceres Seq. ID no. 12734994
  misc_feature (1)..(156): Homolog of NCBI NO: 15232423 NR Description: putative protein; protein id: At3g54120.1
  misc_feature (1)..(126): Homolog of NCBI NO: 38345298 NR Description: OSJNBa0043A12.26 [Oryza sativa (japonica
  misc_feature (1)..(153): Homolog of NCBI NO: 18402246 NR Description: expressed protein; protein id: At3g19460.1, by cDNA: 37065. [Arabidopsis thaliana] gb|AAD26905.1~gene_id:MLD14.20~similar to unknown protein
  misc_feature (1)..(153): Homolog of NCBI NO: 21593206 NR Description: unknown [Arabidopsis thaliana]
  misc_feature (1)..(145): Homolog of NCBI NO: 15238125 NR Description: putative protein; protein id: At5g41600.1, by cDNA: gi_14334529, supported by cDNA: gi_16323068 [Arabidopsis >gi|10178014|dbj|BAB11466.1| contains similarity to 24 kDa seed
  misc_feature (1)..(146): Homolog of NCBI NO: 15222616 NR Description: hypothetical protein; protein id: At1g64090.1, by cDNA: gi_17381217 [Arabidopsis thaliana] F22C12.15 [Arabidopsis thaliana] >gi|17381218|gb|AAL36421.1|
  misc_feature (1)..(126): Homolog of NCBI NO: 34904202 NR Description: P0492F05.25 [Oryza sativa (japonica
  misc_feature (1)..(126): Homolog of NCBI NO: 26450318 NR Description: unknown protein [Arabidopsis thaliana]
  misc_feature (1)..(126): Homolog of NCBI NO: 15236556 NR Description: putative protein; protein id: At4g23630.1, by cDNA: 39185., supported by cDNA: gi_15215585 [Arabidopsis
  misc_feature (1)..(111): Homolog of NCBI NO: 38344513 NR Description: OSJNBa0016N04.6 [Oryza sativa (japonica
MVFEAFAYTIFTLISSVLLLLLSILFLWSKSASILNRPSPPLPEFQISEAMAEEASIWLRIHVNKLLQVSHDIAMARDSELYTKVAVSLFLLSLIGSLMDFQTLCHTSVLVVMTVPAFYERYEDYIVGSIEFICNKTRELYLRLEIWANPENKKLS

SEQ ID NO: 96883 - DNA, 822 bp, Arabidopsis thaliana
  misc_feature (1)..(822): Ceres Seq. ID no. 12735009
  misc_feature: MA Experiment ID: 20000171 Result: Down-regulated in Transcription
  misc_feature: MA Experiment 20000171 PARAMETER Experiment Name: At_42deg_Heat_P Parameter: Age (day) Value: 14
  misc_feature: MA Experiment 20000171 PARAMETER Experiment Name: At_42deg_Heat_P Parameter: Organism Value: A. thaliana
  misc_feature: MA Experiment 20000171 PARAMETER Experiment Name: At_42deg_Heat_P Parameter: Plant Line Value: WS
  misc_feature: MA Experiment 20000171 PARAMETER Experiment Name: At_42deg_Heat_P Parameter: Temperature (deg C) Value: 42 vs. 22
  misc_feature: MA Experiment 20000171 PARAMETER Experiment Name: At_42deg_Heat_P Parameter: Timepoint (hr) Value: 1
  misc_feature: MA Experiment 20000171 PARAMETER Experiment Name: At_42deg_Heat_P Parameter: Tissue Value: Aerial
  misc_feature: MA Experiment ID: 20000182 Result: Up-regulated in Transcription
  misc_feature: MA Experiment 20000182 PARAMETER Experiment Name: At_2mM_SA_P Parameter: Age (day) Value: 14
  misc_feature: MA Experiment 20000182 PARAMETER Experiment Name: At_2mM_SA_P Parameter: Organism Value: A. thaliana
  misc_feature: MA Experiment 20000182 PARAMETER Experiment Name: At_2mM_SA_P Parameter: Plant Line Value: WS
  misc_feature: MA Experiment 20000182 PARAMETER Experiment Name: At_2mM_SA_P Parameter: Timepoint (hr) Value: 6
  misc_feature: MA Experiment 20000182 PARAMETER Experiment Name: At_2mM_SA_P Parameter: Tissue Value: Aerial
  misc_feature: MA Experiment 20000182 PARAMETER Experiment Name: At_2mM_SA_P Parameter: Treatment Value: 2mM SA vs. No Treatment
  misc_feature: MA Experiment ID: 20000185 Result: Up-regulated in Transcription
  misc_feature: MA Experiment 20000185 PARAMETER Experiment Name: At_Roots__P Parameter: Age (day) Value: 7 vs. 21
  misc_feature: MA Experiment 20000185 PARAMETER Experiment Name: At_Roots__P Parameter: Organism Value: A. thaliana
  misc_feature: MA Experiment 20000185 PARAMETER Experiment Name: At_Roots__P Parameter: Tissue Value: Roots vs. Whole Plant
  misc_feature: MA Experiment ID: 20000234 Result: Down-regulated in Transcription
  misc_feature: MA Experiment 20000234 PARAMETER Experiment Name: At_Siliques_P Parameter: Age (day) Value: 21
  misc_feature: MA Experiment 20000234 PARAMETER Experiment Name: At_Siliques_P Parameter: Organism Value: A. thaliana
  misc_feature: MA Experiment 20000234 PARAMETER Experiment Name: At_Siliques_P Parameter: Plant Line Value: WS
  misc_feature: MA Experiment 20000234 PARAMETER Experiment Name: At_Siliques_P Parameter: Tissue Value: Less Than 5mm Siliques vs. Whole Plant
  misc_feature: MA Experiment ID: 20000235 Result: Down-regulated in Transcription
  misc_feature: MA Experiment 20000235 PARAMETER Experiment Name: At_Siliques_P Parameter: Age (day) Value: 21
  misc_feature: MA Experiment 20000235 PARAMETER Experiment Name: At_Siliques_P Parameter: Organism Value: A. thaliana
  misc_feature: MA Experiment 20000235 PARAMETER Experiment Name: At_Siliques_P Parameter: Plant Line Value: WS
  misc_feature: MA Experiment 20000235 PARAMETER Experiment Name: At_Siliques_P Parameter: Tissue Value: 5-10mm Siliques vs. Whole Plant
  misc_feature: MA Experiment ID: 20000286 Result: Down-regulated in Transcription
  misc_feature: MA Experiment 20000286 PARAMETER Experiment Name: At_Open_Flower_P Parameter: Age (day) Value: 21
  misc_feature: MA Experiment 20000286 PARAMETER Experiment Name: At_Open_Flower_P Parameter: Plant Line Value: WS
  misc_feature: MA Experiment 20000286 PARAMETER Experiment Name: At_Open_Flower_P Parameter: Tissue Value: Half Open vs. Whole Plant
  misc_feature: MA Experiment ID: 20000436 Result: Down-regulated in Transcription
  misc_feature: MA Experiment 20000436 PARAMETER Experiment Name: At_Drought_P Parameter: Age (day) Value: 7
  misc_feature: MA Experiment 20000436 PARAMETER Experiment Name: At_Drought_P Parameter: Organism Value: A. thaliana
  misc_feature: MA Experiment 20000436 PARAMETER Experiment Name: At_Drought_P Parameter: Plant Line Value: WS
  misc_feature: MA Experiment 20000436 PARAMETER Experiment Name: At_Drought_P Parameter: Timepoint (hr) Value: 12
  misc_feature: MA Experiment 20000436 PARAMETER Experiment Name: At_Drought_P Parameter: Tissue Value: Whole Plant
  misc_feature: MA Experiment 20000436 PARAMETER Experiment Name: At_Drought_P Parameter: Treatment Value: Drought vs. No Drought
  misc_feature: MA Experiment ID: 20000437 Result: Down-regulated in Transcription
  misc_feature: MA Experiment 20000437 PARAMETER Experiment Name: At_Drought_P Parameter: Age (day) Value: 8
  misc_feature: MA Experiment 20000437 PARAMETER Experiment Name: At_Drought_P Parameter: Organism Value: A. thaliana
  misc_feature: MA Experiment 20000437 PARAMETER Experiment Name: At_Drought_P Parameter: Plant Line Value: WS
  misc_feature: MA Experiment 20000437 PARAMETER Experiment Name: At_Drought_P Parameter: Timepoint (hr) Value: 24
  misc_feature: MA Experiment 20000437 PARAMETER Experiment Name: At_Drought_P Parameter: Tissue Value: Whole Plant
  misc_feature: MA Experiment 20000437 PARAMETER Experiment Name: At_Drought_P Parameter: Treatment Value: Drought vs. No Drought
  misc_feature: MA Experiment ID: 20000439 Result: Up-regulated in Transcription
  misc_feature: MA Experiment 20000439 PARAMETER Experiment Name: At_Roots__P Parameter: Age (day) Value: 14 vs. 21
  misc_feature: MA Experiment 20000439 PARAMETER Experiment Name: At_Roots__P Parameter: Organism Value: A. thaliana
  misc_feature: MA Experiment 20000439 PARAMETER Experiment Name: At_Roots__P Parameter: Tissue Value: Roots vs. Whole Plant
  misc_feature: MA Experiment ID: 20000451 Result: Down-regulated in Transcription
  misc_feature: MA Experiment 20000451 PARAMETER Experiment Name: At_CS6879_Shoots-Roots_P Parameter: Age (day) Value: 14
  misc_feature: MA Experiment 20000451 PARAMETER Experiment Name: At_CS6879_Shoots-Roots_P Parameter: Organism Value: A. thaliana
  misc_feature: MA Experiment 20000451 PARAMETER Experiment Name: At_CS6879_Shoots-Roots_P Parameter: Plant Line Value: CS6879 vs. WS
  misc_feature: MA Experiment 20000451 PARAMETER Experiment Name: At_CS6879_Shoots-Roots_P Parameter: Tissue Value: Roots
  misc_feature: MA Experiment ID: 20000456 Result: Up-regulated in Transcription
  misc_feature: MA Experiment 20000456 PARAMETER Experiment Name: At_100uM_BA_P Parameter: Age (day) Value: 14
  misc_feature: MA Experiment 20000456 PARAMETER Experiment Name: At_100uM_BA_P Parameter: Organism Value: A. thaliana
  misc_feature: MA Experiment 20000456 PARAMETER Experiment Name: At_100uM_BA_P Parameter: Plant Line Value: WS
  misc_feature: MA Experiment 20000456 PARAMETER Experiment Name: At_100uM_BA_P Parameter: Timepoint (hr) Value: 6
  misc_feature: MA Experiment 20000456 PARAMETER Experiment Name: At_100uM_BA_P Parameter: Tissue Value: Aerial
  misc_feature: MA Experiment 20000456 PARAMETER Experiment Name: At_100uM_BA_P Parameter: Treatment Value: 100uM BA vs. No Treatment
  misc_feature: MA Experiment ID: 20000495 Result: Up-regulated in Transcription
  misc_feature: MA Experiment 20000495 PARAMETER Experiment Name: At_Guard_Cells_P Parameter: Harvest Date Value: 8/2/2002
  misc_feature: MA Experiment 20000495 PARAMETER Experiment Name: At_Guard_Cells_P Parameter: Organism Value: A. thaliana
  misc_feature: MA Experiment 20000495 PARAMETER Experiment Name: At_Guard_Cells_P Parameter: Tissue Value: Guard Cells vs. Leaves
  misc_feature: MA Experiment ID: 20000496 Result: Up-regulated in Transcription
  misc_feature: MA Experiment 20000496 PARAMETER Experiment Name: At_Guard_Cells_P Parameter: Harvest Date Value: 7/19/2002
  misc_feature: MA Experiment 20000496 PARAMETER Experiment Name: At_Guard_Cells_P Parameter: Organism Value: Canola
  misc_feature: MA Experiment 20000496 PARAMETER Experiment Name: At_Guard_Cells_P Parameter: Tissue Value: Guard Cells vs. Leaves
  misc_feature: MA Experiment ID: 20000794 Result: Down-regulated in Transcription
  misc_feature: MA Experiment 20000794 PARAMETER Experiment Name: At_Petals_P Parameter: Age (day) Value: 23-25 days
  misc_feature: MA Experiment 20000794 PARAMETER Experiment Name: At_Petals_P Parameter: Plant Line Value: WS
  misc_feature: MA Experiment 20000794 PARAMETER Experiment Name: At_Petals_P Parameter: Tissue Value: Petals vs. Whole plant
  misc_feature: MA Experiment ID: 20001556 Result: Down-regulated in Transcription
  misc_feature: MA Experiment 20001556 PARAMETER Experiment Name: At_Drought_Soil_Dry_P Parameter: Age (day) Value: 26
  misc_feature: MA Experiment 20001556 PARAMETER Experiment Name: At_Drought_Soil_Dry_P Parameter: Organism Value: A. thaliana
  misc_feature: MA Experiment 20001556 PARAMETER Experiment Name: At_Drought_Soil_Dry_P Parameter: Plant Line Value: WS
  misc_feature: MA Experiment 20001556 PARAMETER Experiment Name: At_Drought_Soil_Dry_P Parameter: Post Timepoint (hr) Value: None
  misc_feature: MA Experiment 20001556 PARAMETER Experiment Name: At_Drought_Soil_Dry_P Parameter: Post-Treatment Value: None
  misc_feature: MA Experiment 20001556 PARAMETER Experiment Name: At_Drought_Soil_Dry_P Parameter: Timepoint (day) Value: 12
  misc_feature: MA Experiment 20001556 PARAMETER Experiment Name: At_Drought_Soil_Dry_P Parameter: Treatment Value: Drought vs. No Drought
atgttgactcccaccatttctaaatccatctctttagtaaccattctattagttctacaagctttctctaacacaacaaaggctcaaaattgcggttgttcgtcagagctatgttgtagtcagtttggcttttgcggtaacacttcagactattgtggtgtaggttgccaacaaggaccttgttttgctcctccccctgcaaatggtgtctctgtggctgagattgtaacgcaagaattcttcaatggaatcatcagtcaagccgcgtctagttgcgccggcaatagattttacagtcggggagcttttcttgaggccttagactcatattctcgtttcggtagagttggatcgaccgacgactctaggcgtgagattgcagcgttctttgctcatgtcacacatgaaacaggacatttctgctacatagaagagatagacggagcctcaaaggattactgcgacgagaatgcaacacaatatccatgcaatcctaacaaaggctactacggccgcggaccgatccaactctcttggaatttcaactacgggccagccgggacagcaattggtttcgacggcctgaatgcaccggaaacagtagccacggatccagtcatatccttcaaaaccgccttgtggtactggaccaatagggttcagcctgttatctctcaaggttttggtgcaacaatccgtgccattaacggtgctttggagtgtgacggggccaacacagccaccgttcaagctagagttcgttactacacggattattgtcgtcaacttggcgttgatcctggaaacaacctcacttgctaa

SEQ ID NO: 96884 - protein, 273 aa, Arabidopsis thaliana
  peptide (1)..(273): Ceres Seq. ID no. 12735010
  misc_feature (75)..(273): Pfam Name: Chitinase class I Pfam Description: Chitinase class I
  misc_feature (1)..(273): Homolog of NCBI NO: 15232509 NR Description: glycosyl hydrolase family 19 (class IV protein id: At3g54420.1 [Arabidopsis thaliana]
  misc_feature (1)..(273): Homolog of NCBI NO: 2597826 NR Description: class IV chitinase [Arabidopsis thaliana]
  misc_feature (6)..(273): Homolog of NCBI NO: 1403522 NR Description: chitinase [Phaseolus vulgaris]
  misc_feature (6)..(273): Homolog of NCBI NO: 116324 NR Description: ENDOCHITINASE PR4 PRECURSOR
  misc_feature (7)..(273): Homolog of NCBI NO: 40557195 NR Description: class IV chitinase precursor [Medicago truncatula]
  misc_feature (7)..(273): Homolog of NCBI NO: 33413754 NR Description: class IV chitinase [Vitis vinifera]
  misc_feature (12)..(273): Homolog of NCBI NO: 33329392 NR Description: class IV chitinase [Vitis vinifera]
  misc_feature (12)..(273): Homolog of NCBI NO: 2306811 NR Description: class IV endochitinase [Vitis vinifera]
  misc_feature (28)..(273): Homolog of NCBI NO: 1362076 NR Description: chitinase class 4 - cowpea (fragment)
  misc_feature (12)..(273): Homolog of NCBI NO: 2306813 NR Description: class IV endochitinase [Vitis vinifera]
MLTPTISKSISLVTILLVLQAFSNTTKAQNCGCSSELCCSQFGFCGNTSDYCGVGCQQGPCFAPPPANGVSVAEIVTQEFFNGIISQAASSCAGNRFYSRGAFLEALDSYSRFGRVGSTDDSRREIAAFFAHVTHETGHFCYIEEIDGASKDYCDENATQYPCNPNKGYYGRGPIQLSWNFNYGPAGTAIGFDGLNAPETVATDPVISFKTALWYWTNRVQPVISQGFGATIRAINGALECDGANTATVQARVRYYTDYCRQLGVDPGNNLTC

SEQ ID NO: 96885 - DNA, 702 bp, Arabidopsis thaliana
  misc_feature (1)..(702): Ceres Seq. ID no. 12735023
  misc_feature: MA Experiment ID: 20000180 Result: Down-regulated in Transcription
  misc_feature: MA Experiment 20000180 PARAMETER Experiment Name: At_Germinating_Seeds_P Parameter: Age (hr) Value: 24 vs. 0
  misc_feature: MA Experiment 20000180 PARAMETER Experiment Name: At_Germinating_Seeds_P Parameter: Tissue Value: Germinating Seeds
  misc_feature: MA Experiment ID: 20000265 Result: Up-regulated in Transcription
  misc_feature: MA Experiment 20000265 PARAMETER Experiment Name: At_Open_Flower_P Parameter: Age (day) Value: 21
  misc_feature: MA Experiment 20000265 PARAMETER Experiment Name: At_Open_Flower_P Parameter: Plant Line Value: WS
  misc_feature: MA Experiment 20000265 PARAMETER Experiment Name: At_Open_Flower_P Parameter: Tissue Value: Closed Flower vs. Whole Plant
atggaggagacaatggccgaagaagggtgctgtgaaaatgttgagtcgacgtttgacgacggtaccaactgtatttcgaagactgaggacaccggaggaatcgaaagcaagaggttttacttggctcgcacgacagcttttgagatgcttcgcgatagaggctacgaagttaatgaagctgagctctctctcactctttctgagtttcgttctgtttttggtgagaagcctgagcttgaacgcctccgtatctgcgttcctcttcgctcagatcccaagaaaaagatccttgttgtgttcatgggaactgaaccaatcaccgtgaagtcagttcgtgctcttcatattcagatttccaacaatgtaggcttgcatgctatgattctggttttacagagcaaaatgaaccactttgcccagaaggcattgactaccttcccttttacagttgaaactttcccgattgaagatttgttggtcaacatcacaaagcacattcagcagccaaagattgagattttaaacaaagaggagaaagaacaactgctgaggaagcatgcacttgaggacaaacagcttccttatttgcaggagaaggacagctttgtgaggtactatgggttaaagaaaaaacaggtggtgaagattacatacagtaaagagcctgttggggattttgtgacataccgatgcatcatctga

SEQ ID NO: 96886 - protein, 233 aa, Arabidopsis thaliana
  peptide (1)..(233): Ceres Seq. ID no. 12735024
  misc_feature (34)..(117): Pfam Name: RNA polymerase Rpb5, N-terminal domain Pfam Description: RNA polymerase Rpb5, N-terminal domain
  misc_feature (1)..(233): Homolog of NCBI NO: 15232524 NR Description: RNA polymerase 24kDa subunit -like protein; id: At3g54490.1 [Arabidopsis thaliana] >gi|11261042|pir||T47608
  misc_feature (24)..(232): Homolog of NCBI NO: 15230206 NR Description: putative protein; protein id: At3g57080.1, by cDNA: 8751. [Arabidopsis thaliana] >gi|11261045|pir||T47768
  misc_feature (24)..(232): Homolog of NCBI NO: 21617912 NR Description: putative DNA-directed RNA polymerase 23kD subunit
  misc_feature (34)..(232): Homolog of NCBI NO: 15227327 NR Description: putative DNA-directed RNA polymerase 23kD protein id: At2g41340.1, supported by cDNA: gi_19310384 thaliana] >gi|25288347|pir||E84840 hypothetical protein At2g41340
  misc_feature (25)..(231): Homolog of NCBI NO: 8896071 NR Description: RPB5d [Brassica napus]
  misc_feature (35)..(233): Homolog of NCBI NO: 15228724 NR Description: RNA polymerase I, II and III 24.3 kDa subunit; id: At3g22320.1, supported by cDNA: 21828., supported by cDNA: supported by cDNA: gi_15724321, supported by cDNA: gi_3372232
  misc_feature (34)..(233): Homolog of NCBI NO: 39595790 NR Description: Hypothetical protein CBG12745 [Caenorhabditis
  misc_feature (35)..(232): Homolog of NCBI NO: 28497750 NR Description: polymerase (RNA) II (DNA directed) polypeptide E musculus] >gi|28374319|gb|AAH45521.1| similar to DNA directed RNA
  misc_feature (35)..(232): Homolog of NCBI NO: 1173134 NR Description: DNA-directed RNA polymerase II 23 kDa polypeptide
  misc_feature (35)..(232): Homolog of NCBI NO: 14589951 NR Description: DNA directed RNA polymerase II polypeptide E; (RNA) II (DNA directed) polypeptide E (25kD); DNA directed RNA II 23 kda polypeptide [Homo sapiens] >gi|678549|gb|AAA62401.1|
MEETMAEEGCCENVESTFDDGTNCISKTEDTGGIESKRFYLARTTAFEMLRDRGYEVNEAELSLTLSEFRSVFGEKPELERLRICVPLRSDPKKKILVVFMGTEPITVKSVRALHIQISNNVGLHAMILVLQSKMNHFAQKALTTFPFTVETFPIEDLLVNITKHIQQPKIEILNKEEKEQLLRKHALEDKQLPYLQEKDSFVRYYGLKKKQVVKITYSKEPVGDFVTYRCII

SEQ ID NO: 96887 - protein, 229 aa, Arabidopsis thaliana
  peptide (1)..(229): Ceres Seq. ID no. 12735025
  misc_feature (30)..(113): Pfam Name: RNA polymerase Rpb5, N-terminal domain Pfam Description: RNA polymerase Rpb5, N-terminal domain
  misc_feature (1)..(229): Homolog of NCBI NO: 15232524 NR Description: RNA polymerase 24kDa subunit -like protein; id: At3g54490.1 [Arabidopsis thaliana] >gi|11261042|pir||T47608
  misc_feature (20)..(228): Homolog of NCBI NO: 15230206 NR Description: putative protein; protein id: At3g57080.1, by cDNA: 8751. [Arabidopsis thaliana] >gi|11261045|pir||T47768
  misc_feature (20)..(228): Homolog of NCBI NO: 21617912 NR Description: putative DNA-directed RNA polymerase 23kD subunit
  misc_feature (30)..(228): Homolog of NCBI NO: 15227327 NR Description: putative DNA-directed RNA polymerase 23kD protein id: At2g41340.1, supported by cDNA: gi_19310384 thaliana] >gi|25288347|pir||E84840 hypothetical protein At2g41340
  misc_feature (21)..(227): Homolog of NCBI NO: 8896071 NR Description: RPB5d [Brassica napus]
  misc_feature (31)..(229): Homolog of NCBI NO: 15228724 NR Description: RNA polymerase I, II and III 24.3 kDa subunit; id: At3g22320.1, supported by cDNA: 21828., supported by cDNA: supported by cDNA: gi_15724321, supported by cDNA: gi_3372232
  misc_feature (30)..(229): Homolog of NCBI NO: 39595790 NR Description: Hypothetical protein CBG12745 [Caenorhabditis
  misc_feature (31)..(228): Homolog of NCBI NO: 28497750 NR Description: polymerase (RNA) II (DNA directed) polypeptide E musculus] >gi|28374319|gb|AAH45521.1| similar to DNA directed RNA
  misc_feature (31)..(228): Homolog of NCBI NO: 1173134 NR Description: DNA-directed RNA polymerase II 23 kDa polypeptide
  misc_feature (31)..(228): Homolog of NCBI NO: 14589951 NR Description: DNA directed RNA polymerase II polypeptide E; (RNA) II (DNA directed) polypeptide E (25kD); DNA directed RNA II 23 kda polypeptide [Homo sapiens] >gi|678549|gb|AAA62401.1|
MAEEGCCENVESTFDDGTNCISKTEDTGGIESKRFYLARTTAFEMLRDRGYEVNEAELSLTLSEFRSVFGEKPELERLRICVPLRSDPKKKILVVFMGTEPITVKSVRALHIQISNNVGLHAMILVLQSKMNHFAQKALTTFPFTVETFPIEDLLVNITKHIQQPKIEILNKEEKEQLLRKHALEDKQLPYLQEKDSFVRYYGLKKKQVVKITYSKEPVGDFVTYRCII

SEQ ID NO: 96888 - protein, 185 aa, Arabidopsis thaliana
  peptide (1)..(185): Ceres Seq. ID no. 12735026
  misc_feature (1)..(69): Pfam Name: RNA polymerase Rpb5, N-terminal domain Pfam Description: RNA polymerase Rpb5, N-terminal domain
  misc_feature (1)..(185): Homolog of NCBI NO: 15232524 NR Description: RNA polymerase 24kDa subunit -like protein; id: At3g54490.1 [Arabidopsis thaliana] >gi|11261042|pir||T47608
  misc_feature (1)..(184): Homolog of NCBI NO: 15230206 NR Description: putative protein; protein id: At3g57080.1, by cDNA: 8751. [Arabidopsis thaliana] >gi|11261045|pir||T47768
  misc_feature (1)..(184): Homolog of NCBI NO: 21617912 NR Description: putative DNA-directed RNA polymerase 23kD subunit
  misc_feature (1)..(184): Homolog of NCBI NO: 15227327 NR Description: putative DNA-directed RNA polymerase 23kD protein id: At2g41340.1, supported by cDNA: gi_19310384 thaliana] >gi|25288347|pir||E84840 hypothetical protein At2g41340
  misc_feature (1)..(183): Homolog of NCBI NO: 8896071 NR Description: RPB5d [Brassica napus]
  misc_feature (1)..(185): Homolog of NCBI NO: 15228724 NR Description: RNA polymerase I, II and III 24.3 kDa subunit; id: At3g22320.1, supported by cDNA: 21828., supported by cDNA: supported by cDNA: gi_15724321, supported by cDNA: gi_3372232
  misc_feature (1)..(185): Homolog of NCBI NO: 39595790 NR Description: Hypothetical protein CBG12745 [Caenorhabditis
  misc_feature (1)..(184): Homolog of NCBI NO: 28497750 NR Description: polymerase (RNA) II (DNA directed) polypeptide E musculus] >gi|28374319|gb|AAH45521.1| similar to DNA directed RNA
  misc_feature (1)..(184): Homolog of NCBI NO: 1173134 NR Description: DNA-directed RNA polymerase II 23 kDa polypeptide
  misc_feature (1)..(184): Homolog of NCBI NO: 14589951 NR Description: DNA directed RNA polymerase II polypeptide E; (RNA) II (DNA directed) polypeptide E (25kD); DNA directed RNA II 23 kda polypeptide [Homo sapiens] >gi|678549|gb|AAA62401.1|
MLRDRGYEVNEAELSLTLSEFRSVFGEKPELERLRICVPLRSDPKKKILVVFMGTEPITVKSVRALHIQISNNVGLHAMILVLQSKMNHFAQKALTTFPFTVETFPIEDLLVNITKHIQQPKIEILNKEEKEQLLRKHALEDKQLPYLQEKDSFVRYYGLKKKQVVKITYSKEPVGDFVTYRCII

SEQ ID NO: 96889 - DNA, 2856 bp, Arabidopsis thaliana
  misc_feature (1)..(2856): Ceres Seq. ID no. 12735047
  misc_feature: MA Experiment ID: 20000307 Result: Up-regulated in Transcription
  misc_feature: MA Experiment 20000307 PARAMETER Experiment Name: At_Germinating_Seeds_Sub_P Parameter: Age (hr) Value: 24 vs. 0
  misc_feature: MA Experiment 20000307 PARAMETER Experiment Name: At_Germinating_Seeds_Sub_P Parameter: Organism Value: A. thaliana
  misc_feature: MA Experiment 20000307 PARAMETER Experiment Name: At_Germinating_Seeds_Sub_P Parameter: Plant Line Value: WS
  misc_feature: MA Experiment 20000307 PARAMETER Experiment Name: At_Germinating_Seeds_Sub_P Parameter: Tissue Value: Germinating Seeds
  misc_feature: MA Experiment ID: 20000314 Result: Up-regulated in Transcription
  misc_feature: MA Experiment 20000314 PARAMETER Experiment Name: At_14day_Shoots-Roots_Sub_P Parameter: Age (day) Value: 14
  misc_feature: MA Experiment 20000314 PARAMETER Experiment Name: At_14day_Shoots-Roots_Sub_P Parameter: Organism Value: A. thaliana
  misc_feature: MA Experiment 20000314 PARAMETER Experiment Name: At_14day_Shoots-Roots_Sub_P Parameter: Plant Line Value: WS
  misc_feature: MA Experiment 20000314 PARAMETER Experiment Name: At_14day_Shoots-Roots_Sub_P Parameter: Tissue Value: Roots vs. Whole Plant
atggggccttcaacccatctcatttgcgctctaggagttgtcatcatggcaacaatggttgctgcatatgatccatacacagatagctctccaccaccactgtattcctcaccgcttcctaagattgaatacaaaactcccccactaccatacatcgacagttccccaccaccaacttactcaccggctcctgaagtagaatacaaatctcctccaccaccatatgtttacagctcaccaccaccaccgacctactctccatccccaaaggttgagtacaaatctcctccaccaccgtatgtctacagctccccaccaccaccaacctactctccatccccaaaggttgagtacaaatctcctccaccaccctatgtttacagctccccaccaccgccaacctactctccatccccaaaggttgagtacaaatctcctccaccaccgtacgtgtacagctccccaccaccaccaacctattccccatccccaaaggttgaatacaaatctcctccaccaccgtacgtctacagctccccaccaccaccaacctactccccatctcctaaggttgagtacaagtctcctccacccccgtacgtctacagctctccaccaccaccatactactcaccgtccccaaaggtagagtacaagtctcctccaccaccgtacgtctacagctctccaccaccaccaacatactctccatccccaaaggttgattacaagtctcctccacccccgtacgtctacagctctccaccaccaccatactactcaccgtccccaaaggtagagtacaagtctcctccaccaccgtacgtctacagctctccaccaccaccaacatactctccatccccaaaggttgattacaagtctcctccaccaccgtacgtctacagctccccaccacctccatactactcaccatctccaaaggttgactacaaatctcctccaccaccctatgtttacagctccccaccaccgccaacctactctccatccccaaaggttgagtacaaatctcctccaccaccctatgtctacagctccccaccaccgccaacctactctccatccccaaaggttgagtacaaatctcctccaccaccgtacgtctacagctctccaccaccaccaacctattccccatccccaaaggttgaatacaaatctcctccaccaccgtacgtctacagctccccaccaccaccaacctactccccatctcctaaggttgagtacaagtctcctccacccccgtacgtctacagctctccaccaccaccatactactcaccgtccccaaaggtagagtacaagtctcctccaccaccgtacgtctacagctctccaccaccaccaacatactctccatccccaaaggttgattacaagtctcctccacccccgtacgtctacagctctccaccaccaccatactactcaccttctcctaaggtgtactacaagtccccaccaccaccttacgtctacagttctccaccaccaccatactattcaccttctcctaaagtgtactacaagtctcctccaccaccgtacgtttacagctccccaccaccaccatactactcaccttcgcctaaggtttactacaaatctccaccaccaccatactattcaccttctcctaaggtgtactacaagtctcctccaccaccgtacgtttacagctccccaccaccaccatactactcaccttcgcctaaggtttactacaaatctccaccaccaccgtacgtctacagctctccaccaccaccataccactcaccttcgcccaaggtgcaatacaaatccccaccaccaccatacgtttacagttctcccccaccaccatactattcaccatctcctaaggtgtactacaaatctccaccaccaccttacgtctacagttctcccccaccaccatactactctccttcacctaaagtgtactacaagtctccaccaccaccgtatgtctacagctccccaccacctccatactactcgccttcacctaaggtgtactacaagtctccaccacatcctcatgtttgtgtttgtccaccacctcctccatgttattctccatcccccaaggttgtgtacaagtctcctccaccaccatatgtctacagttctccaccaccaccacactactcaccttcccctaaggtatattacaagtcacccccaccaccatatgtttacagttctccacccccaccatattactcaccttcccctaaggtgcactacaaatctcctccaccaccatactacgcacctactcctaaggtacattacaagtctcctccaccaccatatgtctacagttctccaccacctccatattactcaccttctcctaaggttcactacaaatctcctccaccaccatacgtctacagctccccaccaccaccatactattcaccctctcctaaggtagaatacaagtctcccccaccaccgtatgtttacagttctcctccaccaccatactactcaccttcccctaaggttgactacaaatctcctccaccaccatatgtctacagttcaccaccaccaccatattattcaccttcccctaaggtagactacaagtctcctccaccaccgtatgtctacagttctccaccacctccatattactcaccttctcctgtggtagactacaagtctcctccaccaccatatgtctacagttccccaccaccaccttattattctccttctccaaaggttgaatacaaatctcccccaccaccatatgtttacaaatccccacctccaccttcgtattcaccttctccaaaaactgagtactaa

SEQ ID NO: 96890 - protein, 951 aa, Arabidopsis thaliana
  peptide (1)..(951): Ceres Seq. ID no. 12735048
  misc_feature (47)..(358): Pfam Name: Formin Homology 2 Domain Pfam Description: Formin Homology 2 Domain
  misc_feature (75)..(671): Homolog of NCBI NO: 15239790 NR Description: putative protein; protein id: At5g49080.1 thaliana] >gi|10176941|dbj|BAB10090.1|
  misc_feature (34)..(646): Homolog of NCBI NO: 15239790 NR Description: putative protein; protein id: At5g49080.1 thaliana] >gi|10176941|dbj|BAB10090.1|
  misc_feature (100)..(696): Homolog of NCBI NO: 15239790 NR Description: putative protein; protein id: At5g49080.1 thaliana] >gi|10176941|dbj|BAB10090.1|
  misc_feature (150)..(752): Homolog of NCBI NO: 15239790 NR Description: putative protein; protein id: At5g49080.1 thaliana] >gi|10176941|dbj|BAB10090.1|
  misc_feature (13)..(626): Homolog of NCBI NO: 15239790 NR Description: putative protein; protein id: At5g49080.1 thaliana] >gi|10176941|dbj|BAB10090.1|
  misc_feature (175)..(772): Homolog of NCBI NO: 15239790 NR Description: putative protein; protein id: At5g49080.1 thaliana] >gi|10176941|dbj|BAB10090.1|
  misc_feature (350)..(938): Homolog of NCBI NO: 15239790 NR Description: putative protein; protein id: At5g49080.1 thaliana] >gi|10176941|dbj|BAB10090.1|
  misc_feature (300)..(893): Homolog of NCBI NO: 15239790 NR Description: putative protein; protein id: At5g49080.1 thaliana] >gi|10176941|dbj|BAB10090.1|
  misc_feature (325)..(918): Homolog of NCBI NO: 15239790 NR Description: putative protein; protein id: At5g49080.1 thaliana] >gi|10176941|dbj|BAB10090.1|
  misc_feature (275)..(868): Homolog of NCBI NO: 15239790 NR Description: putative protein; protein id: At5g49080.1 thaliana] >gi|10176941|dbj|BAB10090.1|
MGPSTHLICALGVVIMATMVAAYDPYTDSSPPPLYSSPLPKIEYKTPPLPYIDSSPPPTYSPAPEVEYKSPPPPYVYSSPPPPTYSPSPKVEYKSPPPPYVYSSPPPPTYSPSPKVEYKSPPPPYVYSSPPPPTYSPSPKVEYKSPPPPYVYSSPPPPTYSPSPKVEYKSPPPPYVYSSPPPPTYSPSPKVEYKSPPPPYVYSSPPPPYYSPSPKVEYKSPPPPYVYSSPPPPTYSPSPKVDYKSPPPPYVYSSPPPPYYSPSPKVEYKSPPPPYVYSSPPPPTYSPSPKVDYKSPPPPYVYSSPPPPYYSPSPKVDYKSPPPPYVYSSPPPPTYSPSPKVEYKSPPPPYVYSSPPPPTYSPSPKVEYKSPPPPYVYSSPPPPTYSPSPKVEYKSPPPPYVYSSPPPPTYSPSPKVEYKSPPPPYVYSSPPPPYYSPSPKVEYKSPPPPYVYSSPPPPTYSPSPKVDYKSPPPPYVYSSPPPPYYSPSPKVYYKSPPPPYVYSSPPPPYYSPSPKVYYKSPPPPYVYSSPPPPYYSPSPKVYYKSPPPPYYSPSPKVYYKSPPPPYVYSSPPPPYYSPSPKVYYKSPPPPYVYSSPPPPYHSPSPKVQYKSPPPPYVYSSPPPPYYSPSPKVYYKSPPPPYVYSSPPPPYYSPSPKVYYKSPPPPYVYSSPPPPYYSPSPKVYYKSPPHPHVCVCPPPPPCYSPSPKVVYKSPPPPYVYSSPPPPHYSPSPKVYYKSPPPPYVYSSPPPPYYSPSPKVHYKSPPPPYYAPTPKVHYKSPPPPYVYSSPPPPYYSPSPKVHYKSPPPPYVYSSPPPPYYSPSPKVEYKSPPPPYVYSSPPPPYYSPSPKVDYKSPPPPYVYSSPPPPYYSPSPKVDYKSPPPPYVYSSPPPPYYSPSPVVDYKSPPPPYVYSSPPPPYYSPSPKVEYKSPPPPYVYKSPPPPSYSPSPKTEY

SEQ ID NO: 96891 - protein, 936 aa, Arabidopsis thaliana
  peptide (1)..(936): Ceres Seq. ID no. 12735049
  misc_feature (32)..(343): Pfam Name: Formin Homology 2 Domain Pfam Description: Formin Homology 2 Domain
  misc_feature (60)..(656): Homolog of NCBI NO: 15239790 NR Description: putative protein; protein id: At5g49080.1 thaliana] >gi|10176941|dbj|BAB10090.1|
  misc_feature (19)..(631): Homolog of NCBI NO: 15239790 NR Description: putative protein; protein id: At5g49080.1 thaliana] >gi|10176941|dbj|BAB10090.1|
  misc_feature (85)..(681): Homolog of NCBI NO: 15239790 NR Description: putative protein; protein id: At5g49080.1 thaliana] >gi|10176941|dbj|BAB10090.1|
  misc_feature (135)..(737): Homolog of NCBI NO: 15239790 NR Description: putative protein; protein id: At5g49080.1 thaliana] >gi|10176941|dbj|BAB10090.1|
  misc_feature (1)..(611): Homolog of NCBI NO: 15239790 NR Description: putative protein; protein id: At5g49080.1 thaliana] >gi|10176941|dbj|BAB10090.1|
  misc_feature (160)..(757): Homolog of NCBI NO: 15239790 NR Description: putative protein; protein id: At5g49080.1 thaliana] >gi|10176941|dbj|BAB10090.1|
  misc_feature (335)..(923): Homolog of NCBI NO: 15239790 NR Description: putative protein; protein id: At5g49080.1 thaliana] >gi|10176941|dbj|BAB10090.1|
  misc_feature (285)..(878): Homolog of NCBI NO: 15239790 NR Description: putative protein; protein id: At5g49080.1 thaliana] >gi|10176941|dbj|BAB10090.1|
  misc_feature (310)..(903): Homolog of NCBI NO: 15239790 NR Description: putative protein; protein id: At5g49080.1 thaliana] >gi|10176941|dbj|BAB10090.1|
  misc_feature (260)..(853): Homolog of NCBI NO: 15239790 NR Description: putative protein; protein id: At5g49080.1 thaliana] >gi|10176941|dbj|BAB10090.1|
MATMVAAYDPYTDSSPPPLYSSPLPKIEYKTPPLPYIDSSPPPTYSPAPEVEYKSPPPPYVYSSPPPPTYSPSPKVEYKSPPPPYVYSSPPPPTYSPSPKVEYKSPPPPYVYSSPPPPTYSPSPKVEYKSPPPPYVYSSPPPPTYSPSPKVEYKSPPPPYVYSSPPPPTYSPSPKVEYKSPPPPYVYSSPPPPYYSPSPKVEYKSPPPPYVYSSPPPPTYSPSPKVDYKSPPPPYVYSSPPPPYYSPSPKVEYKSPPPPYVYSSPPPPTYSPSPKVDYKSPPPPYVYSSPPPPYYSPSPKVDYKSPPPPYVYSSPPPPTYSPSPKVEYKSPPPPYVYSSPPPPTYSPSPKVEYKSPPPPYVYSSPPPPTYSPSPKVEYKSPPPPYVYSSPPPPTYSPSPKVEYKSPPPPYVYSSPPPPYYSPSPKVEYKSPPPPYVYSSPPPPTYSPSPKVDYKSPPPPYVYSSPPPPYYSPSPKVYYKSPPPPYVYSSPPPPYYSPSPKVYYKSPPPPYVYSSPPPPYYSPSPKVYYKSPPPPYYSPSPKVYYKSPPPPYVYSSPPPPYYSPSPKVYYKSPPPPYVYSSPPPPYHSPSPKVQYKSPPPPYVYSSPPPPYYSPSPKVYYKSPPPPYVYSSPPPPYYSPSPKVYYKSPPPPYVYSSPPPPYYSPSPKVYYKSPPHPHVCVCPPPPPCYSPSPKVVYKSPPPPYVYSSPPPPHYSPSPKVYYKSPPPPYVYSSPPPPYYSPSPKVHYKSPPPPYYAPTPKVHYKSPPPPYVYSSPPPPYYSPSPKVHYKSPPPPYVYSSPPPPYYSPSPKVEYKSPPPPYVYSSPPPPYYSPSPKVDYKSPPPPYVYSSPPPPYYSPSPKVDYKSPPPPYVYSSPPPPYYSPSPVVDYKSPPPPYVYSSPPPPYYSPSPKVEYKSPPPPYVYKSPPPPSYSPSPKTEY

SEQ ID NO: 96892 - protein, 933 aa, Arabidopsis thaliana
  peptide (1)..(933): Ceres Seq. ID no. 12735050
  misc_feature (29)..(340): Pfam Name: Formin Homology 2 Domain Pfam Description: Formin Homology 2 Domain
  misc_feature (57)..(653): Homolog of NCBI NO: 15239790 NR Description: putative protein; protein id: At5g49080.1 thaliana] >gi|10176941|dbj|BAB10090.1|
  misc_feature (16)..(628): Homolog of NCBI NO: 15239790 NR Description: putative protein; protein id: At5g49080.1 thaliana] >gi|10176941|dbj|BAB10090.1|
  misc_feature (82)..(678): Homolog of NCBI NO: 15239790 NR Description: putative protein; protein id: At5g49080.1 thaliana] >gi|10176941|dbj|BAB10090.1|
  misc_feature (132)..(734): Homolog of NCBI NO: 15239790 NR Description: putative protein; protein id: At5g49080.1 thaliana] >gi|10176941|dbj|BAB10090.1|
  misc_feature (1)..(608): Homolog of NCBI NO: 15239790 NR Description: putative protein; protein id: At5g49080.1 thaliana] >gi|10176941|dbj|BAB10090.1|
  misc_feature (157)..(754): Homolog of NCBI NO: 15239790 NR Description: putative protein; protein id: At5g49080.1 thaliana] >gi|10176941|dbj|BAB10090.1|
  misc_feature (332)..(920): Homolog of NCBI NO: 15239790 NR Description: putative protein; protein id: At5g49080.1 thaliana] >gi|10176941|dbj|BAB10090.1|
  misc_feature (282)..(875): Homolog of NCBI NO: 15239790 NR Description: putative protein; protein id: At5g49080.1 thaliana] >gi|10176941|dbj|BAB10090.1|
  misc_feature (307)..(900): Homolog of NCBI NO: 15239790 NR Description: putative protein; protein id: At5g49080.1 thaliana] >gi|10176941|dbj|BAB10090.1|
  misc_feature (257)..(850): Homolog of NCBI NO: 15239790 NR Description: putative protein; protein id: At5g49080.1 thaliana] >gi|10176941|dbj|BAB10090.1|
MVAAYDPYTDSSPPPLYSSPLPKIEYKTPPLPYIDSSPPPTYSPAPEVEYKSPPPPYVYSSPPPPTYSPSPKVEYKSPPPPYVYSSPPPPTYSPSPKVEYKSPPPPYVYSSPPPPTYSPSPKVEYKSPPPPYVYSSPPPPTYSPSPKVEYKSPPPPYVYSSPPPPTYSPSPKVEYKSPPPPYVYSSPPPPYYSPSPKVEYKSPPPPYVYSSPPPPTYSPSPKVDYKSPPPPYVYSSPPPPYYSPSPKVEYKSPPPPYVYSSPPPPTYSPSPKVDYKSPPPPYVYSSPPPPYYSPSPKVDYKSPPPPYVYSSPPPPTYSPSPKVEYKSPPPPYVYSSPPPPTYSPSPKVEYKSPPPPYVYSSPPPPTYSPSPKVEYKSPPPPYVYSSPPPPTYSPSPKVEYKSPPPPYVYSSPPPPYYSPSPKVEYKSPPPPYVYSSPPPPTYSPSPKVDYKSPPPPYVYSSPPPPYYSPSPKVYYKSPPPPYVYSSPPPPYYSPSPKVYYKSPPPPYVYSSPPPPYYSPSPKVYYKSPPPPYYSPSPKVYYKSPPPPYVYSSPPPPYYSPSPKVYYKSPPPPYVYSSPPPPYHSPSPKVQYKSPPPPYVYSSPPPPYYSPSPKVYYKSPPPPYVYSSPPPPYYSPSPKVYYKSPPPPYVYSSPPPPYYSPSPKVYYKSPPHPHVCVCPPPPPCYSPSPKVVYKSPPPPYVYSSPPPPHYSPSPKVYYKSPPPPYVYSSPPPPYYSPSPKVHYKSPPPPYYAPTPKVHYKSPPPPYVYSSPPPPYYSPSPKVHYKSPPPPYVYSSPPPPYYSPSPKVEYKSPPPPYVYSSPPPPYYSPSPKVDYKSPPPPYVYSSPPPPYYSPSPKVDYKSPPPPYVYSSPPPPYYSPSPVVDYKSPPPPYVYSSPPPPYYSPSPKVEYKSPPPPYVYKSPPPPSYSPSPKTEY

SEQ ID NO: 96893 - DNA, 1608 bp, Arabidopsis thaliana
  misc_feature (1)..(1608): Ceres Seq. ID no. 12735060
  misc_feature: MA Experiment ID: 20000286 Result: Up-regulated in Transcription
  misc_feature: MA Experiment 20000286 PARAMETER Experiment Name: At_Open_Flower_P Parameter: Age (day) Value: 21
  misc_feature: MA Experiment 20000286 PARAMETER Experiment Name: At_Open_Flower_P Parameter: Plant Line Value: WS
  misc_feature: MA Experiment 20000286 PARAMETER Experiment Name: At_Open_Flower_P Parameter: Tissue Value: Half Open vs. Whole Plant
  misc_feature: MA Experiment ID: 20000437 Result: Up-regulated in Transcription
  misc_feature: MA Experiment 20000437 PARAMETER Experiment Name: At_Drought_P Parameter: Age (day) Value: 8
  misc_feature: MA Experiment 20000437 PARAMETER Experiment Name: At_Drought_P Parameter: Organism Value: A. thaliana
  misc_feature: MA Experiment 20000437 PARAMETER Experiment Name: At_Drought_P Parameter: Plant Line Value: WS
  misc_feature: MA Experiment 20000437 PARAMETER Experiment Name: At_Drought_P Parameter: Timepoint (hr) Value: 24
  misc_feature: MA Experiment 20000437 PARAMETER Experiment Name: At_Drought_P Parameter: Tissue Value: Whole Plant
  misc_feature: MA Experiment 20000437 PARAMETER Experiment Name: At_Drought_P Parameter: Treatment Value: Drought vs. No Drought
  misc_feature: MA Experiment ID: 20001557 Result: Up-regulated in Transcription
  misc_feature: MA Experiment 20001557 PARAMETER Experiment Name: At_Drought_Soil_Dry_P Parameter: Age (day) Value: 27
  misc_feature: MA Experiment 20001557 PARAMETER Experiment Name: At_Drought_Soil_Dry_P Parameter: Organism Value: A. thaliana
  misc_feature: MA Experiment 20001557 PARAMETER Experiment Name: At_Drought_Soil_Dry_P Parameter: Plant Line Value: WS
  misc_feature: MA Experiment 20001557 PARAMETER Experiment Name: At_Drought_Soil_Dry_P Parameter: Post Timepoint (hr) Value: 3
  misc_feature: MA Experiment 20001557 PARAMETER Experiment Name: At_Drought_Soil_Dry_P Parameter: Post-Treatment Value: Re-Water vs. No Drought
  misc_feature: MA Experiment 20001557 PARAMETER Experiment Name: At_Drought_Soil_Dry_P Parameter: Timepoint (day) Value: 13
  misc_feature: MA Experiment 20001557 PARAMETER Experiment Name: At_Drought_Soil_Dry_P Parameter: Treatment Value: Drought vs. No Drought
atggcaggagatcaactaaacgtgctaaacgcactcgacgtcgccaaaacgcaatggtaccatttcacggcgattataatcgccggaatgggattcttcaccgacgcttacgaccttttttgtatctcactcgtcacaaagcttcttggccgtatttactatcacgtggacggctcagagaagccaggaacgctgccaccaaacgtctcagccgctgttaatggagtcgccttctgcggtacactcgcaggccagctcttctttggctggctcggtgacaagcttgggaggaaaaaagtttacggtatgaccctcatggtcatggttctttgttccatcgcttcgggtctatcctttgggagtaacccaaaaacagtgatgactacactatgtttcttccggttctggcttggtttcggcattggtggtgattatccgttatccgccacgattatgtctgaatacgctaataaaaagacccgtggtgcgtttatagccgccgtttttgctatgcaagggtttggaatcttgaccggggggatttttgccatcatcgtgtctgccgctttcgaggctaaatttccagctccaacctatcaaatagatgccttggcatccacggttcctcaggcggattatgtgtggcggatcatactgatggtgggtgctttgcctgcagcgatgacgtattactcaaggtccaagatgcctgagactgcccggtacacggctcttgtggccaaggacgcgaaactagcggcttcaaacatgtctaaggttttgcaagtggagatcgaagcagagcagcagggaactgaagataagtccaattcctttggcttgttttccaaggaattcatgaaacgccatggccttcatttgctaggaactacaagcacatggttcctactcgacatcgccttctacagtcagaacctattccagaaagatattttcagcgcaatcggatggatccctccggctcagacaatgaacgcaattcaagaggttttcaagattgcacgtgcacaaaccctaatcgccttgtgtagcacggtacctggttactggttcacagtggcctttattgacgtcattggtagatttgcgatacagatgatgggtttcttctttatgaccgtctttatgttcgctctcgccattccttacgaccattggactcacaaggagaacagaatcggattcgttgctatgtactctctaacattcttcttcgccaactttggacctaatgcaacaactttcgttgtgcccgctgagatcttcccggctaggtttagatcaacctgccatggaatttccgcggcttctggaaaattaggagcaatggttggtgcgtttgggttcttgtacttagcacaaagtcctgacaagaccaagacagagcatggatatcctccaggtattggagtcaagaactccctcattgttttgggtgtggttaatcttttggggatggtttttacactgttggttcctgaatctaaaggcaagtctctcgaggaaatgtccggtgagaacgaacaaaatgatgaaagcagcagcagcagcaacaacaacagtaacaacgcagtgtcaactgcatag

SEQ ID NO: 96894 - protein, 535 aa, Arabidopsis thaliana
  peptide (1)..(535): Ceres Seq. ID no. 12735061
  misc_feature (24)..(514): Pfam Name: Sugar (and other) transporter Pfam Description: Sugar (and other) transporter
  misc_feature (1)..(535): Homolog of NCBI NO: 15232566 NR Description: phosphate transport protein; protein id:
  misc_feature (1)..(524): Homolog of NCBI NO: 15224985 NR Description: phosphate transporter (AtPT2); protein id: [Arabidopsis thaliana] >gi|25309090|pir||C84811 phosphate
  misc_feature (1)..(530): Homolog of NCBI NO: 13506627 NR Description: phosphate transporter 1 [Lupinus albus]
  misc_feature (1)..(530): Homolog of NCBI NO: 13676622 NR Description: phosphate transporter 1 [Lupinus albus]
  misc_feature (1)..(534): Homolog of NCBI NO: 7446756 NR Description: probable inorganic phosphate transport protein - periwinkle >gi|2208908|dbj|BAA20522.1| phosphate transporter
  misc_feature (1)..(527): Homolog of NCBI NO: 8248034 NR Description: inorganic phosphate transporter [Nicotiana
  misc_feature (1)..(527): Homolog of NCBI NO: 12641853 NR Description: phosphate transporter [Nicotiana tabacum]
  misc_feature (1)..(527): Homolog of NCBI NO: 6177892 NR Description: Phospate transpoter [Nicotiana tabacum]
  misc_feature (1)..(532): Homolog of NCBI NO: 5053118 NR Description: inorganic phosphate transporter [Solanum
  misc_feature (1)..(532): Homolog of NCBI NO: 7446753 NR Description: probable inorganic phosphate transport protein - >gi|2570523|gb|AAB82146.1| inorganic phosphate transporter
MAGDQLNVLNALDVAKTQWYHFTAIIIAGMGFFTDAYDLFCISLVTKLLGRIYYHVDGSEKPGTLPPNVSAAVNGVAFCGTLAGQLFFGWLGDKLGRKKVYGMTLMVMVLCSIASGLSFGSNPKTVMTTLCFFRFWLGFGIGGDYPLSATIMSEYANKKTRGAFIAAVFAMQGFGILTGGIFAIIVSAAFEAKFPAPTYQIDALASTVPQADYVWRIILMVGALPAAMTYYSRSKMPETARYTALVAKDAKLAASNMSKVLQVEIEAEQQGTEDKSNSFGLFSKEFMKRHGLHLLGTTSTWFLLDIAFYSQNLFQKDIFSAIGWIPPAQTMNAIQEVFKIARAQTLIALCSTVPGYWFTVAFIDVIGRFAIQMMGFFFMTVFMFALAIPYDHWTHKENRIGFVAMYSLTFFFANFGPNATTFVVPAEIFPARFRSTCHGISAASGKLGAMVGAFGFLYLAQSPDKTKTEHGYPPGIGVKNSLIVLGVVNLLGMVFTLLVPESKGKSLEEMSGENEQNDESSSSSNNNSNNAVSTA

SEQ ID NO: 96895 - protein, 506 aa, Arabidopsis thaliana
  peptide (1)..(506): Ceres Seq. ID no. 12735062
  misc_feature (1)..(485): Pfam Name: Sugar (and other) transporter Pfam Description: Sugar (and other) transporter
  misc_feature (1)..(506): Homolog of NCBI NO: 15232566 NR Description: phosphate transport protein; protein id:
  misc_feature (1)..(495): Homolog of NCBI NO: 15224985 NR Description: phosphate transporter (AtPT2); protein id: [Arabidopsis thaliana] >gi|25309090|pir||C84811 phosphate
  misc_feature (1)..(501): Homolog of NCBI NO: 13506627 NR Description: phosphate transporter 1 [Lupinus albus]
  misc_feature (1)..(501): Homolog of NCBI NO: 13676622 NR Description: phosphate transporter 1 [Lupinus albus]
  misc_feature (1)..(505): Homolog of NCBI NO: 7446756 NR Description: probable inorganic phosphate transport protein - periwinkle >gi|2208908|dbj|BAA20522.1| phosphate transporter
  misc_feature (1)..(498): Homolog of NCBI NO: 8248034 NR Description: inorganic phosphate transporter [Nicotiana
  misc_feature (1)..(498): Homolog of NCBI NO: 12641853 NR Description: phosphate transporter [Nicotiana tabacum]
  misc_feature (1)..(498): Homolog of NCBI NO: 6177892 NR Description: Phospate transpoter [Nicotiana tabacum]
  misc_feature (1)..(503): Homolog of NCBI NO: 5053118 NR Description: inorganic phosphate transporter [Solanum
  misc_feature (1)..(503): Homolog of NCBI NO: 7446753 NR Description: probable inorganic phosphate transport protein - >gi|2570523|gb|AAB82146.1| inorganic phosphate transporter
MGFFTDAYDLFCISLVTKLLGRIYYHVDGSEKPGTLPPNVSAAVNGVAFCGTLAGQLFFGWLGDKLGRKKVYGMTLMVMVLCSIASGLSFGSNPKTVMTTLCFFRFWLGFGIGGDYPLSATIMSEYANKKTRGAFIAAVFAMQGFGILTGGIFAIIVSAAFEAKFPAPTYQIDALASTVPQADYVWRIILMVGALPAAMTYYSRSKMPETARYTALVAKDAKLAASNMSKVLQVEIEAEQQGTEDKSNSFGLFSKEFMKRHGLHLLGTTSTWFLLDIAFYSQNLFQKDIFSAIGWIPPAQTMNAIQEVFKIARAQTLIALCSTVPGYWFTVAFIDVIGRFAIQMMGFFFMTVFMFALAIPYDHWTHKENRIGFVAMYSLTFFFANFGPNATTFVVPAEIFPARFRSTCHGISAASGKLGAMVGAFGFLYLAQSPDKTKTEHGYPPGIGVKNSLIVLGVVNLLGMVFTLLVPESKGKSLEEMSGENEQNDESSSSSNNNSNNAVSTA

SEQ ID NO: 96896 - protein, 433 aa, Arabidopsis thaliana
  peptide (1)..(433): Ceres Seq. ID no. 12735063
  misc_feature (1)..(412): Pfam Name: Sugar (and other) transporter Pfam Description: Sugar (and other) transporter
  misc_feature (1)..(433): Homolog of NCBI NO: 15232566 NR Description: phosphate transport protein; protein id:
  misc_feature (1)..(422): Homolog of NCBI NO: 15224985 NR Description: phosphate transporter (AtPT2); protein id: [Arabidopsis thaliana] >gi|25309090|pir||C84811 phosphate
  misc_feature (1)..(428): Homolog of NCBI NO: 13506627 NR Description: phosphate transporter 1 [Lupinus albus]
  misc_feature (1)..(428): Homolog of NCBI NO: 13676622 NR Description: phosphate transporter 1 [Lupinus albus]
  misc_feature (1)..(432): Homolog of NCBI NO: 7446756 NR Description: probable inorganic phosphate transport protein - periwinkle >gi|2208908|dbj|BAA20522.1| phosphate transporter
  misc_feature (1)..(425): Homolog of NCBI NO: 8248034 NR Description: inorganic phosphate transporter [Nicotiana
  misc_feature (1)..(425): Homolog of NCBI NO: 12641853 NR Description: phosphate transporter [Nicotiana tabacum]
  misc_feature (1)..(425): Homolog of NCBI NO: 6177892 NR Description: Phospate transpoter [Nicotiana tabacum]
  misc_feature (1)..(430): Homolog of NCBI NO: 5053118 NR Description: inorganic phosphate transporter [Solanum
  misc_feature (1)..(430): Homolog of NCBI NO: 7446753 NR Description: probable inorganic phosphate transport protein - >gi|2570523|gb|AAB82146.1| inorganic phosphate transporter
MTLMVMVLCSIASGLSFGSNPKTVMTTLCFFRFWLGFGIGGDYPLSATIMSEYANKKTRGAFIAAVFAMQGFGILTGGIFAIIVSAAFEAKFPAPTYQIDALASTVPQADYVWRIILMVGALPAAMTYYSRSKMPETARYTALVAKDAKLAASNMSKVLQVEIEAEQQGTEDKSNSFGLFSKEFMKRHGLHLLGTTSTWFLLDIAFYSQNLFQKDIFSAIGWIPPAQTMNAIQEVFKIARAQTLIALCSTVPGYWFTVAFIDVIGRFAIQMMGFFFMTVFMFALAIPYDHWTHKENRIGFVAMYSLTFFFANFGPNATTFVVPAEIFPARFRSTCHGISAASGKLGAMVGAFGFLYLAQSPDKTKTEHGYPPGIGVKNSLIVLGVVNLLGMVFTLLVPESKGKSLEEMSGENEQNDESSSSSNNNSNNAVSTA

SEQ ID NO: 96897 - DNA, 3156 bp, Arabidopsis thaliana
  misc_feature (1)..(3156): Ceres Seq. ID no. 12735080
  misc_feature: MA Experiment ID: 20000227 Result: Up-regulated in Transcription
  misc_feature: MA Experiment 20000227 PARAMETER Experiment Name: At_Root-Tips-vs-Tops_P Parameter: Tissue Value: Root Tips vs. Root Tops
atgagttcgtcaaattcctcctccgccgtcagatcgtcggcgaaacacgcggcggagcgaattcagcagcacttgcctcccaacagcaatcacgcggtatctctctcttcttcttccttgaatttgcctgctagaacctctatcgtcgctcccggaatagcacactcttctcgccttaaagatcgaccctccgcttcctcctcctcctcttcgtcctctgtctccgcctcttctccctccacacgccgctccggcactcccgttcgccgatctcaatcgaaagacttcgacgacgacaatgatcctgggagggtaagagtctctgtaagagttcgacctcgaaacggagaggagcttatctcggatgctgattttgctgatcttgttgagttacaaccagaaataaagaggcttaagttgaggaagaacaactggaactctgagtcatacaaatttgatgaagtctttacagacacagcttcgcaaaagcgtgtctatgaaggagtagcaaaacctgtcgtcgagggtgttctgagtggatacaatggtaccattatggcttatggtcaaaccggcacaggtaaaacttacacggttggaaaaattggtaaagatgatgcagctgagcgtggtattatggttagagctctggaggatatacttctcaacgcatcttctgcttcgatttccgtcgagatctcctatttgcagctatatatggaaactatacaagatcttcttgcacctgagaaaaacaacatttcaatcaatgaggatgcaaagactggggaagtatcagtaccaggcgctacagtagttaacattcaagatttagaccatttcttgcaggttttgcaagtcggtgagacaaaccgtcatgcagcaaatacaaagatgaatacagaatcctctcgtagtcatgcaattcttacggtttacgttagacgtgctatgaatgaaaaaactgagaaggcaaaaccggaatcattgggagataaagccattcctagagttagaaagagcaaactactaattgttgatcttgctggttccgaaagaattaataaatctggaactgacggccacatgattgaagaagcaaaattcatcaatctttcactgacatccctgggaaaatgcataaatgcgttagctgaaggcagttctcatataccaacaagagattctaagctaacaaggcttctgcgtgattcttttgggggttctgcgaggacttcacttataataacaattgggccatctgcacgttatcatgcagaaaccactagcacaataatgtttggacaaagggcaatgaaaatagtaaacatggtaaagcttaaggaagaatttgattatgagagtttgtgtcggaagcttgagactcaggtggaccatcttactgcagaagtcgaaagacaaaacaaactaagaaatagtgagaaacatgagttggaaaaaagattgagagaatgtgaaaactccttcgctgaagcagaaaagaacgcggttactaggtcaaagtttctggagaaggaaaacacccgcttggagctcagcatgaaagaacttttgaaggatctgcaactgcagaaagatcagtgtgatctaatgcatgacaaagccatacagttagagatgaaactgaaaaataccaagcagcaacagctggaaaattcagcatatgaggcaaaacttgcagataccagtcaagtatatgagaaaaaaattgcggagttggtccagcgggttgaggatgaacaagcacggtctacaaacgccgagcatcaattgactgaaatgaaaaatattttgagtaaacagcagaagtctattcatgaacaagagaagggcaattaccaatatcaaagggaacttgcggaaaccactcacacatatgaatctaaaattgcagagctgcaaaagaaactggaaggtgaaaatgctcggtctaacgctgcagaagatcaacttagacaaatgaaaaggcttataagcgatcgccaagttatatcacaggaaaatgaagaggcaaacgaacttaagataaaattagaagaactttcacaaatgtatgaatcgacagtagatgaactccagacagtgaaactagactatgatgatctgctccaacaaaaggaaaaacttggtgaagaggttcgagatatgaaggaaaggctccttttggaagaaaagcagagaaagcaaatggagagtgagctttcaaaactaaagaagaatctaagggaaagtgaaaatgttgttgaggaaaagcgatatatgaaggaagatctttcaaaaggatcagcagaatctggagctcaaactggctctcagagatcacaagggttaaaaaagtcgttatctggtcagagagctaccatggctagactttgtgaagaagtcggaattcagaagatcttacaactcattaagtctgaagacttggaagttcaaattcaagcagtaaaagtggttgctaatctagccgctgaagaggctaatcaggtaaagattgtggaggaagggggtgtagaagctttgcttatgctagtccagtcatctcaaaattcaacgattctcagggtggcttctggtgcaattgctaatttagcaatgaacgagaagagtcaagatcttataatgaataaaggaggtgctcaactcctagcaaagatggtgactaaaacagacgatccacagactctaagaatggtagctggtgcgcttgccaatttatgtgggaacgagaagtttcttaagctgctgaaagaagaggaaggcatcaagggactactcactatggcacagtctggaaacatagatatcattgctcaagtggcaagagggatggcaaattttgcgaagtgtgaaactcgagaaattatgcaagggcgtagaaaaggccgttctcttctgttggaagagggtgttcttgaatggttgacttcaaattcacatattgattcagcatcaacacaacgtcacatcgaacttgcgctttgccatttagctcaaaatgaggaaaatgcaaatgatttcaaaagaacaggaagcgtgacagagattgtaagaatatctgtggagtcaagtagagatgatattcgcagtttagcaaagaagatactcaaaacaaacccttacttctcaagctga

SEQ ID NO: 96898 - protein, 1051 aa, Arabidopsis thaliana
  peptide (1)..(1051): Ceres Seq. ID no. 12735081
  misc_feature (874)..(915): Pfam Name: Armadillo/beta-catenin-like repeat Pfam Description: Armadillo/beta-catenin-like repeat
  misc_feature (57)..(652): Homolog of NCBI NO: 18391394 NR Description: armadillo-repeat-containing kinesin-related protein id: At1g12430.1, supported by cDNA: gi_9954167
  misc_feature (37)..(907): Homolog of NCBI NO: 25513540 NR Description: F22M8.8 protein - Arabidopsis thaliana Contains similarity to a kinesin homolog from Arabidopsis gb|T06733 and contains a Kinesin motor PF|00225 domain and
  misc_feature (37)..(907): Homolog of NCBI NO: 30678214 NR Description: armadillo-repeat-containing kinesin-related
  misc_feature (57)..(679): Homolog of NCBI NO: 8778646 NR Description: F5O11.15 [Arabidopsis thaliana]
  misc_feature (586)..(1051): Homolog of NCBI NO: 30678214 NR Description: armadillo-repeat-containing kinesin-related
  misc_feature (586)..(1051): Homolog of NCBI NO: 25513540 NR Description: F22M8.8 protein - Arabidopsis thaliana Contains similarity to a kinesin homolog from Arabidopsis gb|T06733 and contains a Kinesin motor PF|00225 domain and
  misc_feature (544)..(1049): Homolog of NCBI NO: 18391394 NR Description: armadillo-repeat-containing kinesin-related protein id: At1g12430.1, supported by cDNA: gi_9954167
  misc_feature (458)..(1049): Homolog of NCBI NO: 8778646 NR Description: F5O11.15 [Arabidopsis thaliana]
  misc_feature (105)..(763): Homolog of NCBI NO: 4808835 NR Description: kinesin delta 560-624 [Expression vector pPK115]
  misc_feature (26)..(881): Homolog of NCBI NO: 38567287 NR Description: probable kinesin-related protein bimC [Neurospora
MSSSNSSSAVRSSAKHAAERIQQHLPPNSNHAVSLSSSSLNLPARTSIVAPGIAHSSRLKDRPSASSSSSSSSVSASSPSTRRSGTPVRRSQSKDFDDDNDPGRVRVSVRVRPRNGEELISDADFADLVELQPEIKRLKLRKNNWNSESYKFDEVFTDTASQKRVYEGVAKPVVEGVLSGYNGTIMAYGQTGTGKTYTVGKIGKDDAAERGIMVRALEDILLNASSASISVEISYLQLYMETIQDLLAPEKNNISINEDAKTGEVSVPGATVVNIQDLDHFLQVLQVGETNRHAANTKMNTESSRSHAILTVYVRRAMNEKTEKAKPESLGDKAIPRVRKSKLLIVDLAGSERINKSGTDGHMIEEAKFINLSLTSLGKCINALAEGSSHIPTRDSKLTRLLRDSFGGSARTSLIITIGPSARYHAETTSTIMFGQRAMKIVNMVKLKEEFDYESLCRKLETQVDHLTAEVERQNKLRNSEKHELEKRLRECENSFAEAEKNAVTRSKFLEKENTRLELSMKELLKDLQLQKDQCDLMHDKAIQLEMKLKNTKQQQLENSAYEAKLADTSQVYEKKIAELVQRVEDEQARSTNAEHQLTEMKNILSKQQKSIHEQEKGNYQYQRELAETTHTYESKIAELQKKLEGENARSNAAEDQLRQMKRLISDRQVISQENEEANELKIKLEELSQMYESTVDELQTVKLDYDDLLQQKEKLGEEVRDMKERLLLEEKQRKQMESELSKLKKNLRESENVVEEKRYMKEDLSKGSAESGAQTGSQRSQGLKKSLSGQRATMARLCEEVGIQKILQLIKSEDLEVQIQAVKVVANLAAEEANQVKIVEEGGVEALLMLVQSSQNSTILRVASGAIANLAMNEKSQDLIMNKGGAQLLAKMVTKTDDPQTLRMVAGALANLCGNEKFLKLLKEEEGIKGLLTMAQSGNIDIIAQVARGMANFAKCETREIMQGRRKGRSLLLEEGVLEWLTSNSHIDSASTQRHIELALCHLAQNEENANDFKRTGSVTEIVRISVESSRDDIRSLAKKILKTNPYFSS

SEQ ID NO: 96899 - protein, 866 aa, Arabidopsis thaliana
  peptide (1)..(866): Ceres Seq. ID no. 12735082
  misc_feature (689)..(730): Pfam Name: Armadillo/beta-catenin-like repeat Pfam Description: Armadillo/beta-catenin-like repeat
  misc_feature (1)..(467): Homolog of NCBI NO: 18391394 NR Description: armadillo-repeat-containing kinesin-related protein id: At1g12430.1, supported by cDNA: gi_9954167
  misc_feature (1)..(722): Homolog of NCBI NO: 25513540 NR Description: F22M8.8 protein - Arabidopsis thaliana Contains similarity to a kinesin homolog from Arabidopsis gb|T06733 and contains a Kinesin motor PF|00225 domain and
  misc_feature (1)..(722): Homolog of NCBI NO: 30678214 NR Description: armadillo-repeat-containing kinesin-related
  misc_feature (1)..(494): Homolog of NCBI NO: 8778646 NR Description: F5O11.15 [Arabidopsis thaliana]
  misc_feature (401)..(866): Homolog of NCBI NO: 30678214 NR Description: armadillo-repeat-containing kinesin-related
  misc_feature (401)..(866): Homolog of NCBI NO: 25513540 NR Description: F22M8.8 protein - Arabidopsis thaliana Contains similarity to a kinesin homolog from Arabidopsis gb|T06733 and contains a Kinesin motor PF|00225 domain and
  misc_feature (359)..(864): Homolog of NCBI NO: 18391394 NR Description: armadillo-repeat-containing kinesin-related protein id: At1g12430.1, supported by cDNA: gi_9954167
  misc_feature (273)..(864): Homolog of NCBI NO: 8778646 NR Description: F5O11.15 [Arabidopsis thaliana]
  misc_feature (1)..(578): Homolog of NCBI NO: 4808835 NR Description: kinesin delta 560-624 [Expression vector pPK115]
  misc_feature (1)..(696): Homolog of NCBI NO: 38567287 NR Description: probable kinesin-related protein bimC [Neurospora
MAYGQTGTGKTYTVGKIGKDDAAERGIMVRALEDILLNASSASISVEISYLQLYMETIQDLLAPEKNNISINEDAKTGEVSVPGATVVNIQDLDHFLQVLQVGETNRHAANTKMNTESSRSHAILTVYVRRAMNEKTEKAKPESLGDKAIPRVRKSKLLIVDLAGSERINKSGTDGHMIEEAKFINLSLTSLGKCINALAEGSSHIPTRDSKLTRLLRDSFGGSARTSLIITIGPSARYHAETTSTIMFGQRAMKIVNMVKLKEEFDYESLCRKLETQVDHLTAEVERQNKLRNSEKHELEKRLRECENSFAEAEKNAVTRSKFLEKENTRLELSMKELLKDLQLQKDQCDLMHDKAIQLEMKLKNTKQQQLENSAYEAKLADTSQVYEKKIAELVQRVEDEQARSTNAEHQLTEMKNILSKQQKSIHEQEKGNYQYQRELAETTHTYESKIAELQKKLEGENARSNAAEDQLRQMKRLISDRQVISQENEEANELKIKLEELSQMYESTVDELQTVKLDYDDLLQQKEKLGEEVRDMKERLLLEEKQRKQMESELSKLKKNLRESENVVEEKRYMKEDLSKGSAESGAQTGSQRSQGLKKSLSGQRATMARLCEEVGIQKILQLIKSEDLEVQIQAVKVVANLAAEEANQVKIVEEGGVEALLMLVQSSQNSTILRVASGAIANLAMNEKSQDLIMNKGGAQLLAKMVTKTDDPQTLRMVAGALANLCGNEKFLKLLKEEEGIKGLLTMAQSGNIDIIAQVARGMANFAKCETREIMQGRRKGRSLLLEEGVLEWLTSNSHIDSASTQRHIELALCHLAQNEENANDFKRTGSVTEIVRISVESSRDDIRSLAKKILKTNPYFSS

SEQ ID NO: 96900 - protein, 839 aa, Arabidopsis thaliana
  peptide (1)..(839): Ceres Seq. ID no. 12735083
  misc_feature (662)..(703): Pfam Name: Armadillo/beta-catenin-like repeat Pfam Description: Armadillo/beta-catenin-like repeat
  misc_feature (1)..(440): Homolog of NCBI NO: 18391394 NR Description: armadillo-repeat-containing kinesin-related protein id: At1g12430.1, supported by cDNA: gi_9954167
  misc_feature (1)..(695): Homolog of NCBI NO: 25513540 NR Description: F22M8.8 protein - Arabidopsis thaliana Contains similarity to a kinesin homolog from Arabidopsis gb|T06733 and contains a Kinesin motor PF|00225 domain and
  misc_feature (1)..(695): Homolog of NCBI NO: 30678214 NR Description: armadillo-repeat-containing kinesin-related
  misc_feature (1)..(467): Homolog of NCBI NO: 8778646 NR Description: F5O11.15 [Arabidopsis thaliana]
  misc_feature (374)..(839): Homolog of NCBI NO: 30678214 NR Description: armadillo-repeat-containing kinesin-related
  misc_feature (374)..(839): Homolog of NCBI NO: 25513540 NR Description: F22M8.8 protein - Arabidopsis thaliana Contains similarity to a kinesin homolog from Arabidopsis gb|T06733 and contains a Kinesin motor PF|00225 domain and
  misc_feature (332)..(837): Homolog of NCBI NO: 18391394 NR Description: armadillo-repeat-containing kinesin-related protein id: At1g12430.1, supported by cDNA: gi_9954167
  misc_feature (246)..(837): Homolog of NCBI NO: 8778646 NR Description: F5O11.15 [Arabidopsis thaliana]
  misc_feature (1)..(551): Homolog of NCBI NO: 4808835 NR Description: kinesin delta 560-624 [Expression vector pPK115]
  misc_feature (1)..(669): Homolog of NCBI NO: 38567287 NR Description: probable kinesin-related protein bimC [Neurospora
MVRALEDILLNASSASISVEISYLQLYMETIQDLLAPEKNNISINEDAKTGEVSVPGATVVNIQDLDHFLQVLQVGETNRHAANTKMNTESSRSHAILTVYVRRAMNEKTEKAKPESLGDKAIPRVRKSKLLIVDLAGSERINKSGTDGHMIEEAKFINLSLTSLGKCINALAEGSSHIPTRDSKLTRLLRDSFGGSARTSLIITIGPSARYHAETTSTIMFGQRAMKIVNMVKLKEEFDYESLCRKLETQVDHLTAEVERQNKLRNSEKHELEKRLRECENSFAEAEKNAVTRSKFLEKENTRLELSMKELLKDLQLQKDQCDLMHDKAIQLEMKLKNTKQQQLENSAYEAKLADTSQVYEKKIAELVQRVEDEQARSTNAEHQLTEMKNILSKQQKSIHEQEKGNYQYQRELAETTHTYESKIAELQKKLEGENARSNAAEDQLRQMKRLISDRQVISQENEEANELKIKLEELSQMYESTVDELQTVKLDYDDLLQQKEKLGEEVRDMKERLLLEEKQRKQMESELSKLKKNLRESENVVEEKRYMKEDLSKGSAESGAQTGSQRSQGLKKSLSGQRATMARLCEEVGIQKILQLIKSEDLEVQIQAVKVVANLAAEEANQVKIVEEGGVEALLMLVQSSQNSTILRVASGAIANLAMNEKSQDLIMNKGGAQLLAKMVTKTDDPQTLRMVAGALANLCGNEKFLKLLKEEEGIKGLLTMAQSGNIDIIAQVARGMANFAKCETREIMQGRRKGRSLLLEEGVLEWLTSNSHIDSASTQRHIELALCHLAQNEENANDFKRTGSVTEIVRISVESSRDDIRSLAKKILKTNPYFSS

SEQ ID NO: 96901 - DNA, 2053 bp, Arabidopsis thaliana
  misc_feature (1)..(2053): Ceres Seq. ID no. 12735105
  misc_feature: MA Experiment ID: 20000185 Result: Up-regulated in Transcription
  misc_feature: MA Experiment 20000185 PARAMETER Experiment Name: At_Roots__P Parameter: Age (day) Value: 7 vs. 21
  misc_feature: MA Experiment 20000185 PARAMETER Experiment Name: At_Roots__P Parameter: Organism Value: A. thaliana
  misc_feature: MA Experiment 20000185 PARAMETER Experiment Name: At_Roots__P Parameter: Tissue Value: Roots vs. Whole Plant
  misc_feature: MA Experiment ID: 20000437 Result: Down-regulated in Transcription
  misc_feature: MA Experiment 20000437 PARAMETER Experiment Name: At_Drought_P Parameter: Age (day) Value: 8
  misc_feature: MA Experiment 20000437 PARAMETER Experiment Name: At_Drought_P Parameter: Organism Value: A. thaliana
  misc_feature: MA Experiment 20000437 PARAMETER Experiment Name: At_Drought_P Parameter: Plant Line Value: WS
  misc_feature: MA Experiment 20000437 PARAMETER Experiment Name: At_Drought_P Parameter: Timepoint (hr) Value: 24
  misc_feature: MA Experiment 20000437 PARAMETER Experiment Name: At_Drought_P Parameter: Tissue Value: Whole Plant
  misc_feature: MA Experiment 20000437 PARAMETER Experiment Name: At_Drought_P Parameter: Treatment Value: Drought vs. No Drought
  misc_feature: MA Experiment ID: 20000439 Result: Up-regulated in Transcription
  misc_feature: MA Experiment 20000439 PARAMETER Experiment Name: At_Roots__P Parameter: Age (day) Value: 14 vs. 21
  misc_feature: MA Experiment 20000439 PARAMETER Experiment Name: At_Roots__P Parameter: Organism Value: A. thaliana
  misc_feature: MA Experiment 20000439 PARAMETER Experiment Name: At_Roots__P Parameter: Tissue Value: Roots vs. Whole Plant
aattcagaaagaagagaatagagagcttcttcttcttcaatggcgaaaatggcgaaattttctttcttctcttcgtcatctcctaaatatcatccttcttcgccttcttcattcacttctttcccggcttctcctctaaaccagaactttactcaggctatgatggaggaaaccgtggagacagcggactccgtcatcagaaaatgggacccgaacacgccttccttcaccaagattgtctctctgttcaaccatagcaggaaggaggctaaagagttcatcagatgtgtccgtgatttgcgcagagcgatgcactttcttgtctctcaagactctcaatctccaaagcttgctctagctcagaccctgatgcagatcgccatggcaaggctcgaaaaagagttcttccagatattatcttcaaacagagacaagcttgatcctgaatcagtttccggtcaatcctcaatctccagcaattctgaatttgaagatgttatgggatctgacgacgacgatgaaagtgacaatgagatgaggaaagctggcgaatcgatcactcaggttgagaaagcttcagctatggtgatgtctgaccttaaggcgatagcagagagtatgataagttgcggatatggtaaggagtgcgtaaagatttataagcgggtcagaaaatctattgtagatgaagggctgagcttgctcgggattgaaatctacaaaggctccagatttcacagaacggactgggtcacgctcgagcatatgatcaagaactggataaaagctgcaaagattggcattgccacgctcttccgtggagagaaacttctttgtgatcatgtcttttctgcttccaattcaacaagggagtcatgcttctacgagattgcaaacgaagcagccactaaccttttcaagttccctgaatttgttgccaaggagaagaaatcgcacgagaggatcttcccgctaatggatctgcaggctgcaatctctgatctctggcaagacatagagatgatattccactttgatgcagtagctggtgtgaaatctcaggcgctcacatcgctgcaaaaactaaaggtctcaatccacagtgctctcacggattttgaatcaatcattcagaaagatacgacgaaagctctaacacctggaggagggattcataaactgacacgatcaacaatgaacttcatctcttccctttctaagtacagcggagtcttgtcggaaatcctagcagaccatccactcccgagaaacactcgcctgctggaatcctatgtcagagctccaatttcggaagatgaacaacacaatcacgcactctctgtccattttgcttggctaatcctggttttgctatgcaaactagacaccaaagcagagcattacaaggatgtttctttgtcttaccttttccttgcaaacaaccttcagatcatcattgaaacggttggttcaactcccctaaggaatctccttggagatgattggctcaataagcacgaagataaactctgcgcttatgctgggaattatgagatagcagcatggtccaatgttttcatgtctttaccagaagaacccacagacctatcaccagaggaagctaaaatatatttcagaagatttcacacggcatttgaggaagcatatatgaaacaatcatcacgagttgtaccaaatgcgaaacttagggacgaactaaaggtttcaatagcaaagaaacttgtaccagaatacagagagttttacaggaagtacttaccaatgctcggccaggagagaaacattgagatcttggtgagattcaagccagataatttggagaattacatctctgatcttttccacggtacaccaattcatgcatcctcttctttttcttcatcttcttcctcttcatcctggaaatcacttgggtgtgtttcaggctgagagacttgatccatagttttggctaaatattccattttttacatgatgtgaagtgaaaaaaatgtagatacgtgtgtttgcattgtgtgtgcaacagaaaatg

SEQ ID NO: 96902 - protein, 636 aa, Arabidopsis thaliana
  peptide (1)..(636): Ceres Seq. ID no. 12735106
  misc_feature (34)..(609): Pfam Name: Exo70 exocyst complex subunit Pfam Description: Exo70 exocyst complex subunit
  misc_feature (1)..(634): Homolog of NCBI NO: 15225082 NR Description: hypothetical protein; protein id: At2g39380.1
  misc_feature (12)..(631): Homolog of NCBI NO: 15232697 NR Description: hypothetical protein; protein id: At3g09520.1 thaliana] >gi|6682261|gb|AAF23313.1|AC016661_38 hypothetical
  misc_feature (29)..(635): Homolog of NCBI NO: 23397263 NR Description: unknown protein [Arabidopsis thaliana]
  misc_feature (29)..(635): Homolog of NCBI NO: 15238510 NR Description: putative protein; protein id: At5g59730.1, by cDNA: gi_13430533, supported by cDNA: gi_14334437, supported cDNA: gi_15010739, supported by cDNA: gi_16974428, supported by
  misc_feature (42)..(613): Homolog of NCBI NO: 15232699 NR Description: hypothetical protein; protein id: At3g09530.1 thaliana] >gi|6682232|gb|AAF23284.1|AC016661_9 hypothetical
  misc_feature (29)..(569): Homolog of NCBI NO: 23397289 NR Description: unknown protein [Arabidopsis thaliana]
  misc_feature (35)..(627): Homolog of NCBI NO: 25308573 NR Description: hypothetical protein [imported] - Arabidopsis >gi|8439895|gb|AAF75081.1|AC007583_17 It contains a interferon domain PF|00143. EST gb|N96176 comes from this gene. [Arabidopsis
  misc_feature (174)..(631): Homolog of NCBI NO: 15226917 NR Description: unknown protein; protein id: At2g28640.1
  misc_feature (35)..(148): Homolog of NCBI NO: 15226917 NR Description: unknown protein; protein id: At2g28640.1
  misc_feature (168)..(614): Homolog of NCBI NO: 30682979 NR Description: exocyst subunit EXO70 family [Arabidopsis >gi|9294634|dbj|BAB02973.1| gb|AAD25781.1~gene_id:MAG2.5~strong
MAKMAKFSFFSSSSPKYHPSSPSSFTSFPASPLNQNFTQAMMEETVETADSVIRKWDPNTPSFTKIVSLFNHSRKEAKEFIRCVRDLRRAMHFLVSQDSQSPKLALAQTLMQIAMARLEKEFFQILSSNRDKLDPESVSGQSSISSNSEFEDVMGSDDDDESDNEMRKAGESITQVEKASAMVMSDLKAIAESMISCGYGKECVKIYKRVRKSIVDEGLSLLGIEIYKGSRFHRTDWVTLEHMIKNWIKAAKIGIATLFRGEKLLCDHVFSASNSTRESCFYEIANEAATNLFKFPEFVAKEKKSHERIFPLMDLQAAISDLWQDIEMIFHFDAVAGVKSQALTSLQKLKVSIHSALTDFESIIQKDTTKALTPGGGIHKLTRSTMNFISSLSKYSGVLSEILADHPLPRNTRLLESYVRAPISEDEQHNHALSVHFAWLILVLLCKLDTKAEHYKDVSLSYLFLANNLQIIIETVGSTPLRNLLGDDWLNKHEDKLCAYAGNYEIAAWSNVFMSLPEEPTDLSPEEAKIYFRRFHTAFEEAYMKQSSRVVPNAKLRDELKVSIAKKLVPEYREFYRKYLPMLGQERNIEILVRFKPDNLENYISDLFHGTPIHASSSFSSSSSSSSWKSLGCVSG

SEQ ID NO: 96903 - protein, 633 aa, Arabidopsis thaliana
  peptide (1)..(633): Ceres Seq. ID no. 12735107
  misc_feature (31)..(606): Pfam Name: Exo70 exocyst complex subunit Pfam Description: Exo70 exocyst complex subunit
  misc_feature (1)..(631): Homolog of NCBI NO: 15225082 NR Description: hypothetical protein; protein id: At2g39380.1
  misc_feature (9)..(628): Homolog of NCBI NO: 15232697 NR Description: hypothetical protein; protein id: At3g09520.1 thaliana] >gi|6682261|gb|AAF23313.1|AC016661_38 hypothetical
  misc_feature (26)..(632): Homolog of NCBI NO: 23397263 NR Description: unknown protein [Arabidopsis thaliana]
  misc_feature (26)..(632): Homolog of NCBI NO: 15238510 NR Description: putative protein; protein id: At5g59730.1, by cDNA: gi_13430533, supported by cDNA: gi_14334437, supported cDNA: gi_15010739, supported by cDNA: gi_16974428, supported by
  misc_feature (39)..(610): Homolog of NCBI NO: 15232699 NR Description: hypothetical protein; protein id: At3g09530.1 thaliana] >gi|6682232|gb|AAF23284.1|AC016661_9 hypothetical
  misc_feature (26)..(566): Homolog of NCBI NO: 23397289 NR Description: unknown protein [Arabidopsis thaliana]
  misc_feature (32)..(624): Homolog of NCBI NO: 25308573 NR Description: hypothetical protein [imported] - Arabidopsis >gi|8439895|gb|AAF75081.1|AC007583_17 It contains a interferon domain PF|00143. EST gb|N96176 comes from this gene. [Arabidopsis
  misc_feature (171)..(628): Homolog of NCBI NO: 15226917 NR Description: unknown protein; protein id: At2g28640.1
  misc_feature (32)..(145): Homolog of NCBI NO: 15226917 NR Description: unknown protein; protein id: At2g28640.1
  misc_feature (165)..(611): Homolog of NCBI NO: 30682979 NR Description: exocyst subunit EXO70 family [Arabidopsis >gi|9294634|dbj|BAB02973.1| gb|AAD25781.1~gene_id:MAG2.5~strong
MAKFSFFSSSSPKYHPSSPSSFTSFPASPLNQNFTQAMMEETVETADSVIRKWDPNTPSFTKIVSLFNHSRKEAKEFIRCVRDLRRAMHFLVSQDSQSPKLALAQTLMQIAMARLEKEFFQILSSNRDKLDPESVSGQSSISSNSEFEDVMGSDDDDESDNEMRKAGESITQVEKASAMVMSDLKAIAESMISCGYGKECVKIYKRVRKSIVDEGLSLLGIEIYKGSRFHRTDWVTLEHMIKNWIKAAKIGIATLFRGEKLLCDHVFSASNSTRESCFYEIANEAATNLFKFPEFVAKEKKSHERIFPLMDLQAAISDLWQDIEMIFHFDAVAGVKSQALTSLQKLKVSIHSALTDFESIIQKDTTKALTPGGGIHKLTRSTMNFISSLSKYSGVLSEILADHPLPRNTRLLESYVRAPISEDEQHNHALSVHFAWLILVLLCKLDTKAEHYKDVSLSYLFLANNLQIIIETVGSTPLRNLLGDDWLNKHEDKLCAYAGNYEIAAWSNVFMSLPEEPTDLSPEEAKIYFRRFHTAFEEAYMKQSSRVVPNAKLRDELKVSIAKKLVPEYREFYRKYLPMLGQERNIEILVRFKPDNLENYISDLFHGTPIHASSSFSSSSSSSSWKSLGCVSG

SEQ ID NO: 96904 - protein, 596 aa, Arabidopsis thaliana
  peptide (1)..(596): Ceres Seq. ID no. 12735108
  misc_feature (1)..(569): Pfam Name: Exo70 exocyst complex subunit Pfam Description: Exo70 exocyst complex subunit
  misc_feature (1)..(594): Homolog of NCBI NO: 15225082 NR Description: hypothetical protein; protein id: At2g39380.1
  misc_feature (1)..(591): Homolog of NCBI NO: 15232697 NR Description: hypothetical protein; protein id: At3g09520.1 thaliana] >gi|6682261|gb|AAF23313.1|AC016661_38 hypothetical
  misc_feature (1)..(595): Homolog of NCBI NO: 23397263 NR Description: unknown protein [Arabidopsis thaliana]
  misc_feature (1)..(595): Homolog of NCBI NO: 15238510 NR Description: putative protein; protein id: At5g59730.1, by cDNA: gi_13430533, supported by cDNA: gi_14334437, supported cDNA: gi_15010739, supported by cDNA: gi_16974428, supported by
  misc_feature (2)..(573): Homolog of NCBI NO: 15232699 NR Description: hypothetical protein; protein id: At3g09530.1 thaliana] >gi|6682232|gb|AAF23284.1|AC016661_9 hypothetical
  misc_feature (1)..(529): Homolog of NCBI NO: 23397289 NR Description: unknown protein [Arabidopsis thaliana]
  misc_feature (1)..(587): Homolog of NCBI NO: 25308573 NR Description: hypothetical protein [imported] - Arabidopsis >gi|8439895|gb|AAF75081.1|AC007583_17 It contains a interferon domain PF|00143. EST gb|N96176 comes from this gene. [Arabidopsis
  misc_feature (134)..(591): Homolog of NCBI NO: 15226917 NR Description: unknown protein; protein id: At2g28640.1
  misc_feature (1)..(108): Homolog of NCBI NO: 15226917 NR Description: unknown protein; protein id: At2g28640.1
  misc_feature (128)..(574): Homolog of NCBI NO: 30682979 NR Description: exocyst subunit EXO70 family [Arabidopsis >gi|9294634|dbj|BAB02973.1| gb|AAD25781.1~gene_id:MAG2.5~strong
MMEETVETADSVIRKWDPNTPSFTKIVSLFNHSRKEAKEFIRCVRDLRRAMHFLVSQDSQSPKLALAQTLMQIAMARLEKEFFQILSSNRDKLDPESVSGQSSISSNSEFEDVMGSDDDDESDNEMRKAGESITQVEKASAMVMSDLKAIAESMISCGYGKECVKIYKRVRKSIVDEGLSLLGIEIYKGSRFHRTDWVTLEHMIKNWIKAAKIGIATLFRGEKLLCDHVFSASNSTRESCFYEIANEAATNLFKFPEFVAKEKKSHERIFPLMDLQAAISDLWQDIEMIFHFDAVAGVKSQALTSLQKLKVSIHSALTDFESIIQKDTTKALTPGGGIHKLTRSTMNFISSLSKYSGVLSEILADHPLPRNTRLLESYVRAPISEDEQHNHALSVHFAWLILVLLCKLDTKAEHYKDVSLSYLFLANNLQIIIETVGSTPLRNLLGDDWLNKHEDKLCAYAGNYEIAAWSNVFMSLPEEPTDLSPEEAKIYFRRFHTAFEEAYMKQSSRVVPNAKLRDELKVSIAKKLVPEYREFYRKYLPMLGQERNIEILVRFKPDNLENYISDLFHGTPIHASSSFSSSSSSSSWKSLGCVSG

SEQ ID NO: 96905 - DNA, 921 bp, Arabidopsis thaliana
  misc_feature (1)..(921): Ceres Seq. ID no. 12735123
  misc_feature: MA Experiment ID: 20000314 Result: Up-regulated in Transcription
  misc_feature: MA Experiment 20000314 PARAMETER Experiment Name: At_14day_Shoots-Roots_Sub_P Parameter: Age (day) Value: 14
  misc_feature: MA Experiment 20000314 PARAMETER Experiment Name: At_14day_Shoots-Roots_Sub_P Parameter: Organism Value: A. thaliana
  misc_feature: MA Experiment 20000314 PARAMETER Experiment Name: At_14day_Shoots-Roots_Sub_P Parameter: Plant Line Value: WS
  misc_feature: MA Experiment 20000314 PARAMETER Experiment Name: At_14day_Shoots-Roots_Sub_P Parameter: Tissue Value: Roots vs. Whole Plant
  misc_feature: MA Experiment ID: 20000315 Result: Up-regulated in Transcription
  misc_feature: MA Experiment 20000315 PARAMETER Experiment Name: At_14day_Shoots-Roots_Sub_P Parameter: Age (day) Value: 14
  misc_feature: MA Experiment 20000315 PARAMETER Experiment Name: At_14day_Shoots-Roots_Sub_P Parameter: Organism Value: A. thaliana
  misc_feature: MA Experiment 20000315 PARAMETER Experiment Name: At_14day_Shoots-Roots_Sub_P Parameter: Plant Line Value: WS
  misc_feature: MA Experiment 20000315 PARAMETER Experiment Name: At_14day_Shoots-Roots_Sub_P Parameter: Tissue Value: Shoots vs. Whole Plant
atggccaaagctcttagccttacaatctttctctttctcttgatagcttccaatgtccaatccgctcgacttctcgatgaggttcaaactcagccacaattagtcccccaggtaccggaagaggaagatgatagtccacaagccgtaacaacaactccaacaccaattcctctcccaggacccgccacgggaggacccgagccaatcctagagttctttatgcatgacgtgctaggcgggtcacacccatcagcacgtgtggttacagggatagtagcacaaacagaggtgaatggaataccgttttctaaatccagcaacaacattttcccagtagataacgcagtgccgcttgtgaacgcaaacagcatcaacaacttaatcaatccaaacacagctccactcctaacaggacttagtggctctcaagccaacaccgtaatccaaaacagtaacggtaactctcaaggatcccttagctccaacaaccttccctttgtaaccacgggtcagctccctcccatagctgccctccaacagcttatgtttggctctatcaccgtggttgacgatgagctcaccgagggccatgagttgggctctgcgatcattgggagagcccaagggttttatctcgctagctctttggatggaactagccagaccctttcgttgacagtgttactccacgaagatcatgatcatcatgacacccttgatgatgccatcagcttctttggggttcaccgaaccgcttctcatgcgtcgcatatcgctgttgtgggtggaactgggagattcgagcatgctaaagggtatgctgtcgtggagactctacacaaccaggaagaccaacatgttactgatggtcatgataccattctccatttcagtgtttatcttacatactacaaagcttga

SEQ ID NO: 96906 - protein, 306 aa, Arabidopsis thaliana
  peptide (1)..(306): Ceres Seq. ID no. 12735124
  misc_feature (108)..(303): Pfam Name: Dirigent-like protein Pfam Description: Dirigent-like protein
  misc_feature (1)..(306): Homolog of NCBI NO: 15233217 NR Description: disease resistance response protein-related; id: At3g55230.1 [Arabidopsis thaliana] >gi|11282368|pir||T47662
  misc_feature (5)..(303): Homolog of NCBI NO: 15225466 NR Description: disease resistance response protein-related/
  misc_feature (60)..(303): Homolog of NCBI NO: 25407001 NR Description: hypothetical protein [imported] - Arabidopsis >gi|8439894|gb|AAF75080.1|AC007583_16 Contains similarity to resistance response protein from Pisum sativum gb|M18250. EST
  misc_feature (58)..(303): Homolog of NCBI NO: 15226923 NR Description: fibroin-related; protein id: At2g28670.1 thaliana] >gi|25408006|pir||G84687 probable disease resistance
  misc_feature (56)..(304): Homolog of NCBI NO: 34895944 NR Description: P0011G08.13 [Oryza sativa (japonica
  misc_feature (60)..(301): Homolog of NCBI NO: 27497202 NR Description: Putative disease resistance response protein
  misc_feature (129)..(303): Homolog of NCBI NO: 15229564 NR Description: disease resistance response protein-related;
  misc_feature (129)..(303): Homolog of NCBI NO: 15236315 NR Description: disease resistance response protein-related; id: At4g13580.1, supported by cDNA: gi_19698840 [Arabidopsis
  misc_feature (129)..(264): Homolog of NCBI NO: 9294671 NR Description: contains similarity to disease resistance
  misc_feature (184)..(301): Homolog of NCBI NO: 34908084 NR Description: putative UDP-glucuronic acid decarboxylase [Oryza
MAKALSLTIFLFLLIASNVQSARLLDEVQTQPQLVPQVPEEEDDSPQAVTTTPTPIPLPGPATGGPEPILEFFMHDVLGGSHPSARVVTGIVAQTEVNGIPFSKSSNNIFPVDNAVPLVNANSINNLINPNTAPLLTGLSGSQANTVIQNSNGNSQGSLSSNNLPFVTTGQLPPIAALQQLMFGSITVVDDELTEGHELGSAIIGRAQGFYLASSLDGTSQTLSLTVLLHEDHDHHDTLDDAISFFGVHRTASHASHIAVVGGTGRFEHAKGYAVVETLHNQEDQHVTDGHDTILHFSVYLTYYKA

SEQ ID NO: 96907 - protein, 233 aa, Arabidopsis thaliana
  peptide (1)..(233): Ceres Seq. ID no. 12735125
  misc_feature (35)..(230): Pfam Name: Dirigent-like protein Pfam Description: Dirigent-like protein
  misc_feature (1)..(233): Homolog of NCBI NO: 15233217 NR Description: disease resistance response protein-related; id: At3g55230.1 [Arabidopsis thaliana] >gi|11282368|pir||T47662
  misc_feature (1)..(230): Homolog of NCBI NO: 15225466 NR Description: disease resistance response protein-related/
  misc_feature (1)..(230): Homolog of NCBI NO: 25407001 NR Description: hypothetical protein [imported] - Arabidopsis >gi|8439894|gb|AAF75080.1|AC007583_16 Contains similarity to resistance response protein from Pisum sativum gb|M18250. EST
  misc_feature (1)..(230): Homolog of NCBI NO: 15226923 NR Description: fibroin-related; protein id: At2g28670.1 thaliana] >gi|25408006|pir||G84687 probable disease resistance
  misc_feature (1)..(231): Homolog of NCBI NO: 34895944 NR Description: P0011G08.13 [Oryza sativa (japonica
  misc_feature (1)..(228): Homolog of NCBI NO: 27497202 NR Description: Putative disease resistance response protein
  misc_feature (56)..(230): Homolog of NCBI NO: 15229564 NR Description: disease resistance response protein-related;
  misc_feature (56)..(230): Homolog of NCBI NO: 15236315 NR Description: disease resistance response protein-related; id: At4g13580.1, supported by cDNA: gi_19698840 [Arabidopsis
  misc_feature (56)..(191): Homolog of NCBI NO: 9294671 NR Description: contains similarity to disease resistance
  misc_feature (111)..(228): Homolog of NCBI NO: 34908084 NR Description: putative UDP-glucuronic acid decarboxylase [Oryza
MHDVLGGSHPSARVVTGIVAQTEVNGIPFSKSSNNIFPVDNAVPLVNANSINNLINPNTAPLLTGLSGSQANTVIQNSNGNSQGSLSSNNLPFVTTGQLPPIAALQQLMFGSITVVDDELTEGHELGSAIIGRAQGFYLASSLDGTSQTLSLTVLLHEDHDHHDTLDDAISFFGVHRTASHASHIAVVGGTGRFEHAKGYAVVETLHNQEDQHVTDGHDTILHFSVYLTYYKA

SEQ ID NO: 96908 - DNA, 897 bp, Arabidopsis thaliana
  misc_feature (1)..(897): Ceres Seq. ID no. 12735126
  misc_feature: MA Experiment ID: 108461 Result: Up-regulated in Transcription
  misc_feature: MA Experiment 108461 PARAMETER Experiment Name: At_Germinating_Seeds_cDNA_P Parameter: Age (day) Value: 1 vs. 0
  misc_feature: MA Experiment 108461 PARAMETER Experiment Name: At_Germinating_Seeds_cDNA_P Parameter: Tissue Value: Germinating Seeds
  misc_feature: MA Experiment ID: 108462 Result: Up-regulated in Transcription
  misc_feature: MA Experiment 108462 PARAMETER Experiment Name: At_Germinating_Seeds_cDNA_P Parameter: Age (day) Value: 2 vs. 0
  misc_feature: MA Experiment 108462 PARAMETER Experiment Name: At_Germinating_Seeds_cDNA_P Parameter: Tissue Value: Germinating Seeds
  misc_feature: MA Experiment ID: 108463 Result: Up-regulated in Transcription
  misc_feature: MA Experiment 108463 PARAMETER Experiment Name: At_Germinating_Seeds_cDNA_P Parameter: Age (day) Value: 3 vs. 0
  misc_feature: MA Experiment 108463 PARAMETER Experiment Name: At_Germinating_Seeds_cDNA_P Parameter: Tissue Value: Germinating Seeds
  misc_feature: MA Experiment ID: 108464 Result: Up-regulated in Transcription
  misc_feature: MA Experiment 108464 PARAMETER Experiment Name: At_Germinating_Seeds_cDNA_P Parameter: Age (day) Value: 4 vs. 0
  misc_feature: MA Experiment 108464 PARAMETER Experiment Name: At_Germinating_Seeds_cDNA_P Parameter: Tissue Value: Germinating Seeds
  misc_feature: MA Experiment ID: 108569 Result: Up-regulated in Transcription
  misc_feature: MA Experiment 108569 PARAMETER Experiment Name: At_0.001%_MeJA__cDNA_P Parameter: Timepoint (hr) Value: 6
  misc_feature: MA Experiment 108569 PARAMETER Experiment Name: At_0.001%_MeJA__cDNA_P Parameter: Tissue Value: Aerial
  misc_feature: MA Experiment 108569 PARAMETER Experiment Name: At_0.001%_MeJA__cDNA_P Parameter: Treatment Value: 0.001% MeJA vs. No Treatment
  misc_feature: MA Experiment ID: 108572 Result: Up-regulated in Transcription
  misc_feature: MA Experiment 108572 PARAMETER Experiment Name: At_Drought_cDNA_P Parameter: Timepoint (hr) Value: 1
  misc_feature: MA Experiment 108572 PARAMETER Experiment Name: At_Drought_cDNA_P Parameter: Tissue Value: Aerial
  misc_feature: MA Experiment 108572 PARAMETER Experiment Name: At_Drought_cDNA_P Parameter: Treatment Value: Drought vs. No Drought
  misc_feature: MA Experiment ID: 108605 Result: Up-regulated in Transcription
  misc_feature: MA Experiment 108605 PARAMETER Experiment Name: At_100uM_ABA_cDNA_P Parameter: Timepoint (hr) Value: 6
  misc_feature: MA Experiment 108605 PARAMETER Experiment Name: At_100uM_ABA_cDNA_P Parameter: Tissue Value: Aerial
  misc_feature: MA Experiment 108605 PARAMETER Experiment Name: At_100uM_ABA_cDNA_P Parameter: Treatment Value: 100uM ABA vs. No Treatment
  misc_feature: MA Experiment ID: 108607 Result: Up-regulated in Transcription
  misc_feature: MA Experiment 108607 PARAMETER Experiment Name: At_100uM_ABA_cDNA_P Parameter: Timepoint (hr) Value: 4
  misc_feature: MA Experiment 108607 PARAMETER Experiment Name: At_100uM_ABA_cDNA_P Parameter: Tissue Value: Aerial
  misc_feature: MA Experiment 108607 PARAMETER Experiment Name: At_100uM_ABA_cDNA_P Parameter: Treatment Value: 100uM ABA vs. No Treatment
  misc_feature: MA Experiment ID: 108609 Result: Up-regulated in Transcription
  misc_feature: MA Experiment 108609 PARAMETER Experiment Name: At_100uM_ABA_cDNA_P Parameter: Timepoint (hr) Value: 24
  misc_feature: MA Experiment 108609 PARAMETER Experiment Name: At_100uM_ABA_cDNA_P Parameter: Tissue Value: Aerial
  misc_feature: MA Experiment 108609 PARAMETER Experiment Name: At_100uM_ABA_cDNA_P Parameter: Treatment Value: 100uM ABA vs. No Treatment
  misc_feature: MA Experiment ID: 20000069 Result: Up-regulated in Transcription
  misc_feature: MA Experiment 20000069 PARAMETER Experiment Name: At_100uM_ABA_Mutants_cDNA_P Parameter: Plant Line Value: CS23
  misc_feature: MA Experiment 20000069 PARAMETER Experiment Name: At_100uM_ABA_Mutants_cDNA_P Parameter: Timepoint (hr) Value: 6
  misc_feature: MA Experiment 20000069 PARAMETER Experiment Name: At_100uM_ABA_Mutants_cDNA_P Parameter: Tissue Value: Aerial
  misc_feature: MA Experiment 20000069 PARAMETER Experiment Name: At_100uM_ABA_Mutants_cDNA_P Parameter: Treatment Value: 100uM ABA vs. No Treatment
  misc_feature: MA Experiment ID: 20000070 Result: Up-regulated in Transcription
  misc_feature: MA Experiment 20000070 PARAMETER Experiment Name: At_100uM_ABA_Mutants_cDNA_P Parameter: Plant Line Value: CS24
  misc_feature: MA Experiment 20000070 PARAMETER Experiment Name: At_100uM_ABA_Mutants_cDNA_P Parameter: Timepoint (hr) Value: 6
  misc_feature: MA Experiment 20000070 PARAMETER Experiment Name: At_100uM_ABA_Mutants_cDNA_P Parameter: Tissue Value: Aerial
  misc_feature: MA Experiment 20000070 PARAMETER Experiment Name: At_100uM_ABA_Mutants_cDNA_P Parameter: Treatment Value: 100uM ABA vs. No Treatment
  misc_feature: MA Experiment ID: 20000071 Result: Up-regulated in Transcription
  misc_feature: MA Experiment 20000071 PARAMETER Experiment Name: At_100uM_ABA_Mutants_cDNA_P Parameter: Plant Line Value: CS8104
  misc_feature: MA Experiment 20000071 PARAMETER Experiment Name: At_100uM_ABA_Mutants_cDNA_P Parameter: Timepoint (hr) Value: 6
  misc_feature: MA Experiment 20000071 PARAMETER Experiment Name: At_100uM_ABA_Mutants_cDNA_P Parameter: Tissue Value: Aerial
  misc_feature: MA Experiment 20000071 PARAMETER Experiment Name: At_100uM_ABA_Mutants_cDNA_P Parameter: Treatment Value: 100uM ABA vs. No Treatment
  misc_feature: MA Experiment ID: 20000072 Result: Up-regulated in Transcription
  misc_feature: MA Experiment 20000072 PARAMETER Experiment Name: At_100uM_ABA_Mutants_cDNA_P Parameter: Plant Line Value: CS8105
  misc_feature: MA Experiment 20000072 PARAMETER Experiment Name: At_100uM_ABA_Mutants_cDNA_P Parameter: Timepoint (hr) Value: 6
  misc_feature: MA Experiment 20000072 PARAMETER Experiment Name: At_100uM_ABA_Mutants_cDNA_P Parameter: Tissue Value: Aerial
  misc_feature: MA Experiment 20000072 PARAMETER Experiment Name: At_100uM_ABA_Mutants_cDNA_P Parameter: Treatment Value: 100uM ABA vs. No Treatment
  misc_feature: MA Experiment ID: 20000087 Result: Up-regulated in Transcription
  misc_feature: MA Experiment 20000087 PARAMETER Experiment Name: At_100uM_ABA_Mutants_cDNA_P Parameter: Plant Line Value: WS
  misc_feature: MA Experiment 20000087 PARAMETER Experiment Name: At_100uM_ABA_Mutants_cDNA_P Parameter: Timepoint (hr) Value: 6
  misc_feature: MA Experiment 20000087 PARAMETER Experiment Name: At_100uM_ABA_Mutants_cDNA_P Parameter: Tissue Value: Aerial
  misc_feature: MA Experiment 20000087 PARAMETER Experiment Name: At_100uM_ABA_Mutants_cDNA_P Parameter: Treatment Value: 100uM ABA vs. No Treatment
  misc_feature: MA Experiment ID: 20000088 Result: Up-regulated in Transcription
  misc_feature: MA Experiment 20000088 PARAMETER Experiment Name: At_100uM_ABA_Mutants_cDNA_P Parameter: Plant Line Value: Landsberg
  misc_feature: MA Experiment 20000088 PARAMETER Experiment Name: At_100uM_ABA_Mutants_cDNA_P Parameter: Timepoint (hr) Value: 6
  misc_feature: MA Experiment 20000088 PARAMETER Experiment Name: At_100uM_ABA_Mutants_cDNA_P Parameter: Tissue Value: Aerial
  misc_feature: MA Experiment 20000088 PARAMETER Experiment Name: At_100uM_ABA_Mutants_cDNA_P Parameter: Treatment Value: 100uM ABA vs. No Treatment
atggatatgatcactctccatattaccgtgattttaatcgtaaaatctgattgttacatgtcaatcatgtgtttcgtgttgaagcagttggagccatggtgtgaacttaaagacaaagtggttcttgtgacaggagcttcctctggtattggaagagagatctgtcttgatcttgccaaagctggttgccaggttattgcagcagctcgtcgtgttgatcgactcaactctctctgctctgaaatcaacagcttcagttcaactggaatccaagccgcagctcttgagttagacgtttcatcagacgcagccaccattcaaaaagcggtcagggaagcttgggacatctttggaaagatcgatgcattgatcaacaatgctggaatcagaggcaatgtcaagttgagtttggatttgtccgaggacgaatgggacaacgtcttcaataccaacttaaagggaccttggttagtagccaaatatgtttgtgttttaatgcgtgacgctaaacgtggtggctcggtgataaacatctcatcggttgctggggtccgcagtatcgtgcccggtggacttgcatattcttgttccaaaggcggtgttgacaccatgtcaaggatgatggcaattgagttaggtgttcacaagatcagagtgaactcgatcgcaccggggcttttcaagtcagagatcacacaagctcttatgcaaaaggagtggctcaagaatgtgaccgagaggactgtgccgttaaaggtgcaacagaccattgatccagggcttacttctctggttcgctatctcattcatgactcttctcaatatatatccgggaatacatacattgttgattccggtgctacattgcccggtgtgcctatcttttcatctctctga

SEQ ID NO: 96909 - protein, 298 aa, Arabidopsis thaliana
  peptide (1)..(298): Ceres Seq. ID no. 12735127
  misc_feature (1)..(298): Homolog of NCBI NO: 15233243 NR Description: beta-ketoacyl-ACP reductase - like protein;
  misc_feature (26)..(298): Homolog of NCBI NO: 11250516 NR Description: oxidoreductase-like protein - Arabidopsis thaliana
  misc_feature (26)..(298): Homolog of NCBI NO: 18410245 NR Description: oxidoreductase -like protein; protein id: supported by cDNA: gi_15028304, supported by cDNA: gi_19310684 thaliana] >gi|15028305|gb|AAK76629.1| putative oxidoreductase
  misc_feature (26)..(298): Homolog of NCBI NO: 15231362 NR Description: dehydrogenase -like protein; protein id:
  misc_feature (19)..(298): Homolog of NCBI NO: 15221517 NR Description: similar to glucose 1-dehydrogenase (AB000617);
  misc_feature (22)..(298): Homolog of NCBI NO: 15222406 NR Description: reductase, putative; protein id: At1g63380.1
  misc_feature (34)..(298): Homolog of NCBI NO: 18398539 NR Description: similar to oxidoreductase -like protein; protein
  misc_feature (27)..(298): Homolog of NCBI NO: 23451057 NR Description: putative short-chain type alcohol dehydrogenase
  misc_feature (27)..(298): Homolog of NCBI NO: 13549123 NR Description: putative short-chain type alcohol dehydrogenase
  misc_feature (32)..(298): Homolog of NCBI NO: 28411870 NR Description: putative 3-ketoacyl-acyl carrier protein
MDMITLHITVILIVKSDCYMSIMCFVLKQLEPWCELKDKVVLVTGASSGIGREICLDLAKAGCQVIAAARRVDRLNSLCSEINSFSSTGIQAAALELDVSSDAATIQKAVREAWDIFGKIDALINNAGIRGNVKLSLDLSEDEWDNVFNTNLKGPWLVAKYVCVLMRDAKRGGSVINISSVAGVRSIVPGGLAYSCSKGGVDTMSRMMAIELGVHKIRVNSIAPGLFKSEITQALMQKEWLKNVTERTVPLKVQQTIDPGLTSLVRYLIHDSSQYISGNTYIVDSGATLPGVPIFSSL

SEQ ID NO: 96910 - protein, 296 aa, Arabidopsis thaliana
  peptide (1)..(296): Ceres Seq. ID no. 12735128
  misc_feature (1)..(296): Homolog of NCBI NO: 15233243 NR Description: beta-ketoacyl-ACP reductase - like protein;
  misc_feature (24)..(296): Homolog of NCBI NO: 11250516 NR Description: oxidoreductase-like protein - Arabidopsis thaliana
  misc_feature (24)..(296): Homolog of NCBI NO: 18410245 NR Description: oxidoreductase -like protein; protein id: supported by cDNA: gi_15028304, supported by cDNA: gi_19310684 thaliana] >gi|15028305|gb|AAK76629.1| putative oxidoreductase
  misc_feature (24)..(296): Homolog of NCBI NO: 15231362 NR Description: dehydrogenase -like protein; protein id:
  misc_feature (17)..(296): Homolog of NCBI NO: 15221517 NR Description: similar to glucose 1-dehydrogenase (AB000617);
  misc_feature (20)..(296): Homolog of NCBI NO: 15222406 NR Description: reductase, putative; protein id: At1g63380.1
  misc_feature (32)..(296): Homolog of NCBI NO: 18398539 NR Description: similar to oxidoreductase -like protein; protein
  misc_feature (25)..(296): Homolog of NCBI NO: 23451057 NR Description: putative short-chain type alcohol dehydrogenase
  misc_feature (25)..(296): Homolog of NCBI NO: 13549123 NR Description: putative short-chain type alcohol dehydrogenase
  misc_feature (30)..(296): Homolog of NCBI NO: 28411870 NR Description: putative 3-ketoacyl-acyl carrier protein
MITLHITVILIVKSDCYMSIMCFVLKQLEPWCELKDKVVLVTGASSGIGREICLDLAKAGCQVIAAARRVDRLNSLCSEINSFSSTGIQAAALELDVSSDAATIQKAVREAWDIFGKIDALINNAGIRGNVKLSLDLSEDEWDNVFNTNLKGPWLVAKYVCVLMRDAKRGGSVINISSVAGVRSIVPGGLAYSCSKGGVDTMSRMMAIELGVHKIRVNSIAPGLFKSEITQALMQKEWLKNVTERTVPLKVQQTIDPGLTSLVRYLIHDSSQYISGNTYIVDSGATLPGVPIFSSL

SEQ ID NO: 96911 - protein, 279 aa, Arabidopsis thaliana
  peptide (1)..(279): Ceres Seq. ID no. 12735129
  misc_feature (1)..(279): Homolog of NCBI NO: 15233243 NR Description: beta-ketoacyl-ACP reductase - like protein;
  misc_feature (7)..(279): Homolog of NCBI NO: 11250516 NR Description: oxidoreductase-like protein - Arabidopsis thaliana
  misc_feature (7)..(279): Homolog of NCBI NO: 18410245 NR Description: oxidoreductase -like protein; protein id: supported by cDNA: gi_15028304, supported by cDNA: gi_19310684 thaliana] >gi|15028305|gb|AAK76629.1| putative oxidoreductase
  misc_feature (7)..(279): Homolog of NCBI NO: 15231362 NR Description: dehydrogenase -like protein; protein id:
  misc_feature (1)..(279): Homolog of NCBI NO: 15221517 NR Description: similar to glucose 1-dehydrogenase (AB000617);
  misc_feature (3)..(279): Homolog of NCBI NO: 15222406 NR Description: reductase, putative; protein id: At1g63380.1
  misc_feature (15)..(279): Homolog of NCBI NO: 18398539 NR Description: similar to oxidoreductase -like protein; protein
  misc_feature (8)..(279): Homolog of NCBI NO: 23451057 NR Description: putative short-chain type alcohol dehydrogenase
  misc_feature (8)..(279): Homolog of NCBI NO: 13549123 NR Description: putative short-chain type alcohol dehydrogenase
  misc_feature (13)..(279): Homolog of NCBI NO: 28411870 NR Description: putative 3-ketoacyl-acyl carrier protein
MSIMCFVLKQLEPWCELKDKVVLVTGASSGIGREICLDLAKAGCQVIAAARRVDRLNSLCSEINSFSSTGIQAAALELDVSSDAATIQKAVREAWDIFGKIDALINNAGIRGNVKLSLDLSEDEWDNVFNTNLKGPWLVAKYVCVLMRDAKRGGSVINISSVAGVRSIVPGGLAYSCSKGGVDTMSRMMAIELGVHKIRVNSIAPGLFKSEITQALMQKEWLKNVTERTVPLKVQQTIDPGLTSLVRYLIHDSSQYISGNTYIVDSGATLPGVPIFSSL

SEQ ID NO: 96912 - DNA, 2046 bp, Arabidopsis thaliana
  misc_feature (1)..(2046): Ceres Seq. ID no. 12735130
  misc_feature: MA Experiment ID: 20000180 Result: Down-regulated in Transcription
  misc_feature: MA Experiment 20000180 PARAMETER Experiment Name: At_Germinating_Seeds_P Parameter: Age (hr) Value: 24 vs. 0
  misc_feature: MA Experiment 20000180 PARAMETER Experiment Name: At_Germinating_Seeds_P Parameter: Tissue Value: Germinating Seeds
  misc_feature: MA Experiment ID: 20001557 Result: Up-regulated in Transcription
  misc_feature: MA Experiment 20001557 PARAMETER Experiment Name: At_Drought_Soil_Dry_P Parameter: Age (day) Value: 27
  misc_feature: MA Experiment 20001557 PARAMETER Experiment Name: At_Drought_Soil_Dry_P Parameter: Organism Value: A. thaliana
  misc_feature: MA Experiment 20001557 PARAMETER Experiment Name: At_Drought_Soil_Dry_P Parameter: Plant Line Value: WS
  misc_feature: MA Experiment 20001557 PARAMETER Experiment Name: At_Drought_Soil_Dry_P Parameter: Post Timepoint (hr) Value: 3
  misc_feature: MA Experiment 20001557 PARAMETER Experiment Name: At_Drought_Soil_Dry_P Parameter: Post-Treatment Value: Re-Water vs. No Drought
  misc_feature: MA Experiment 20001557 PARAMETER Experiment Name: At_Drought_Soil_Dry_P Parameter: Timepoint (day) Value: 13
  misc_feature: MA Experiment 20001557 PARAMETER Experiment Name: At_Drought_Soil_Dry_P Parameter: Treatment Value: Drought vs. No Drought
gtttttggcggtctcagtgaagaagatggtgctgtcgaacaagaagctgaagcagaggattcgacaagatttggctgaatcactatctgtctctgtatccgaaacaaatccacaatctcagtctctgaaattgctccttgattcatctagccacaaacccagattgtcgaagagagagaaacgaagaaattgcgaaactttcgctagagaagacgacgaaatcagagagaatgaagttgggaatggtgggtcaagcgagaagactgatacgaagattaaaaagaagagaaagagagacgatgctgtggaagtcgacgagttagaaggagatgaaggaactaaggaagagcaaaaaccccagaagaagaaaaataagaagaagaagaagaagagaaaggtaaacaaaacgccaaagaaggctgaggaaggcaatgtagaagagaaggtgaaggtagaagagattgaagttaatacagacaataaagaagaagatggggttgttcctaacaagttatatgttgggggtattccttatcagagtacagaagatgagattcgtagctactttagaagctgtggagtcatcattaaagttgattgcaagatgcgtcctgaagatggggctttcagtggtattgccttcatcacttttgacactgaagatggcgcaaaacgtgctttggcttttgatagagctgctatgggtgatcgatatttgacaatccagcaatacgtgaaaaccaccaccccttccattccaagaaggaaaacatcttctggtttcgctccagaaatggtggatggctataacagggtatacattgggaatttagcctgggacacaacagagcgtgacatacggaagctcttctctgactgcgtaataaactctgtgcggttgggtaaaaacaaagaaacaggagagtttaaagggtatgcgcatgtggatttcaaggatagtgtgtctgtggcgattgcgctgaagctggatcagcaggttatttgcggaagacctgtcaagatatgttgtgcacttaaagacagaccagctactgatcatacacctggtgaaacgaacaatgctggttcgtacaacatggaagatacttatgctgctgctgatccagtaccggctttagctgggcgtagcgaagttgatgacggaaactactttgcaactacggttagcagcagtaaggtcaaaaggagggtctgttatgagtgtggagaaaagggtcatctttctacagcctgtcccataaagcttcaaaaggctgatgatcaggcaaactcaaagctgggtcaagagactgttgatggtagaccggctatgcaaagctatggtcttccaaagaatagtggtgattcttactacatgaatgagacatacgcttctacaaatgaaacttataatggaggatactcagcatctgctgttggcactggtaaggtcaaaaggaggaactgttatgagtgtggagaaaagggtcatctttctacagcctgtcccataaagcttcaaaacacttctcacacaaactcaacgctggatcaccaaactgttgaggcaggaccgactcaggtaacaagctatagtcttcaaaagaaaacaagagacactgaaaacaatggtggttcgttcatggatgagagctatgctactgttccgatatccattgatgtgacaaatggagctaatgatgcaagcttaacatctgcggttagcactggtaagatcaaaaagagaaactgttacgagtgcggagaaaaaggtcatctttcttcagcttgccctaacaagctgcaaaaacaaggctgatgatcccacaagctctacaaagacagcttatacattttgttcttaaactttacatttgaatcattggaggaatatggaaggacgtggaccacttggtagaagagtggagttttggtcctcttttagaaaaccataaattttattctgtattgttttatgatctttcatagaatgctctaaagtctaaaaaccaaaagtatcttaatatattggattattatttcttg

SEQ ID NO: 96913 - protein, 605 aa, Arabidopsis thaliana
  peptide (1)..(605): Ceres Seq. ID no. 12735131
  misc_feature (171)..(241): Pfam Name: RNA recognition motif. (a.k.a. RRM, RBD, or RNP domain) Pfam Description: RNA recognition motif. (a.k.a. RRM, RBD, or RNP
  misc_feature (9)..(605): Homolog of NCBI NO: 18026763 NR Description: phragmoplastin-interacting protein PHIP1
  misc_feature (115)..(348): Homolog of NCBI NO: 25446691 NR Description: Unknown protein [Oryza sativa (japonica
  misc_feature (47)..(360): Homolog of NCBI NO: 1262277 NR Description: nucleolar phosphoprotein
  misc_feature (47)..(341): Homolog of NCBI NO: 19114443 NR Description: gar2 protein [Schizosaccharomyces pombe] Protein gar2 >gi|7523472|emb|CAB86413.1| gar2 protein
  misc_feature (47)..(341): Homolog of NCBI NO: 2130461 NR Description: nucleolar protein gar2 - fission yeast pombe) >gi|663262|emb|CAA88179.1| gar2 [Schizosaccharomyces
  misc_feature (25)..(351): Homolog of NCBI NO: 7440062 NR Description: nucleolin homolog - garden pea
  misc_feature (170)..(349): Homolog of NCBI NO: 21309 NR Description: 28kD RNA binding protein [Spinacia oleracea]
  misc_feature (170)..(349): Homolog of NCBI NO: 99565 NR Description: RNA-binding protein, 28K - spinach
  misc_feature (170)..(349): Homolog of NCBI NO: 133247 NR Description: 28 KDA RIBONUCLEOPROTEIN, CHLOROPLAST (28RNP)
  misc_feature (152)..(359): Homolog of NCBI NO: 7446342 NR Description: RNA-binding protein precursor, 33K - wood tobacco
FLAVSVKKMVLSNKKLKQRIRQDLAESLSVSVSETNPQSQSLKLLLDSSSHKPRLSKREKRRNCETFAREDDEIRENEVGNGGSSEKTDTKIKKKRKRDDAVEVDELEGDEGTKEEQKPQKKKNKKKKKKRKVNKTPKKAEEGNVEEKVKVEEIEVNTDNKEEDGVVPNKLYVGGIPYQSTEDEIRSYFRSCGVIIKVDCKMRPEDGAFSGIAFITFDTEDGAKRALAFDRAAMGDRYLTIQQYVKTTTPSIPRRKTSSGFAPEMVDGYNRVYIGNLAWDTTERDIRKLFSDCVINSVRLGKNKETGEFKGYAHVDFKDSVSVAIALKLDQQVICGRPVKICCALKDRPATDHTPGETNNAGSYNMEDTYAAADPVPALAGRSEVDDGNYFATTVSSSKVKRRVCYECGEKGHLSTACPIKLQKADDQANSKLGQETVDGRPAMQSYGLPKNSGDSYYMNETYASTNETYNGGYSASAVGTGKVKRRNCYECGEKGHLSTACPIKLQNTSHTNSTLDHQTVEAGPTQVTSYSLQKKTRDTENNGGSFMDESYATVPISIDVTNGANDASLTSAVSTGKIKKRNCYECGEKGHLSSACPNKLQKQG

SEQ ID NO: 96914 - protein, 597 aa, Arabidopsis thaliana
  peptide (1)..(597): Ceres Seq. ID no. 12735132
  misc_feature (163)..(233): Pfam Name: RNA recognition motif. (a.k.a. RRM, RBD, or RNP domain) Pfam Description: RNA recognition motif. (a.k.a. RRM, RBD, or RNP
  misc_feature (1)..(597): Homolog of NCBI NO: 18026763 NR Description: phragmoplastin-interacting protein PHIP1
  misc_feature (107)..(340): Homolog of NCBI NO: 25446691 NR Description: Unknown protein [Oryza sativa (japonica
  misc_feature (39)..(352): Homolog of NCBI NO: 1262277 NR Description: nucleolar phosphoprotein
  misc_feature (39)..(333): Homolog of NCBI NO: 19114443 NR Description: gar2 protein [Schizosaccharomyces pombe] Protein gar2 >gi|7523472|emb|CAB86413.1| gar2 protein
  misc_feature (39)..(333): Homolog of NCBI NO: 2130461 NR Description: nucleolar protein gar2 - fission yeast pombe) >gi|663262|emb|CAA88179.1| gar2 [Schizosaccharomyces
  misc_feature (17)..(343): Homolog of NCBI NO: 7440062 NR Description: nucleolin homolog - garden pea
  misc_feature (162)..(341): Homolog of NCBI NO: 21309 NR Description: 28kD RNA binding protein [Spinacia oleracea]
  misc_feature (162)..(341): Homolog of NCBI NO: 99565 NR Description: RNA-binding protein, 28K - spinach
  misc_feature (162)..(341): Homolog of NCBI NO: 133247 NR Description: 28 KDA RIBONUCLEOPROTEIN, CHLOROPLAST (28RNP)
  misc_feature (144)..(351): Homolog of NCBI NO: 7446342 NR Description: RNA-binding protein precursor, 33K - wood tobacco
MVLSNKKLKQRIRQDLAESLSVSVSETNPQSQSLKLLLDSSSHKPRLSKREKRRNCETFAREDDEIRENEVGNGGSSEKTDTKIKKKRKRDDAVEVDELEGDEGTKEEQKPQKKKNKKKKKKRKVNKTPKKAEEGNVEEKVKVEEIEVNTDNKEEDGVVPNKLYVGGIPYQSTEDEIRSYFRSCGVIIKVDCKMRPEDGAFSGIAFITFDTEDGAKRALAFDRAAMGDRYLTIQQYVKTTTPSIPRRKTSSGFAPEMVDGYNRVYIGNLAWDTTERDIRKLFSDCVINSVRLGKNKETGEFKGYAHVDFKDSVSVAIALKLDQQVICGRPVKICCALKDRPATDHTPGETNNAGSYNMEDTYAAADPVPALAGRSEVDDGNYFATTVSSSKVKRRVCYECGEKGHLSTACPIKLQKADDQANSKLGQETVDGRPAMQSYGLPKNSGDSYYMNETYASTNETYNGGYSASAVGTGKVKRRNCYECGEKGHLSTACPIKLQNTSHTNSTLDHQTVEAGPTQVTSYSLQKKTRDTENNGGSFMDESYATVPISIDVTNGANDASLTSAVSTGKIKKRNCYECGEKGHLSSACPNKLQKQG

SEQ ID NO: 96915 - protein, 404 aa, Arabidopsis thaliana
  peptide (1)..(404): Ceres Seq. ID no. 12735133
  misc_feature (381)..(398): Pfam Name: Zinc knuckle Pfam Description: Zinc knuckle
  misc_feature (1)..(404): Homolog of NCBI NO: 18026763 NR Description: phragmoplastin-interacting protein PHIP1
  misc_feature (1)..(147): Homolog of NCBI NO: 25446691 NR Description: Unknown protein [Oryza sativa (japonica
  misc_feature (1)..(159): Homolog of NCBI NO: 1262277 NR Description: nucleolar phosphoprotein
  misc_feature (1)..(140): Homolog of NCBI NO: 19114443 NR Description: gar2 protein [Schizosaccharomyces pombe] Protein gar2 >gi|7523472|emb|CAB86413.1| gar2 protein
  misc_feature (1)..(140): Homolog of NCBI NO: 2130461 NR Description: nucleolar protein gar2 - fission yeast pombe) >gi|663262|emb|CAA88179.1| gar2 [Schizosaccharomyces
  misc_feature (1)..(150): Homolog of NCBI NO: 7440062 NR Description: nucleolin homolog - garden pea
  misc_feature (1)..(148): Homolog of NCBI NO: 21309 NR Description: 28kD RNA binding protein [Spinacia oleracea]
  misc_feature (1)..(148): Homolog of NCBI NO: 99565 NR Description: RNA-binding protein, 28K - spinach
  misc_feature (1)..(148): Homolog of NCBI NO: 133247 NR Description: 28 KDA RIBONUCLEOPROTEIN, CHLOROPLAST (28RNP)
  misc_feature (1)..(158): Homolog of NCBI NO: 7446342 NR Description: RNA-binding protein precursor, 33K - wood tobacco
MRPEDGAFSGIAFITFDTEDGAKRALAFDRAAMGDRYLTIQQYVKTTTPSIPRRKTSSGFAPEMVDGYNRVYIGNLAWDTTERDIRKLFSDCVINSVRLGKNKETGEFKGYAHVDFKDSVSVAIALKLDQQVICGRPVKICCALKDRPATDHTPGETNNAGSYNMEDTYAAADPVPALAGRSEVDDGNYFATTVSSSKVKRRVCYECGEKGHLSTACPIKLQKADDQANSKLGQETVDGRPAMQSYGLPKNSGDSYYMNETYASTNETYNGGYSASAVGTGKVKRRNCYECGEKGHLSTACPIKLQNTSHTNSTLDHQTVEAGPTQVTSYSLQKKTRDTENNGGSFMDESYATVPISIDVTNGANDASLTSAVSTGKIKKRNCYECGEKGHLSSACPNKLQKQG

SEQ ID NO: 96916 - DNA, 1095 bp, Arabidopsis thaliana
  misc_feature (1)..(1095): Ceres Seq. ID no. 12735150
  misc_feature: MA Experiment ID: 20000171 Result: Up-regulated in Transcription
  misc_feature: MA Experiment 20000171 PARAMETER Experiment Name: At_42deg_Heat_P Parameter: Age (day) Value: 14
  misc_feature: MA Experiment 20000171 PARAMETER Experiment Name: At_42deg_Heat_P Parameter: Organism Value: A. thaliana
  misc_feature: MA Experiment 20000171 PARAMETER Experiment Name: At_42deg_Heat_P Parameter: Plant Line Value: WS
  misc_feature: MA Experiment 20000171 PARAMETER Experiment Name: At_42deg_Heat_P Parameter: Temperature (deg C) Value: 42 vs. 22
  misc_feature: MA Experiment 20000171 PARAMETER Experiment Name: At_42deg_Heat_P Parameter: Timepoint (hr) Value: 1
  misc_feature: MA Experiment 20000171 PARAMETER Experiment Name: At_42deg_Heat_P Parameter: Tissue Value: Aerial
  misc_feature: MA Experiment ID: 20001451 Result: Up-regulated in Transcription
  misc_feature: MA Experiment 20001451 PARAMETER Experiment Name: At_Far-red-induction_P Parameter: Age (day) Value: 7
  misc_feature: MA Experiment 20001451 PARAMETER Experiment Name: At_Far-red-induction_P Parameter: Light Value: Far-red vs. White
  misc_feature: MA Experiment 20001451 PARAMETER Experiment Name: At_Far-red-induction_P Parameter: Organism Value: A. thaliana
  misc_feature: MA Experiment 20001451 PARAMETER Experiment Name: At_Far-red-induction_P Parameter: Plant Line Value: Columbia
  misc_feature: MA Experiment 20001451 PARAMETER Experiment Name: At_Far-red-induction_P Parameter: Timepoint (hr) Value: 24
  misc_feature: MA Experiment 20001451 PARAMETER Experiment Name: At_Far-red-induction_P Parameter: Tissue Value: Whole Plant
atgaaagctcttattcttgttggaggttttggcactcgcttgagaccattgactctcagtctcccaaagccgcttgtcgatttcgctaataaacctatgattctacatcagatagaggcactaaaggcaattggagtggatgaagtcgtcttggccattaactacgagccagagcaactgctagtgatgtccaaattctcaaacgacgttgaggcaactctcgggatcaagatcacctgctcacaagagactgagcctttaggtacagctggtcctttggctttagccagggacaaactggttgatggctctggccaaccattctttgtccttaacagcgatgttattagcgactacccgcttgaagagatgattgcttttcacaatgctcatggaggagaggcctctataatggtgacaaaggtagatgagccttcgaaatatggagttgttgttatggaagaagccacagggagagtggaaagattcgtcgaaaaaccgaaactatttgttggtaacaagatcaatgctgggatttatcttctaaatccttcagttcttgatcggattgagctaagaccaacatcaatagagaaagagatcttccctcaaatcgcagaagcggaaaagctctatgcaatgctacttcccggattctggatggacattggtcaaccacgagactacattactggtctaagactttacttagactctctgaggaagaaatctccttcaaagttagccactggtccacacattttgggaaatgttcttgtggatgaaaccgcagagattggtgaaggatgtttgattggccctaacgttgctataggccctggctgtgttgttgagtccggggttagactatcgcactgcacggtaatgcgtggggtacacgtgaagagatatgcgtgtatctcgagtagtatcattgggtggcactcgacggtcggacaatgggctcgggtcgagaacatgtccatacttgggaaaaatgtttacgtgtgcgatgagatatattgtaatggaggggttgtgttgcataacaaagagatcaaatcagacatcttgaaaccagatatagtgatgtga

SEQ ID NO: 96917 - protein, 364 aa, Arabidopsis thaliana
  peptide (1)..(364): Ceres Seq. ID no. 12735151
  misc_feature (2)..(239): Pfam Name: Nucleotidyl transferase Pfam Description: Nucleotidyl transferase
  misc_feature (1)..(364): Homolog of NCBI NO: 15233308 NR Description: mannose-1-phosphate guanylyltransferase-like
  misc_feature (1)..(364): Homolog of NCBI NO: 15225553 NR Description: GDP-mannose pyrophosphorylase; protein id: supported by cDNA: 37775., supported by cDNA: gi_13605662, by cDNA: gi_15982867, supported by cDNA: gi_16226304, supported
  misc_feature (1)..(364): Homolog of NCBI NO: 13509287 NR Description: GDP-mannose pyrophosphorylase [Arabidopsis
  misc_feature (1)..(364): Homolog of NCBI NO: 4103324 NR Description: GDP-mannose pyrophosphorylase [Solanum tuberosum]
  misc_feature (1)..(364): Homolog of NCBI NO: 14971013 NR Description: GDP-D-mannose pyrophosphorylase [Nicotiana
  misc_feature (1)..(364): Homolog of NCBI NO: 34902046 NR Description: COG1208, GCD1, Nucleoside-diphosphate-sugar
  misc_feature (1)..(364): Homolog of NCBI NO: 34908274 NR Description: putative GDP-mannose pyrophosphorylase [Oryza
  misc_feature (1)..(364): Homolog of NCBI NO: 40253523 NR Description: putative GDP-mannose pyrophosphorylase [Oryza
  misc_feature (1)..(351): Homolog of NCBI NO: 25317396 NR Description: GDP-mannose pyrophosphorylase like protein
  misc_feature (21)..(351): Homolog of NCBI NO: 15234771 NR Description: GDP-mannose pyrophosphorylase like protein;
MKALILVGGFGTRLRPLTLSLPKPLVDFANKPMILHQIEALKAIGVDEVVLAINYEPEQLLVMSKFSNDVEATLGIKITCSQETEPLGTAGPLALARDKLVDGSGQPFFVLNSDVISDYPLEEMIAFHNAHGGEASIMVTKVDEPSKYGVVVMEEATGRVERFVEKPKLFVGNKINAGIYLLNPSVLDRIELRPTSIEKEIFPQIAEAEKLYAMLLPGFWMDIGQPRDYITGLRLYLDSLRKKSPSKLATGPHILGNVLVDETAEIGEGCLIGPNVAIGPGCVVESGVRLSHCTVMRGVHVKRYACISSSIIGWHSTVGQWARVENMSILGKNVYVCDEIYCNGGVVLHNKEIKSDILKPDIVM

SEQ ID NO: 96918 - protein, 332 aa, Arabidopsis thaliana
  peptide (1)..(332): Ceres Seq. ID no. 12735152
  misc_feature (1)..(207): Pfam Name: Nucleotidyl transferase Pfam Description: Nucleotidyl transferase
  misc_feature (1)..(332): Homolog of NCBI NO: 15233308 NR Description: mannose-1-phosphate guanylyltransferase-like
  misc_feature (1)..(332): Homolog of NCBI NO: 15225553 NR Description: GDP-mannose pyrophosphorylase; protein id: supported by cDNA: 37775., supported by cDNA: gi_13605662, by cDNA: gi_15982867, supported by cDNA: gi_16226304, supported
  misc_feature (1)..(332): Homolog of NCBI NO: 13509287 NR Description: GDP-mannose pyrophosphorylase [Arabidopsis
  misc_feature (1)..(332): Homolog of NCBI NO: 4103324 NR Description: GDP-mannose pyrophosphorylase [Solanum tuberosum]
  misc_feature (1)..(332): Homolog of NCBI NO: 14971013 NR Description: GDP-D-mannose pyrophosphorylase [Nicotiana
  misc_feature (1)..(332): Homolog of NCBI NO: 34902046 NR Description: COG1208, GCD1, Nucleoside-diphosphate-sugar
  misc_feature (1)..(332): Homolog of NCBI NO: 34908274 NR Description: putative GDP-mannose pyrophosphorylase [Oryza
  misc_feature (1)..(332): Homolog of NCBI NO: 40253523 NR Description: putative GDP-mannose pyrophosphorylase [Oryza
  misc_feature (1)..(319): Homolog of NCBI NO: 25317396 NR Description: GDP-mannose pyrophosphorylase like protein
  misc_feature (1)..(319): Homolog of NCBI NO: 15234771 NR Description: GDP-mannose pyrophosphorylase like protein;
MILHQIEALKAIGVDEVVLAINYEPEQLLVMSKFSNDVEATLGIKITCSQETEPLGTAGPLALARDKLVDGSGQPFFVLNSDVISDYPLEEMIAFHNAHGGEASIMVTKVDEPSKYGVVVMEEATGRVERFVEKPKLFVGNKINAGIYLLNPSVLDRIELRPTSIEKEIFPQIAEAEKLYAMLLPGFWMDIGQPRDYITGLRLYLDSLRKKSPSKLATGPHILGNVLVDETAEIGEGCLIGPNVAIGPGCVVESGVRLSHCTVMRGVHVKRYACISSSIIGWHSTVGQWARVENMSILGKNVYVCDEIYCNGGVVLHNKEIKSDILKPDIVM

SEQ ID NO: 96919 - protein, 302 aa, Arabidopsis thaliana
  peptide (1)..(302): Ceres Seq. ID no. 12735153
  misc_feature (1)..(177): Pfam Name: Nucleotidyl transferase Pfam Description: Nucleotidyl transferase
  misc_feature (1)..(302): Homolog of NCBI NO: 15233308 NR Description: mannose-1-phosphate guanylyltransferase-like
  misc_feature (1)..(302): Homolog of NCBI NO: 15225553 NR Description: GDP-mannose pyrophosphorylase; protein id: supported by cDNA: 37775., supported by cDNA: gi_13605662, by cDNA: gi_15982867, supported by cDNA: gi_16226304, supported
  misc_feature (1)..(302): Homolog of NCBI NO: 13509287 NR Description: GDP-mannose pyrophosphorylase [Arabidopsis
  misc_feature (1)..(302): Homolog of NCBI NO: 4103324 NR Description: GDP-mannose pyrophosphorylase [Solanum tuberosum]
  misc_feature (1)..(302): Homolog of NCBI NO: 14971013 NR Description: GDP-D-mannose pyrophosphorylase [Nicotiana
  misc_feature (1)..(302): Homolog of NCBI NO: 34902046 NR Description: COG1208, GCD1, Nucleoside-diphosphate-sugar
  misc_feature (1)..(302): Homolog of NCBI NO: 34908274 NR Description: putative GDP-mannose pyrophosphorylase [Oryza
  misc_feature (1)..(302): Homolog of NCBI NO: 40253523 NR Description: putative GDP-mannose pyrophosphorylase [Oryza
  misc_feature (1)..(289): Homolog of NCBI NO: 25317396 NR Description: GDP-mannose pyrophosphorylase like protein
  misc_feature (1)..(289): Homolog of NCBI NO: 15234771 NR Description: GDP-mannose pyrophosphorylase like protein;
MSKFSNDVEATLGIKITCSQETEPLGTAGPLALARDKLVDGSGQPFFVLNSDVISDYPLEEMIAFHNAHGGEASIMVTKVDEPSKYGVVVMEEATGRVERFVEKPKLFVGNKINAGIYLLNPSVLDRIELRPTSIEKEIFPQIAEAEKLYAMLLPGFWMDIGQPRDYITGLRLYLDSLRKKSPSKLATGPHILGNVLVDETAEIGEGCLIGPNVAIGPGCVVESGVRLSHCTVMRGVHVKRYACISSSIIGWHSTVGQWARVENMSILGKNVYVCDEIYCNGGVVLHNKEIKSDILKPDIVM

SEQ ID NO: 96920 - DNA, 1653 bp, Arabidopsis thaliana
  misc_feature (1)..(1653): Ceres Seq. ID no. 12735158
  misc_feature: MA Experiment ID: 20000173 Result: Down-regulated in Transcription
  misc_feature: MA Experiment 20000173 PARAMETER Experiment Name: At_42deg_Heat_P Parameter: Age (day) Value: 14
  misc_feature: MA Experiment 20000173 PARAMETER Experiment Name: At_42deg_Heat_P Parameter: Organism Value: A. thaliana
  misc_feature: MA Experiment 20000173 PARAMETER Experiment Name: At_42deg_Heat_P Parameter: Plant Line Value: WS
  misc_feature: MA Experiment 20000173 PARAMETER Experiment Name: At_42deg_Heat_P Parameter: Temperature (deg C) Value: 42 vs. 22
  misc_feature: MA Experiment 20000173 PARAMETER Experiment Name: At_42deg_Heat_P Parameter: Timepoint (hr) Value: 6
  misc_feature: MA Experiment 20000173 PARAMETER Experiment Name: At_42deg_Heat_P Parameter: Tissue Value: Aerial
  misc_feature: MA Experiment ID: 20000182 Result: Down-regulated in Transcription
  misc_feature: MA Experiment 20000182 PARAMETER Experiment Name: At_2mM_SA_P Parameter: Age (day) Value: 14
  misc_feature: MA Experiment 20000182 PARAMETER Experiment Name: At_2mM_SA_P Parameter: Organism Value: A. thaliana
  misc_feature: MA Experiment 20000182 PARAMETER Experiment Name: At_2mM_SA_P Parameter: Plant Line Value: WS
  misc_feature: MA Experiment 20000182 PARAMETER Experiment Name: At_2mM_SA_P Parameter: Timepoint (hr) Value: 6
  misc_feature: MA Experiment 20000182 PARAMETER Experiment Name: At_2mM_SA_P Parameter: Tissue Value: Aerial
  misc_feature: MA Experiment 20000182 PARAMETER Experiment Name: At_2mM_SA_P Parameter: Treatment Value: 2mM SA vs. No Treatment
  misc_feature: MA Experiment ID: 20000185 Result: Down-regulated in Transcription
  misc_feature: MA Experiment 20000185 PARAMETER Experiment Name: At_Roots__P Parameter: Age (day) Value: 7 vs. 21
  misc_feature: MA Experiment 20000185 PARAMETER Experiment Name: At_Roots__P Parameter: Organism Value: A. thaliana
  misc_feature: MA Experiment 20000185 PARAMETER Experiment Name: At_Roots__P Parameter: Tissue Value: Roots vs. Whole Plant
  misc_feature: MA Experiment ID: 20000234 Result: Up-regulated in Transcription
  misc_feature: MA Experiment 20000234 PARAMETER Experiment Name: At_Siliques_P Parameter: Age (day) Value: 21
  misc_feature: MA Experiment 20000234 PARAMETER Experiment Name: At_Siliques_P Parameter: Organism Value: A. thaliana
  misc_feature: MA Experiment 20000234 PARAMETER Experiment Name: At_Siliques_P Parameter: Plant Line Value: WS
  misc_feature: MA Experiment 20000234 PARAMETER Experiment Name: At_Siliques_P Parameter: Tissue Value: Less Than 5mm Siliques vs. Whole Plant
  misc_feature: MA Experiment ID: 20000235 Result: Up-regulated in Transcription
  misc_feature: MA Experiment 20000235 PARAMETER Experiment Name: At_Siliques_P Parameter: Age (day) Value: 21
  misc_feature: MA Experiment 20000235 PARAMETER Experiment Name: At_Siliques_P Parameter: Organism Value: A. thaliana
  misc_feature: MA Experiment 20000235 PARAMETER Experiment Name: At_Siliques_P Parameter: Plant Line Value: WS
  misc_feature: MA Experiment 20000235 PARAMETER Experiment Name: At_Siliques_P Parameter: Tissue Value: 5-10mm Siliques vs. Whole Plant
  misc_feature: MA Experiment ID: 20000436 Result: Down-regulated in Transcription
  misc_feature: MA Experiment 20000436 PARAMETER Experiment Name: At_Drought_P Parameter: Age (day) Value: 7
  misc_feature: MA Experiment 20000436 PARAMETER Experiment Name: At_Drought_P Parameter: Organism Value: A. thaliana
  misc_feature: MA Experiment 20000436 PARAMETER Experiment Name: At_Drought_P Parameter: Plant Line Value: WS
  misc_feature: MA Experiment 20000436 PARAMETER Experiment Name: At_Drought_P Parameter: Timepoint (hr) Value: 12
  misc_feature: MA Experiment 20000436 PARAMETER Experiment Name: At_Drought_P Parameter: Tissue Value: Whole Plant
  misc_feature: MA Experiment 20000436 PARAMETER Experiment Name: At_Drought_P Parameter: Treatment Value: Drought vs. No Drought
  misc_feature: MA Experiment ID: 20000437 Result: Down-regulated in Transcription
  misc_feature: MA Experiment 20000437 PARAMETER Experiment Name: At_Drought_P Parameter: Age (day) Value: 8
  misc_feature: MA Experiment 20000437 PARAMETER Experiment Name: At_Drought_P Parameter: Organism Value: A. thaliana
  misc_feature: MA Experiment 20000437 PARAMETER Experiment Name: At_Drought_P Parameter: Plant Line Value: WS
  misc_feature: MA Experiment 20000437 PARAMETER Experiment Name: At_Drought_P Parameter: Timepoint (hr) Value: 24
  misc_feature: MA Experiment 20000437 PARAMETER Experiment Name: At_Drought_P Parameter: Tissue Value: Whole Plant
  misc_feature: MA Experiment 20000437 PARAMETER Experiment Name: At_Drought_P Parameter: Treatment Value: Drought vs. No Drought
  misc_feature: MA Experiment ID: 20000439 Result: Down-regulated in Transcription
  misc_feature: MA Experiment 20000439 PARAMETER Experiment Name: At_Roots__P Parameter: Age (day) Value: 14 vs. 21
  misc_feature: MA Experiment 20000439 PARAMETER Experiment Name: At_Roots__P Parameter: Organism Value: A. thaliana
  misc_feature: MA Experiment 20000439 PARAMETER Experiment Name: At_Roots__P Parameter: Tissue Value: Roots vs. Whole Plant
  misc_feature: MA Experiment ID: 20000527 Result: Up-regulated in Transcription
  misc_feature: MA Experiment 20000527 PARAMETER Experiment Name: At_10percent_PEG_P Parameter: Age (day) Value: 20
  misc_feature: MA Experiment 20000527 PARAMETER Experiment Name: At_10percent_PEG_P Parameter: Organism Value: A. thaliana
  misc_feature: MA Experiment 20000527 PARAMETER Experiment Name: At_10percent_PEG_P Parameter: Plant Line Value: WS
  misc_feature: MA Experiment 20000527 PARAMETER Experiment Name: At_10percent_PEG_P Parameter: Timepoint (day) Value: 20
  misc_feature: MA Experiment 20000527 PARAMETER Experiment Name: At_10percent_PEG_P Parameter: Tissue Value: Whole Plant
  misc_feature: MA Experiment 20000527 PARAMETER Experiment Name: At_10percent_PEG_P Parameter: Treatment Value: 10percent PEG vs. No Treatment
  misc_feature: MA Experiment ID: 20001247 Result: Down-regulated in Transcription
  misc_feature: MA Experiment 20001247 PARAMETER Experiment Name: At_Far-red-induction_P Parameter: Age (day) Value: 7
  misc_feature: MA Experiment 20001247 PARAMETER Experiment Name: At_Far-red-induction_P Parameter: Light Value: Far-red vs. White
  misc_feature: MA Experiment 20001247 PARAMETER Experiment Name: At_Far-red-induction_P Parameter: Organism Value: A. thaliana
  misc_feature: MA Experiment 20001247 PARAMETER Experiment Name: At_Far-red-induction_P Parameter: Plant Line Value: Columbia
  misc_feature: MA Experiment 20001247 PARAMETER Experiment Name: At_Far-red-induction_P Parameter: Timepoint (hr) Value: 1
  misc_feature: MA Experiment 20001247 PARAMETER Experiment Name: At_Far-red-induction_P Parameter: Tissue Value: Whole Plant
  misc_feature: MA Experiment ID: 20001248 Result: Down-regulated in Transcription
  misc_feature: MA Experiment 20001248 PARAMETER Experiment Name: At_Far-red-induction_P Parameter: Age (day) Value: 7
  misc_feature: MA Experiment 20001248 PARAMETER Experiment Name: At_Far-red-induction_P Parameter: Light Value: Far-red vs. White
  misc_feature: MA Experiment 20001248 PARAMETER Experiment Name: At_Far-red-induction_P Parameter: Organism Value: A. thaliana
  misc_feature: MA Experiment 20001248 PARAMETER Experiment Name: At_Far-red-induction_P Parameter: Plant Line Value: Columbia
  misc_feature: MA Experiment 20001248 PARAMETER Experiment Name: At_Far-red-induction_P Parameter: Timepoint (hr) Value: 4
  misc_feature: MA Experiment 20001248 PARAMETER Experiment Name: At_Far-red-induction_P Parameter: Tissue Value: Whole Plant
  misc_feature: MA Experiment ID: 20001450 Result: Down-regulated in Transcription
  misc_feature: MA Experiment 20001450 PARAMETER Experiment Name: At_Far-red-induction_P Parameter: Age (day) Value: 7
  misc_feature: MA Experiment 20001450 PARAMETER Experiment Name: At_Far-red-induction_P Parameter: Light Value: Far-red vs. White
  misc_feature: MA Experiment 20001450 PARAMETER Experiment Name: At_Far-red-induction_P Parameter: Organism Value: A. thaliana
  misc_feature: MA Experiment 20001450 PARAMETER Experiment Name: At_Far-red-induction_P Parameter: Plant Line Value: Columbia
  misc_feature: MA Experiment 20001450 PARAMETER Experiment Name: At_Far-red-induction_P Parameter: Timepoint (hr) Value: 8
  misc_feature: MA Experiment 20001450 PARAMETER Experiment Name: At_Far-red-induction_P Parameter: Tissue Value: Whole Plant
  misc_feature: MA Experiment ID: 20001557 Result: Down-regulated in Transcription
  misc_feature: MA Experiment 20001557 PARAMETER Experiment Name: At_Drought_Soil_Dry_P Parameter: Age (day) Value: 27
  misc_feature: MA Experiment 20001557 PARAMETER Experiment Name: At_Drought_Soil_Dry_P Parameter: Organism Value: A. thaliana
  misc_feature: MA Experiment 20001557 PARAMETER Experiment Name: At_Drought_Soil_Dry_P Parameter: Plant Line Value: WS
  misc_feature: MA Experiment 20001557 PARAMETER Experiment Name: At_Drought_Soil_Dry_P Parameter: Post Timepoint (hr) Value: 3
  misc_feature: MA Experiment 20001557 PARAMETER Experiment Name: At_Drought_Soil_Dry_P Parameter: Post-Treatment Value: Re-Water vs. No Drought
  misc_feature: MA Experiment 20001557 PARAMETER Experiment Name: At_Drought_Soil_Dry_P Parameter: Timepoint (day) Value: 13
  misc_feature: MA Experiment 20001557 PARAMETER Experiment Name: At_Drought_Soil_Dry_P Parameter: Treatment Value: Drought vs. No Drought
  misc_feature: MA Experiment ID: 20001757 Result: Up-regulated in Transcription
  misc_feature: MA Experiment 20001757 PARAMETER Experiment Name: At_50mM_NH4NO3_L-to-H_P Parameter: Timepoint (hr) Value: 6
  misc_feature: MA Experiment 20001757 PARAMETER Experiment Name: At_50mM_NH4NO3_L-to-H_P Parameter: Tissue Value: Leaf
  misc_feature: MA Experiment 20001757 PARAMETER Experiment Name: At_50mM_NH4NO3_L-to-H_P Parameter: Treatment Value: 50mM NH4NO3 vs 100mM Mannitol
  misc_feature: MA Experiment ID: 20001904 Result: Down-regulated in Transcription
  misc_feature: MA Experiment 20001904 PARAMETER Experiment Name: At_Drought_Reproduction_P Parameter: Age (day) Value: 37
  misc_feature: MA Experiment 20001904 PARAMETER Experiment Name: At_Drought_Reproduction_P Parameter: Organism Value: A. thaliana
  misc_feature: MA Experiment 20001904 PARAMETER Experiment Name: At_Drought_Reproduction_P Parameter: Plant Line Value: WS
  misc_feature: MA Experiment 20001904 PARAMETER Experiment Name: At_Drought_Reproduction_P Parameter: Timepoint (day) Value: 7
  misc_feature: MA Experiment 20001904 PARAMETER Experiment Name: At_Drought_Reproduction_P Parameter: Tissue Value: Rosettes
  misc_feature: MA Experiment 20001904 PARAMETER Experiment Name: At_Drought_Reproduction_P Parameter: Treatment Value: Drought vs. No Drought
  misc_feature: MA Experiment ID: 20001906 Result: Down-regulated in Transcription
  misc_feature: MA Experiment 20001906 PARAMETER Experiment Name: At_Drought_Reproduction_P Parameter: Age (day) Value: 35
  misc_feature: MA Experiment 20001906 PARAMETER Experiment Name: At_Drought_Reproduction_P Parameter: Organism Value: A. thaliana
  misc_feature: MA Experiment 20001906 PARAMETER Experiment Name: At_Drought_Reproduction_P Parameter: Plant Line Value: WS
  misc_feature: MA Experiment 20001906 PARAMETER Experiment Name: At_Drought_Reproduction_P Parameter: Timepoint (day) Value: 5
  misc_feature: MA Experiment 20001906 PARAMETER Experiment Name: At_Drought_Reproduction_P Parameter: Tissue Value: Siliques
  misc_feature: MA Experiment 20001906 PARAMETER Experiment Name: At_Drought_Reproduction_P Parameter: Treatment Value: Drought vs. No Drought
  misc_feature: MA Experiment ID: 20001908 Result: Down-regulated in Transcription
  misc_feature: MA Experiment 20001908 PARAMETER Experiment Name: At_Drought_Reproduction_P Parameter: Age (day) Value: 40
  misc_feature: MA Experiment 20001908 PARAMETER Experiment Name: At_Drought_Reproduction_P Parameter: Organism Value: A. thaliana
  misc_feature: MA Experiment 20001908 PARAMETER Experiment Name: At_Drought_Reproduction_P Parameter: Plant Line Value: WS
  misc_feature: MA Experiment 20001908 PARAMETER Experiment Name: At_Drought_Reproduction_P Parameter: Timepoint (day) Value: 10
  misc_feature: MA Experiment 20001908 PARAMETER Experiment Name: At_Drought_Reproduction_P Parameter: Tissue Value: Siliques
  misc_feature: MA Experiment 20001908 PARAMETER Experiment Name: At_Drought_Reproduction_P Parameter: Treatment Value: Drought vs. No Drought
aatctctaaacccatttctctacgattagagaagctgacatcaaaattgaaacttgggaaatttttggatttgttcttcttctatggcaactgaagacgatggtgaattgtcagctcgttaccagaacacgttggatgcattgtcgtctttgatcacaaaacgtggccgtttagctagtaacaaccaatctcaccgattccgtttgctctttcattatctcaaggttcttgagcttgaagatgcagtttcacaaatgaaaatcattcatgtggccggaactaaaggaaagggatcaacatgtacatttgcggagtctattcttcgttgttacggtcttcgaactggtctcttcacatctcctcacttaatcgatgtccgagagagattccgtcttaacggcattgagataagccaggagaaatttgtgaactacttttggtgttgctttcataagctcaaggagaaaaccagcaatgaggttccaatgcctacttatttctgcttccttgctttattagctttcaagattttcacaacagaacaggttgatgttgttatactagaagttggcttaggtgggagattcgatgcgactaatattcagaaacctgtcgtctgtggtatttcttctctagggtatgaccatatggagattcttggatacacacttgctgaaattgctgcagagaaagccggtatcttcaagagtggagttcctgcttttacagtggctcaacctgatgaagcaatgcgtgtactcaatgaaaaagcttcaaaattggaggtgaatcttcaggtggtggaaccgttggactcaagccagagactcgggcttcaaggcgaacatcaatatctaaacgctggtcttgctgttgcgttgtgctctacatttcttaaagagattggtattgaggacaagaatggtttggatcagacaaacggtttacccgaaaaattcatctctggattgtcaaatgcttatttgatgggacgagctatgatagtgcctgattcagaactccctgaagagattgtgtattaccttgatggagctcatagtcctgaaagcatggaagcttgcgctatatggttttcaaaacagatcaaacaaaaccaagaaagaaaccagaaaagatcagagcagatactcttgttcaattgtatgtctgttcgtgacccgagtttgcttcttccgcgattaaggagtaaatgcattgatcaaggagttgatttcaagagagccgtttttgtgccaaacgtatcagtgtacaaccaagtgggatcttcgacaaacgttggcacacgtgtcgagtcgatgtcgtggcagttcggtcttcagaggatttgggagagtttagctcgaggtgaagcaaaatctaattcaaaaagtgattctaaaggcaaagaagaagagaagagtttcgttttctcgtcacttcctgtggctgttgactggctccgggacaatgctcgccaaagtaaacaagttcgttttcaggtgttggtaactggttcattacatttggtgggtgatctcttgagatttatcaagaaatgaatatgtttctgccatgtattcttggccaatctttgcctgtaatgactatatatctcacaacatgatttaacaaaagaaaagaaaagatatttcg

SEQ ID NO: 96921 - protein, 491 aa, Arabidopsis thaliana
  peptide (1)..(491): Ceres Seq. ID no. 12735159
  misc_feature (317)..(402): Pfam Name: Mur ligase family, glutamate ligase domain Pfam Description: Mur ligase family, glutamate ligase domain
  misc_feature (1)..(491): Homolog of NCBI NO: 30694286 NR Description: folylpolyglutamate-dihydrofolate synthase [Arabidopsis thaliana] >gi|15292867|gb|AAK92804.1| putative synthase precursor [Arabidopsis thaliana]
  misc_feature (1)..(491): Homolog of NCBI NO: 30694288 NR Description: folylpolyglutamate-dihydrofolate synthase
  misc_feature (1)..(473): Homolog of NCBI NO: 11358877 NR Description: tetrahydrofolylpolyglutamate synthase-like
  misc_feature (138)..(491): Homolog of NCBI NO: 30694284 NR Description: folylpolyglutamate-dihydrofolate synthase
  misc_feature (1)..(133): Homolog of NCBI NO: 30694284 NR Description: folylpolyglutamate-dihydrofolate synthase
  misc_feature (138)..(491): Homolog of NCBI NO: 21592378 NR Description: tetrahydrofolylpolyglutamate synthase
  misc_feature (1)..(133): Homolog of NCBI NO: 21592378 NR Description: tetrahydrofolylpolyglutamate synthase
  misc_feature (13)..(345): Homolog of NCBI NO: 30681208 NR Description: folylpolyglutamate synthase (fpgs2) [Arabidopsis
  misc_feature (353)..(491): Homolog of NCBI NO: 30681208 NR Description: folylpolyglutamate synthase (fpgs2) [Arabidopsis
  misc_feature (13)..(345): Homolog of NCBI NO: 17976705 NR Description: dihydrofolate synthetase /folylpolyglutamate
MATEDDGELSARYQNTLDALSSLITKRGRLASNNQSHRFRLLFHYLKVLELEDAVSQMKIIHVAGTKGKGSTCTFAESILRCYGLRTGLFTSPHLIDVRERFRLNGIEISQEKFVNYFWCCFHKLKEKTSNEVPMPTYFCFLALLAFKIFTTEQVDVVILEVGLGGRFDATNIQKPVVCGISSLGYDHMEILGYTLAEIAAEKAGIFKSGVPAFTVAQPDEAMRVLNEKASKLEVNLQVVEPLDSSQRLGLQGEHQYLNAGLAVALCSTFLKEIGIEDKNGLDQTNGLPEKFISGLSNAYLMGRAMIVPDSELPEEIVYYLDGAHSPESMEACAIWFSKQIKQNQERNQKRSEQILLFNCMSVRDPSLLLPRLRSKCIDQGVDFKRAVFVPNVSVYNQVGSSTNVGTRVESMSWQFGLQRIWESLARGEAKSNSKSDSKGKEEEKSFVFSSLPVAVDWLRDNARQSKQVRFQVLVTGSLHLVGDLLRFIKK

SEQ ID NO: 96922 - protein, 434 aa, Arabidopsis thaliana
  peptide (1)..(434): Ceres Seq. ID no. 12735160
  misc_feature (260)..(345): Pfam Name: Mur ligase family, glutamate ligase domain Pfam Description: Mur ligase family, glutamate ligase domain
  misc_feature (1)..(434): Homolog of NCBI NO: 30694286 NR Description: folylpolyglutamate-dihydrofolate synthase [Arabidopsis thaliana] >gi|15292867|gb|AAK92804.1| putative synthase precursor [Arabidopsis thaliana]
  misc_feature (1)..(434): Homolog of NCBI NO: 30694288 NR Description: folylpolyglutamate-dihydrofolate synthase
  misc_feature (1)..(416): Homolog of NCBI NO: 11358877 NR Description: tetrahydrofolylpolyglutamate synthase-like
  misc_feature (81)..(434): Homolog of NCBI NO: 30694284 NR Description: folylpolyglutamate-dihydrofolate synthase
  misc_feature (1)..(76): Homolog of NCBI NO: 30694284 NR Description: folylpolyglutamate-dihydrofolate synthase
  misc_feature (81)..(434): Homolog of NCBI NO: 21592378 NR Description: tetrahydrofolylpolyglutamate synthase
  misc_feature (1)..(76): Homolog of NCBI NO: 21592378 NR Description: tetrahydrofolylpolyglutamate synthase
  misc_feature (1)..(288): Homolog of NCBI NO: 30681208 NR Description: folylpolyglutamate synthase (fpgs2) [Arabidopsis
  misc_feature (296)..(434): Homolog of NCBI NO: 30681208 NR Description: folylpolyglutamate synthase (fpgs2) [Arabidopsis
  misc_feature (1)..(288): Homolog of NCBI NO: 17976705 NR Description: dihydrofolate synthetase /folylpolyglutamate
MKIIHVAGTKGKGSTCTFAESILRCYGLRTGLFTSPHLIDVRERFRLNGIEISQEKFVNYFWCCFHKLKEKTSNEVPMPTYFCFLALLAFKIFTTEQVDVVILEVGLGGRFDATNIQKPVVCGISSLGYDHMEILGYTLAEIAAEKAGIFKSGVPAFTVAQPDEAMRVLNEKASKLEVNLQVVEPLDSSQRLGLQGEHQYLNAGLAVALCSTFLKEIGIEDKNGLDQTNGLPEKFISGLSNAYLMGRAMIVPDSELPEEIVYYLDGAHSPESMEACAIWFSKQIKQNQERNQKRSEQILLFNCMSVRDPSLLLPRLRSKCIDQGVDFKRAVFVPNVSVYNQVGSSTNVGTRVESMSWQFGLQRIWESLARGEAKSNSKSDSKGKEEEKSFVFSSLPVAVDWLRDNARQSKQVRFQVLVTGSLHLVGDLLRFIKK

SEQ ID NO: 96923 - protein, 357 aa, Arabidopsis thaliana
  peptide (1)..(357): Ceres Seq. ID no. 12735161
  misc_feature (183)..(268): Pfam Name: Mur ligase family, glutamate ligase domain Pfam Description: Mur ligase family, glutamate ligase domain
  misc_feature (1)..(357): Homolog of NCBI NO: 30694286 NR Description: folylpolyglutamate-dihydrofolate synthase [Arabidopsis thaliana] >gi|15292867|gb|AAK92804.1| putative synthase precursor [Arabidopsis thaliana]
  misc_feature (1)..(357): Homolog of NCBI NO: 30694288 NR Description: folylpolyglutamate-dihydrofolate synthase
  misc_feature (1)..(339): Homolog of NCBI NO: 11358877 NR Description: tetrahydrofolylpolyglutamate synthase-like
  misc_feature (4)..(357): Homolog of NCBI NO: 30694284 NR Description: folylpolyglutamate-dihydrofolate synthase
  misc_feature (4)..(357): Homolog of NCBI NO: 21592378 NR Description: tetrahydrofolylpolyglutamate synthase
  misc_feature (1)..(211): Homolog of NCBI NO: 30681208 NR Description: folylpolyglutamate synthase (fpgs2) [Arabidopsis
  misc_feature (219)..(357): Homolog of NCBI NO: 30681208 NR Description: folylpolyglutamate synthase (fpgs2) [Arabidopsis
  misc_feature (1)..(211): Homolog of NCBI NO: 17976705 NR Description: dihydrofolate synthetase /folylpolyglutamate
  misc_feature (219)..(357): Homolog of NCBI NO: 17976705 NR Description: dihydrofolate synthetase /folylpolyglutamate
  misc_feature (1)..(357): Homolog of NCBI NO: 37535812 NR Description: putative folylpolyglutamate synthetase [Oryza
MPTYFCFLALLAFKIFTTEQVDVVILEVGLGGRFDATNIQKPVVCGISSLGYDHMEILGYTLAEIAAEKAGIFKSGVPAFTVAQPDEAMRVLNEKASKLEVNLQVVEPLDSSQRLGLQGEHQYLNAGLAVALCSTFLKEIGIEDKNGLDQTNGLPEKFISGLSNAYLMGRAMIVPDSELPEEIVYYLDGAHSPESMEACAIWFSKQIKQNQERNQKRSEQILLFNCMSVRDPSLLLPRLRSKCIDQGVDFKRAVFVPNVSVYNQVGSSTNVGTRVESMSWQFGLQRIWESLARGEAKSNSKSDSKGKEEEKSFVFSSLPVAVDWLRDNARQSKQVRFQVLVTGSLHLVGDLLRFIKK

SEQ ID NO: 96924 - DNA, 1395 bp, Arabidopsis thaliana
  misc_feature (1)..(1395): Ceres Seq. ID no. 12735166
  misc_feature: MA Experiment ID: 20000314 Result: Down-regulated in Transcription
  misc_feature: MA Experiment 20000314 PARAMETER Experiment Name: At_14day_Shoots-Roots_Sub_P Parameter: Age (day) Value: 14
  misc_feature: MA Experiment 20000314 PARAMETER Experiment Name: At_14day_Shoots-Roots_Sub_P Parameter: Organism Value: A. thaliana
  misc_feature: MA Experiment 20000314 PARAMETER Experiment Name: At_14day_Shoots-Roots_Sub_P Parameter: Plant Line Value: WS
  misc_feature: MA Experiment 20000314 PARAMETER Experiment Name: At_14day_Shoots-Roots_Sub_P Parameter: Tissue Value: Roots vs. Whole Plant
  misc_feature: MA Experiment ID: 20000315 Result: Down-regulated in Transcription
  misc_feature: MA Experiment 20000315 PARAMETER Experiment Name: At_14day_Shoots-Roots_Sub_P Parameter: Age (day) Value: 14
  misc_feature: MA Experiment 20000315 PARAMETER Experiment Name: At_14day_Shoots-Roots_Sub_P Parameter: Organism Value: A. thaliana
  misc_feature: MA Experiment 20000315 PARAMETER Experiment Name: At_14day_Shoots-Roots_Sub_P Parameter: Plant Line Value: WS
  misc_feature: MA Experiment 20000315 PARAMETER Experiment Name: At_14day_Shoots-Roots_Sub_P Parameter: Tissue Value: Shoots vs. Whole Plant
  misc_feature: MA Experiment ID: 20000355 Result: Up-regulated in Transcription
  misc_feature: MA Experiment 20000355 PARAMETER Experiment Name: At_Siliques_Sub_P Parameter: Age (day) Value: 21
  misc_feature: MA Experiment 20000355 PARAMETER Experiment Name: At_Siliques_Sub_P Parameter: Organism Value: A. thaliana
  misc_feature: MA Experiment 20000355 PARAMETER Experiment Name: At_Siliques_Sub_P Parameter: Plant Line Value: WS
  misc_feature: MA Experiment 20000355 PARAMETER Experiment Name: At_Siliques_Sub_P Parameter: Tissue Value: Less Than 5mm Siliques vs. Whole Plant
atggaagagagaaaagtgaagagaattatcatgttccctctaccgtttacaggacacttcaaccctatgatcgagcttgctggaatattccacaaccgtggcttctccgtcacgatactccacacttctttcaacttcccggatccttctcgccatccacagtttacttttcgaactatcactcacaaaaacgaaggagaagaagaccctctctctcaatcagaaacttcttcgggtaaggacctcgtcgtccttattagtctgctgaaacaatactacaccgagccgtctcttgcagaggaagtaggcgaaggagggacggtgtgttgtttggtctccgacgctctatgggggaggaacacggagattgtagcgaaagagattggagtgtgtacaatggtgatgaggactagtggtgcggcaacgttttgtgcttatacagctttccctctccttatagataagggttaccttcctatacaaggttctagattagatgagctagtgacagagcttccacctttgaaagtgaaggatcttcctgtaataaaaacgaaagagcctgagggactaaaccgaatacttaacgacatggtggaaggagccaagttatcttccggagtcgtatggaacacatttgaagatcttgaaagacattcactcatggattgtcgcagcaagttacaagttccgttgttcccaatcggaccgtttcacaaacatagaaccgatcttccaccgaagccaaagaacaaggacaaggacgatgatgaaatattaaccgattggcttaacaagcaagctccgcagtctgtggtctatgtgagttttggaagccttgcagctatagaagagaatgagtttttcgaaattgcttggggtctaagaaacagcgaactaccattcttgtgggtggttaggcccgggatggtccggggaaccgagtggcttgagtcattgccttgtgggtttttggaaaatattggtcatcagggaaaaattgtgaaatgggtgaatcaactagagacattggcccatcctgcggttggagcgttttggacgcactgtggatggaactcaacaatagagagcatatgtgaaggtgttccaatgatatgtacgccgtgtttctcggaccagcatgtgaacgcgaggtacatcgttgatgtatggcgagtcgggatgatgttagagagatgtaagatggaaaggacggagattgagaaggtagtaacaagtgtaatgatggagaatggagctggattgacagagatgtgtttggagttgaaagagaaagctaatgtttgcttaagtgaagatgggtcttcttccaagtatctagacaaacttgtcagtcatgtcctgtcttttgattcctcggcttttgcaagttaa

SEQ ID NO: 96925 - protein, 464 aa, Arabidopsis thaliana
  peptide (1)..(464): Ceres Seq. ID no. 12735167
  misc_feature (7)..(458): Pfam Name: UDP-glucoronosyl and UDP-glucosyl transferase Pfam Description: UDP-glucoronosyl and UDP-glucosyl transferase
  misc_feature (1)..(464): Homolog of NCBI NO: 15228176 NR Description: glucuronosyl transferase - like protein; protein At3g55710.1 [Arabidopsis thaliana] >gi|11258162|pir||T47710
  misc_feature (1)..(464): Homolog of NCBI NO: 15228174 NR Description: glucuronosyl transferase - like protein; protein
  misc_feature (11)..(464): Homolog of NCBI NO: 21593451 NR Description: glucuronosyl transferase-like protein
  misc_feature (1)..(457): Homolog of NCBI NO: 26452976 NR Description: unknown protein [Arabidopsis thaliana]
  misc_feature (1)..(457): Homolog of NCBI NO: 15229731 NR Description: glucosyl transferase, putative; protein id: [Arabidopsis thaliana] >gi|12321874|gb|AAG50970.1|AC073395_12
  misc_feature (1)..(454): Homolog of NCBI NO: 15239258 NR Description: glucuronosyl transferase-like protein; protein At5g05870.1 [Arabidopsis thaliana] >gi|10177560|dbj|BAB10792.1|
  misc_feature (1)..(457): Homolog of NCBI NO: 15239259 NR Description: glucuronosyl transferase-like protein; protein At5g05880.1 [Arabidopsis thaliana] >gi|10177561|dbj|BAB10793.1|
  misc_feature (7)..(456): Homolog of NCBI NO: 34897378 NR Description: putative UDP-glucosyltransferase [Oryza sativa
  misc_feature (7)..(456): Homolog of NCBI NO: 34900662 NR Description: glucuronosyl transferase-like protein [Oryza
  misc_feature (7)..(456): Homolog of NCBI NO: 33146633 NR Description: putative UDP-glucosyltransferase [Oryza sativa
MEERKVKRIIMFPLPFTGHFNPMIELAGIFHNRGFSVTILHTSFNFPDPSRHPQFTFRTITHKNEGEEDPLSQSETSSGKDLVVLISLLKQYYTEPSLAEEVGEGGTVCCLVSDALWGRNTEIVAKEIGVCTMVMRTSGAATFCAYTAFPLLIDKGYLPIQGSRLDELVTELPPLKVKDLPVIKTKEPEGLNRILNDMVEGAKLSSGVVWNTFEDLERHSLMDCRSKLQVPLFPIGPFHKHRTDLPPKPKNKDKDDDEILTDWLNKQAPQSVVYVSFGSLAAIEENEFFEIAWGLRNSELPFLWVVRPGMVRGTEWLESLPCGFLENIGHQGKIVKWVNQLETLAHPAVGAFWTHCGWNSTIESICEGVPMICTPCFSDQHVNARYIVDVWRVGMMLERCKMERTEIEKVVTSVMMENGAGLTEMCLELKEKANVCLSEDGSSSKYLDKLVSHVLSFDSSAFAS

SEQ ID NO: 96926 - protein, 454 aa, Arabidopsis thaliana
  peptide (1)..(454): Ceres Seq. ID no. 12735168
  misc_feature (1)..(448): Pfam Name: UDP-glucoronosyl and UDP-glucosyl transferase Pfam Description: UDP-glucoronosyl and UDP-glucosyl transferase
  misc_feature (1)..(454): Homolog of NCBI NO: 15228176 NR Description: glucuronosyl transferase - like protein; protein At3g55710.1 [Arabidopsis thaliana] >gi|11258162|pir||T47710
  misc_feature (1)..(454): Homolog of NCBI NO: 15228174 NR Description: glucuronosyl transferase - like protein; protein
  misc_feature (1)..(454): Homolog of NCBI NO: 21593451 NR Description: glucuronosyl transferase-like protein
  misc_feature (1)..(447): Homolog of NCBI NO: 26452976 NR Description: unknown protein [Arabidopsis thaliana]
  misc_feature (1)..(447): Homolog of NCBI NO: 15229731 NR Description: glucosyl transferase, putative; protein id: [Arabidopsis thaliana] >gi|12321874|gb|AAG50970.1|AC073395_12
  misc_feature (1)..(444): Homolog of NCBI NO: 15239258 NR Description: glucuronosyl transferase-like protein; protein At5g05870.1 [Arabidopsis thaliana] >gi|10177560|dbj|BAB10792.1|
  misc_feature (1)..(447): Homolog of NCBI NO: 15239259 NR Description: glucuronosyl transferase-like protein; protein At5g05880.1 [Arabidopsis thaliana] >gi|10177561|dbj|BAB10793.1|
  misc_feature (1)..(446): Homolog of NCBI NO: 34897378 NR Description: putative UDP-glucosyltransferase [Oryza sativa
  misc_feature (1)..(446): Homolog of NCBI NO: 34900662 NR Description: glucuronosyl transferase-like protein [Oryza
  misc_feature (1)..(446): Homolog of NCBI NO: 33146633 NR Description: putative UDP-glucosyltransferase [Oryza sativa
MFPLPFTGHFNPMIELAGIFHNRGFSVTILHTSFNFPDPSRHPQFTFRTITHKNEGEEDPLSQSETSSGKDLVVLISLLKQYYTEPSLAEEVGEGGTVCCLVSDALWGRNTEIVAKEIGVCTMVMRTSGAATFCAYTAFPLLIDKGYLPIQGSRLDELVTELPPLKVKDLPVIKTKEPEGLNRILNDMVEGAKLSSGVVWNTFEDLERHSLMDCRSKLQVPLFPIGPFHKHRTDLPPKPKNKDKDDDEILTDWLNKQAPQSVVYVSFGSLAAIEENEFFEIAWGLRNSELPFLWVVRPGMVRGTEWLESLPCGFLENIGHQGKIVKWVNQLETLAHPAVGAFWTHCGWNSTIESICEGVPMICTPCFSDQHVNARYIVDVWRVGMMLERCKMERTEIEKVVTSVMMENGAGLTEMCLELKEKANVCLSEDGSSSKYLDKLVSHVLSFDSSAFAS

SEQ ID NO: 96927 - protein, 442 aa, Arabidopsis thaliana
  peptide (1)..(442): Ceres Seq. ID no. 12735169
  misc_feature (1)..(436): Pfam Name: UDP-glucoronosyl and UDP-glucosyl transferase Pfam Description: UDP-glucoronosyl and UDP-glucosyl transferase
  misc_feature (1)..(442): Homolog of NCBI NO: 15228176 NR Description: glucuronosyl transferase - like protein; protein At3g55710.1 [Arabidopsis thaliana] >gi|11258162|pir||T47710
  misc_feature (1)..(442): Homolog of NCBI NO: 15228174 NR Description: glucuronosyl transferase - like protein; protein
  misc_feature (1)..(442): Homolog of NCBI NO: 21593451 NR Description: glucuronosyl transferase-like protein
  misc_feature (1)..(435): Homolog of NCBI NO: 26452976 NR Description: unknown protein [Arabidopsis thaliana]
  misc_feature (1)..(435): Homolog of NCBI NO: 15229731 NR Description: glucosyl transferase, putative; protein id: [Arabidopsis thaliana] >gi|12321874|gb|AAG50970.1|AC073395_12
  misc_feature (1)..(432): Homolog of NCBI NO: 15239258 NR Description: glucuronosyl transferase-like protein; protein At5g05870.1 [Arabidopsis thaliana] >gi|10177560|dbj|BAB10792.1|
  misc_feature (1)..(435): Homolog of NCBI NO: 15239259 NR Description: glucuronosyl transferase-like protein; protein At5g05880.1 [Arabidopsis thaliana] >gi|10177561|dbj|BAB10793.1|
  misc_feature (1)..(434): Homolog of NCBI NO: 34897378 NR Description: putative UDP-glucosyltransferase [Oryza sativa
  misc_feature (1)..(434): Homolog of NCBI NO: 34900662 NR Description: glucuronosyl transferase-like protein [Oryza
  misc_feature (1)..(434): Homolog of NCBI NO: 33146633 NR Description: putative UDP-glucosyltransferase [Oryza sativa
MIELAGIFHNRGFSVTILHTSFNFPDPSRHPQFTFRTITHKNEGEEDPLSQSETSSGKDLVVLISLLKQYYTEPSLAEEVGEGGTVCCLVSDALWGRNTEIVAKEIGVCTMVMRTSGAATFCAYTAFPLLIDKGYLPIQGSRLDELVTELPPLKVKDLPVIKTKEPEGLNRILNDMVEGAKLSSGVVWNTFEDLERHSLMDCRSKLQVPLFPIGPFHKHRTDLPPKPKNKDKDDDEILTDWLNKQAPQSVVYVSFGSLAAIEENEFFEIAWGLRNSELPFLWVVRPGMVRGTEWLESLPCGFLENIGHQGKIVKWVNQLETLAHPAVGAFWTHCGWNSTIESICEGVPMICTPCFSDQHVNARYIVDVWRVGMMLERCKMERTEIEKVVTSVMMENGAGLTEMCLELKEKANVCLSEDGSSSKYLDKLVSHVLSFDSSAFAS

SEQ ID NO: 96928 - DNA, 1054 bp, Arabidopsis thaliana
  misc_feature (1)..(1054): Ceres Seq. ID no. 12735170
  misc_feature: MA Experiment ID: 108434 Result: Up-regulated in Transcription
  misc_feature: MA Experiment 108434 PARAMETER Experiment Name: At_Root_Tips_cDNA_P Parameter: Tissue Value: Root Tips
  misc_feature: MA Experiment ID: 108435 Result: Down-regulated in Transcription
  misc_feature: MA Experiment 108435 PARAMETER Experiment Name: At_stm_Mutants_cDNA_P Parameter: Plant Line Value: wt Landsburg vs stm
  misc_feature: MA Experiment 108435 PARAMETER Experiment Name: At_stm_Mutants_cDNA_P Parameter: Tissue Value: Shoot Apical Meristem Region
  misc_feature: MA Experiment ID: 108461 Result: Up-regulated in Transcription
  misc_feature: MA Experiment 108461 PARAMETER Experiment Name: At_Germinating_Seeds_cDNA_P Parameter: Age (day) Value: 1 vs. 0
  misc_feature: MA Experiment 108461 PARAMETER Experiment Name: At_Germinating_Seeds_cDNA_P Parameter: Tissue Value: Germinating Seeds
  misc_feature: MA Experiment ID: 108462 Result: Up-regulated in Transcription
  misc_feature: MA Experiment 108462 PARAMETER Experiment Name: At_Germinating_Seeds_cDNA_P Parameter: Age (day) Value: 2 vs. 0
  misc_feature: MA Experiment 108462 PARAMETER Experiment Name: At_Germinating_Seeds_cDNA_P Parameter: Tissue Value: Germinating Seeds
  misc_feature: MA Experiment ID: 108488 Result: Up-regulated in Transcription
  misc_feature: MA Experiment ID: 108595 Result: Down-regulated in Transcription
  misc_feature: MA Experiment 108595 PARAMETER Experiment Name: At_Ler-pi_Ovule_cDNA_P Parameter: Plant Line Value: null
  misc_feature: MA Experiment ID: 20000069 Result: Down-regulated in Transcription
  misc_feature: MA Experiment 20000069 PARAMETER Experiment Name: At_100uM_ABA_Mutants_cDNA_P Parameter: Plant Line Value: CS23
  misc_feature: MA Experiment 20000069 PARAMETER Experiment Name: At_100uM_ABA_Mutants_cDNA_P Parameter: Timepoint (hr) Value: 6
  misc_feature: MA Experiment 20000069 PARAMETER Experiment Name: At_100uM_ABA_Mutants_cDNA_P Parameter: Tissue Value: Aerial
  misc_feature: MA Experiment 20000069 PARAMETER Experiment Name: At_100uM_ABA_Mutants_cDNA_P Parameter: Treatment Value: 100uM ABA vs. No Treatment
  misc_feature: MA Experiment ID: 20000070 Result: Down-regulated in Transcription
  misc_feature: MA Experiment 20000070 PARAMETER Experiment Name: At_100uM_ABA_Mutants_cDNA_P Parameter: Plant Line Value: CS24
  misc_feature: MA Experiment 20000070 PARAMETER Experiment Name: At_100uM_ABA_Mutants_cDNA_P Parameter: Timepoint (hr) Value: 6
  misc_feature: MA Experiment 20000070 PARAMETER Experiment Name: At_100uM_ABA_Mutants_cDNA_P Parameter: Tissue Value: Aerial
  misc_feature: MA Experiment 20000070 PARAMETER Experiment Name: At_100uM_ABA_Mutants_cDNA_P Parameter: Treatment Value: 100uM ABA vs. No Treatment
  misc_feature: MA Experiment ID: 20000071 Result: Down-regulated in Transcription
  misc_feature: MA Experiment 20000071 PARAMETER Experiment Name: At_100uM_ABA_Mutants_cDNA_P Parameter: Plant Line Value: CS8104
  misc_feature: MA Experiment 20000071 PARAMETER Experiment Name: At_100uM_ABA_Mutants_cDNA_P Parameter: Timepoint (hr) Value: 6
  misc_feature: MA Experiment 20000071 PARAMETER Experiment Name: At_100uM_ABA_Mutants_cDNA_P Parameter: Tissue Value: Aerial
  misc_feature: MA Experiment 20000071 PARAMETER Experiment Name: At_100uM_ABA_Mutants_cDNA_P Parameter: Treatment Value: 100uM ABA vs. No Treatment
  misc_feature: MA Experiment ID: 20000072 Result: Down-regulated in Transcription
  misc_feature: MA Experiment 20000072 PARAMETER Experiment Name: At_100uM_ABA_Mutants_cDNA_P Parameter: Plant Line Value: CS8105
  misc_feature: MA Experiment 20000072 PARAMETER Experiment Name: At_100uM_ABA_Mutants_cDNA_P Parameter: Timepoint (hr) Value: 6
  misc_feature: MA Experiment 20000072 PARAMETER Experiment Name: At_100uM_ABA_Mutants_cDNA_P Parameter: Tissue Value: Aerial
  misc_feature: MA Experiment 20000072 PARAMETER Experiment Name: At_100uM_ABA_Mutants_cDNA_P Parameter: Treatment Value: 100uM ABA vs. No Treatment
  misc_feature: MA Experiment ID: 20000086 Result: Down-regulated in Transcription
  misc_feature: MA Experiment 20000086 PARAMETER Experiment Name: At_100uM_ABA_Mutants_cDNA_P Parameter: Plant Line Value: CS22
  misc_feature: MA Experiment 20000086 PARAMETER Experiment Name: At_100uM_ABA_Mutants_cDNA_P Parameter: Timepoint (hr) Value: 6
  misc_feature: MA Experiment 20000086 PARAMETER Experiment Name: At_100uM_ABA_Mutants_cDNA_P Parameter: Tissue Value: Aerial
  misc_feature: MA Experiment 20000086 PARAMETER Experiment Name: At_100uM_ABA_Mutants_cDNA_P Parameter: Treatment Value: 100uM ABA vs. No Treatment
  misc_feature: MA Experiment ID: 20000087 Result: Down-regulated in Transcription
  misc_feature: MA Experiment 20000087 PARAMETER Experiment Name: At_100uM_ABA_Mutants_cDNA_P Parameter: Plant Line Value: WS
  misc_feature: MA Experiment 20000087 PARAMETER Experiment Name: At_100uM_ABA_Mutants_cDNA_P Parameter: Timepoint (hr) Value: 6
  misc_feature: MA Experiment 20000087 PARAMETER Experiment Name: At_100uM_ABA_Mutants_cDNA_P Parameter: Tissue Value: Aerial
  misc_feature: MA Experiment 20000087 PARAMETER Experiment Name: At_100uM_ABA_Mutants_cDNA_P Parameter: Treatment Value: 100uM ABA vs. No Treatment
  misc_feature: MA Experiment ID: 20000088 Result: Down-regulated in Transcription
  misc_feature: MA Experiment 20000088 PARAMETER Experiment Name: At_100uM_ABA_Mutants_cDNA_P Parameter: Plant Line Value: Landsberg
  misc_feature: MA Experiment 20000088 PARAMETER Experiment Name: At_100uM_ABA_Mutants_cDNA_P Parameter: Timepoint (hr) Value: 6
  misc_feature: MA Experiment 20000088 PARAMETER Experiment Name: At_100uM_ABA_Mutants_cDNA_P Parameter: Tissue Value: Aerial
  misc_feature: MA Experiment 20000088 PARAMETER Experiment Name: At_100uM_ABA_Mutants_cDNA_P Parameter: Treatment Value: 100uM ABA vs. No Treatment
  misc_feature: MA Experiment ID: 20000117 Result: Down-regulated in Transcription
  misc_feature: MA Experiment 20000117 PARAMETER Experiment Name: At_100uM_ABA_Mutants_cDNA_P Parameter: Plant Line Value: Columbia
  misc_feature: MA Experiment 20000117 PARAMETER Experiment Name: At_100uM_ABA_Mutants_cDNA_P Parameter: Timepoint (hr) Value: 6
  misc_feature: MA Experiment 20000117 PARAMETER Experiment Name: At_100uM_ABA_Mutants_cDNA_P Parameter: Tissue Value: Aerial
  misc_feature: MA Experiment 20000117 PARAMETER Experiment Name: At_100uM_ABA_Mutants_cDNA_P Parameter: Treatment Value: 100uM ABA vs. No Treatment
  misc_feature: MA Experiment ID: 20000185 Result: Down-regulated in Transcription
  misc_feature: MA Experiment 20000185 PARAMETER Experiment Name: At_Roots__P Parameter: Age (day) Value: 7 vs. 21
  misc_feature: MA Experiment 20000185 PARAMETER Experiment Name: At_Roots__P Parameter: Organism Value: A. thaliana
  misc_feature: MA Experiment 20000185 PARAMETER Experiment Name: At_Roots__P Parameter: Tissue Value: Roots vs. Whole Plant
  misc_feature: MA Experiment ID: 20000214 Result: Up-regulated in Transcription
  misc_feature: MA Experiment 20000214 PARAMETER Experiment Name: At_4deg_Cold_P Parameter: Timepoint (hr) Value: 6
  misc_feature: MA Experiment ID: 20000437 Result: Down-regulated in Transcription
  misc_feature: MA Experiment 20000437 PARAMETER Experiment Name: At_Drought_P Parameter: Age (day) Value: 8
  misc_feature: MA Experiment 20000437 PARAMETER Experiment Name: At_Drought_P Parameter: Organism Value: A. thaliana
  misc_feature: MA Experiment 20000437 PARAMETER Experiment Name: At_Drought_P Parameter: Plant Line Value: WS
  misc_feature: MA Experiment 20000437 PARAMETER Experiment Name: At_Drought_P Parameter: Timepoint (hr) Value: 24
  misc_feature: MA Experiment 20000437 PARAMETER Experiment Name: At_Drought_P Parameter: Tissue Value: Whole Plant
  misc_feature: MA Experiment 20000437 PARAMETER Experiment Name: At_Drought_P Parameter: Treatment Value: Drought vs. No Drought
  misc_feature: MA Experiment ID: 20000438 Result: Up-regulated in Transcription
  misc_feature: MA Experiment 20000438 PARAMETER Experiment Name: At_Shoots__P Parameter: Age (day) Value: 14
  misc_feature: MA Experiment 20000438 PARAMETER Experiment Name: At_Shoots__P Parameter: Tissue Value: Shoots vs. Whole Plant
  misc_feature: MA Experiment ID: 20000439 Result: Down-regulated in Transcription
  misc_feature: MA Experiment 20000439 PARAMETER Experiment Name: At_Roots__P Parameter: Age (day) Value: 14 vs. 21
  misc_feature: MA Experiment 20000439 PARAMETER Experiment Name: At_Roots__P Parameter: Organism Value: A. thaliana
  misc_feature: MA Experiment 20000439 PARAMETER Experiment Name: At_Roots__P Parameter: Tissue Value: Roots vs. Whole Plant
  misc_feature: MA Experiment ID: 20000453 Result: Down-regulated in Transcription
  misc_feature: MA Experiment 20000453 PARAMETER Experiment Name: At_100uM_ABA_P Parameter: Age (day) Value: 15
  misc_feature: MA Experiment 20000453 PARAMETER Experiment Name: At_100uM_ABA_P Parameter: Organism Value: A. thaliana
  misc_feature: MA Experiment 20000453 PARAMETER Experiment Name: At_100uM_ABA_P Parameter: Plant Line Value: WS
  misc_feature: MA Experiment 20000453 PARAMETER Experiment Name: At_100uM_ABA_P Parameter: Timepoint (hr) Value: 24
  misc_feature: MA Experiment 20000453 PARAMETER Experiment Name: At_100uM_ABA_P Parameter: Tissue Value: Aerial
  misc_feature: MA Experiment 20000453 PARAMETER Experiment Name: At_100uM_ABA_P Parameter: Treatment Value: 100uM ABA vs. No Treatment
  misc_feature: MA Experiment ID: 20000794 Result: Down-regulated in Transcription
  misc_feature: MA Experiment 20000794 PARAMETER Experiment Name: At_Petals_P Parameter: Age (day) Value: 23-25 days
  misc_feature: MA Experiment 20000794 PARAMETER Experiment Name: At_Petals_P Parameter: Plant Line Value: WS
  misc_feature: MA Experiment 20000794 PARAMETER Experiment Name: At_Petals_P Parameter: Tissue Value: Petals vs. Whole plant
  misc_feature: MA Experiment ID: 20001248 Result: Down-regulated in Transcription
  misc_feature: MA Experiment 20001248 PARAMETER Experiment Name: At_Far-red-induction_P Parameter: Age (day) Value: 7
  misc_feature: MA Experiment 20001248 PARAMETER Experiment Name: At_Far-red-induction_P Parameter: Light Value: Far-red vs. White
  misc_feature: MA Experiment 20001248 PARAMETER Experiment Name: At_Far-red-induction_P Parameter: Organism Value: A. thaliana
  misc_feature: MA Experiment 20001248 PARAMETER Experiment Name: At_Far-red-induction_P Parameter: Plant Line Value: Columbia
  misc_feature: MA Experiment 20001248 PARAMETER Experiment Name: At_Far-red-induction_P Parameter: Timepoint (hr) Value: 4
  misc_feature: MA Experiment 20001248 PARAMETER Experiment Name: At_Far-red-induction_P Parameter: Tissue Value: Whole Plant
  misc_feature: MA Experiment ID: 20001450 Result: Down-regulated in Transcription
  misc_feature: MA Experiment 20001450 PARAMETER Experiment Name: At_Far-red-induction_P Parameter: Age (day) Value: 7
  misc_feature: MA Experiment 20001450 PARAMETER Experiment Name: At_Far-red-induction_P Parameter: Light Value: Far-red vs. White
  misc_feature: MA Experiment 20001450 PARAMETER Experiment Name: At_Far-red-induction_P Parameter: Organism Value: A. thaliana
  misc_feature: MA Experiment 20001450 PARAMETER Experiment Name: At_Far-red-induction_P Parameter: Plant Line Value: Columbia
  misc_feature: MA Experiment 20001450 PARAMETER Experiment Name: At_Far-red-induction_P Parameter: Timepoint (hr) Value: 8
  misc_feature: MA Experiment 20001450 PARAMETER Experiment Name: At_Far-red-induction_P Parameter: Tissue Value: Whole Plant
  misc_feature: MA Experiment ID: 20001451 Result: Down-regulated in Transcription
  misc_feature: MA Experiment 20001451 PARAMETER Experiment Name: At_Far-red-induction_P Parameter: Age (day) Value: 7
  misc_feature: MA Experiment 20001451 PARAMETER Experiment Name: At_Far-red-induction_P Parameter: Light Value: Far-red vs. White
  misc_feature: MA Experiment 20001451 PARAMETER Experiment Name: At_Far-red-induction_P Parameter: Organism Value: A. thaliana
  misc_feature: MA Experiment 20001451 PARAMETER Experiment Name: At_Far-red-induction_P Parameter: Plant Line Value: Columbia
  misc_feature: MA Experiment 20001451 PARAMETER Experiment Name: At_Far-red-induction_P Parameter: Timepoint (hr) Value: 24
  misc_feature: MA Experiment 20001451 PARAMETER Experiment Name: At_Far-red-induction_P Parameter: Tissue Value: Whole Plant
  misc_feature: MA Experiment ID: 20001904 Result: Down-regulated in Transcription
  misc_feature: MA Experiment 20001904 PARAMETER Experiment Name: At_Drought_Reproduction_P Parameter: Age (day) Value: 37
  misc_feature: MA Experiment 20001904 PARAMETER Experiment Name: At_Drought_Reproduction_P Parameter: Organism Value: A. thaliana
  misc_feature: MA Experiment 20001904 PARAMETER Experiment Name: At_Drought_Reproduction_P Parameter: Plant Line Value: WS
  misc_feature: MA Experiment 20001904 PARAMETER Experiment Name: At_Drought_Reproduction_P Parameter: Timepoint (day) Value: 7
  misc_feature: MA Experiment 20001904 PARAMETER Experiment Name: At_Drought_Reproduction_P Parameter: Tissue Value: Rosettes
  misc_feature: MA Experiment 20001904 PARAMETER Experiment Name: At_Drought_Reproduction_P Parameter: Treatment Value: Drought vs. No Drought
  misc_feature: MA Experiment ID: 20001906 Result: Down-regulated in Transcription
  misc_feature: MA Experiment 20001906 PARAMETER Experiment Name: At_Drought_Reproduction_P Parameter: Age (day) Value: 35
  misc_feature: MA Experiment 20001906 PARAMETER Experiment Name: At_Drought_Reproduction_P Parameter: Organism Value: A. thaliana
  misc_feature: MA Experiment 20001906 PARAMETER Experiment Name: At_Drought_Reproduction_P Parameter: Plant Line Value: WS
  misc_feature: MA Experiment 20001906 PARAMETER Experiment Name: At_Drought_Reproduction_P Parameter: Timepoint (day) Value: 5
  misc_feature: MA Experiment 20001906 PARAMETER Experiment Name: At_Drought_Reproduction_P Parameter: Tissue Value: Siliques
  misc_feature: MA Experiment 20001906 PARAMETER Experiment Name: At_Drought_Reproduction_P Parameter: Treatment Value: Drought vs. No Drought
aacttaaaaaacaaggctcgaggcggttctcttatctgcaaaactaaagactgttgtctaaagcgaaccaacaaaaagtcttcatctttaatcattcaatggcttcttcgtcttctatgcagatggttcacacttcccgctccattgcccagattgggttcggtgttaagtcgcaattagtttctgcaaatcgaacaactcaatcagtttgctttggagctcgttcctctggaattgcattatcttcgagattgcactatgcatcacccattaagcaattttctggggtttatgcgaccaccaagcatcagagaaccgcttgtgttaaatccatggctgctgaggaagaagaagtaatcgaacctcaagctaaagtgacaaacaaggtttactttgatgtggaaattggaggtgaagttgctggcagaattgtgatgggtctctttggagaagttgtgcctaaaaccgttgaaaacttccgtgccttgtgtactggtgagaagaaatacgggtacaagggttcctctttccatcgtattattaaggatttcatgatccaaggaggtgatttcaccgagggaaatggtactggaggtattagtatttacggtgccaagttcgaagatgaaaacttcaccctgaagcatactggacctggaatcttgagcatggcaaacgctggtcctaatactaatggaagccagtttttcatttgtaccgtcaagacttcatggttagataacaagcatgtcgtgtttggacaagtaattgaaggtatgaagcttgttaggactcttgagtctcaagagactcgcgctttcgatgttcccaagaaaggttgtagaatctatgcctgcggagagctcccgttagatgcttgataatcactattgaccgatgcattgtctttgccatctttgttctgttttttgctattatgactattgaggaatccaaaccatcaaaaagccaaagattttcaaattctggtcttttatttattatatatttcggatacatgagttataagttcttttaatcgatgtgggattct

SEQ ID NO: 96929 - protein, 260 aa, Arabidopsis thaliana; identical to SEQ ID NO: 21204
  peptide (1)..(260): Ceres Seq. ID no. 12735171
  misc_feature (1)..(260): Homolog of NCBI NO: 15228674 NR Description: peptidylprolyl isomerase ROC4; protein id: supported by cDNA: 29220., supported by cDNA: gi_13358215, by cDNA: gi_16648946, supported by cDNA: gi_20259871, supported
  misc_feature (1)..(260): Homolog of NCBI NO: 11762200 NR Description: AT3g62030 [Arabidopsis thaliana]
  misc_feature (1)..(260): Homolog of NCBI NO: 21555831 NR Description: peptidylprolyl isomerase ROC4 [Arabidopsis
  misc_feature (87)..(259): Homolog of NCBI NO: 34902534 NR Description: putative peptidyl-prolyl cis-trans isomerase,
  misc_feature (48)..(259): Homolog of NCBI NO: 6014889 NR Description: Peptidyl-prolyl cis-trans isomerase, chloroplast
  misc_feature (36)..(258): Homolog of NCBI NO: 15240008 NR Description: peptidyl-prolyl isomerase protein; protein id: supported by cDNA: 620., supported by cDNA: gi_13605816, by cDNA: gi_16323327 [Arabidopsis thaliana]
  misc_feature (36)..(258): Homolog of NCBI NO: 21593963 NR Description: peptidylprolyl isomerase-like protein
  misc_feature (62)..(258): Homolog of NCBI NO: 37788308 NR Description: cyclophilin-like protein [Triticum aestivum]
  misc_feature (86)..(258): Homolog of NCBI NO: 9955556 NR Description: peptidylprolyl isomerase-like protein
  misc_feature (29)..(258): Homolog of NCBI NO: 37788312 NR Description: cyclophilin-like protein [Triticum aestivum]

SEQ ID NO: 96930 - protein, 254 aa, Arabidopsis thaliana; identical to SEQ ID NO: 21205
  peptide (1)..(254): Ceres Seq. ID no. 12735172
  misc_feature (1)..(254): Homolog of NCBI NO: 15228674 NR Description: peptidylprolyl isomerase ROC4; protein id: supported by cDNA: 29220., supported by cDNA: gi_13358215, by cDNA: gi_16648946, supported by cDNA: gi_20259871, supported
  misc_feature (1)..(254): Homolog of NCBI NO: 11762200 NR Description: AT3g62030 [Arabidopsis thaliana]
  misc_feature (1)..(254): Homolog of NCBI NO: 21555831 NR Description: peptidylprolyl isomerase ROC4 [Arabidopsis
  misc_feature (81)..(253): Homolog of NCBI NO: 34902534 NR Description: putative peptidyl-prolyl cis-trans isomerase,
  misc_feature (42)..(253): Homolog of NCBI NO: 6014889 NR Description: Peptidyl-prolyl cis-trans isomerase, chloroplast
  misc_feature (30)..(252): Homolog of NCBI NO: 15240008 NR Description: peptidyl-prolyl isomerase protein; protein id: supported by cDNA: 620., supported by cDNA: gi_13605816, by cDNA: gi_16323327 [Arabidopsis thaliana]
  misc_feature (30)..(252): Homolog of NCBI NO: 21593963 NR Description: peptidylprolyl isomerase-like protein
  misc_feature (56)..(252): Homolog of NCBI NO: 37788308 NR Description: cyclophilin-like protein [Triticum aestivum]
  misc_feature (80)..(252): Homolog of NCBI NO: 9955556 NR Description: peptidylprolyl isomerase-like protein
  misc_feature (23)..(252): Homolog of NCBI NO: 37788312 NR Description: cyclophilin-like protein [Triticum aestivum]

SEQ ID NO: 96931 - protein, 252 aa, Arabidopsis thaliana; identical to SEQ ID NO: 21206
  peptide (1)..(252): Ceres Seq. ID no. 12735173
  misc_feature (1)..(252): Homolog of NCBI NO: 15228674 NR Description: peptidylprolyl isomerase ROC4; protein id: supported by cDNA: 29220., supported by cDNA: gi_13358215, by cDNA: gi_16648946, supported by cDNA: gi_20259871, supported
  misc_feature (1)..(252): Homolog of NCBI NO: 11762200 NR Description: AT3g62030 [Arabidopsis thaliana]
  misc_feature (1)..(252): Homolog of NCBI NO: 21555831 NR Description: peptidylprolyl isomerase ROC4 [Arabidopsis
  misc_feature (79)..(251): Homolog of NCBI NO: 34902534 NR Description: putative peptidyl-prolyl cis-trans isomerase,
  misc_feature (40)..(251): Homolog of NCBI NO: 6014889 NR Description: Peptidyl-prolyl cis-trans isomerase, chloroplast
  misc_feature (28)..(250): Homolog of NCBI NO: 15240008 NR Description: peptidyl-prolyl isomerase protein; protein id: supported by cDNA: 620., supported by cDNA: gi_13605816, by cDNA: gi_16323327 [Arabidopsis thaliana]
  misc_feature (28)..(250): Homolog of NCBI NO: 21593963 NR Description: peptidylprolyl isomerase-like protein
  misc_feature (54)..(250): Homolog of NCBI NO: 37788308 NR Description: cyclophilin-like protein [Triticum aestivum]
  misc_feature (78)..(250): Homolog of NCBI NO: 9955556 NR Description: peptidylprolyl isomerase-like protein
  misc_feature (21)..(250): Homolog of NCBI NO: 37788312 NR Description: cyclophilin-like protein [Triticum aestivum]

SEQ ID NO: 96932 - DNA, 1431 bp, Arabidopsis thaliana
  misc_feature (1)..(1431): Ceres Seq. ID no. 12735272
  misc_feature: MA Experiment ID: 20000171 Result: Down-regulated in Transcription
  misc_feature: MA Experiment 20000171 PARAMETER Experiment Name: At_42deg_Heat_P Parameter: Age (day) Value: 14
  misc_feature: MA Experiment 20000171 PARAMETER Experiment Name: At_42deg_Heat_P Parameter: Organism Value: A. thaliana
  misc_feature: MA Experiment 20000171 PARAMETER Experiment Name: At_42deg_Heat_P Parameter: Plant Line Value: WS
  misc_feature: MA Experiment 20000171 PARAMETER Experiment Name: At_42deg_Heat_P Parameter: Temperature (deg C) Value: 42 vs. 22
  misc_feature: MA Experiment 20000171 PARAMETER Experiment Name: At_42deg_Heat_P Parameter: Timepoint (hr) Value: 1
  misc_feature: MA Experiment 20000171 PARAMETER Experiment Name: At_42deg_Heat_P Parameter: Tissue Value: Aerial
  misc_feature: MA Experiment ID: 20000173 Result: Down-regulated in Transcription
  misc_feature: MA Experiment 20000173 PARAMETER Experiment Name: At_42deg_Heat_P Parameter: Age (day) Value: 14
  misc_feature: MA Experiment 20000173 PARAMETER Experiment Name: At_42deg_Heat_P Parameter: Organism Value: A. thaliana
  misc_feature: MA Experiment 20000173 PARAMETER Experiment Name: At_42deg_Heat_P Parameter: Plant Line Value: WS
  misc_feature: MA Experiment 20000173 PARAMETER Experiment Name: At_42deg_Heat_P Parameter: Temperature (deg C) Value: 42 vs. 22
  misc_feature: MA Experiment 20000173 PARAMETER Experiment Name: At_42deg_Heat_P Parameter: Timepoint (hr) Value: 6
  misc_feature: MA Experiment 20000173 PARAMETER Experiment Name: At_42deg_Heat_P Parameter: Tissue Value: Aerial
  misc_feature: MA Experiment ID: 20000180 Result: Up-regulated in Transcription
  misc_feature: MA Experiment 20000180 PARAMETER Experiment Name: At_Germinating_Seeds_P Parameter: Age (hr) Value: 24 vs. 0
  misc_feature: MA Experiment 20000180 PARAMETER Experiment Name: At_Germinating_Seeds_P Parameter: Tissue Value: Germinating Seeds
  misc_feature: MA Experiment ID: 20000182 Result: Down-regulated in Transcription
  misc_feature: MA Experiment 20000182 PARAMETER Experiment Name: At_2mM_SA_P Parameter: Age (day) Value: 14
  misc_feature: MA Experiment 20000182 PARAMETER Experiment Name: At_2mM_SA_P Parameter: Organism Value: A. thaliana
  misc_feature: MA Experiment 20000182 PARAMETER Experiment Name: At_2mM_SA_P Parameter: Plant Line Value: WS
  misc_feature: MA Experiment 20000182 PARAMETER Experiment Name: At_2mM_SA_P Parameter: Timepoint (hr) Value: 6
  misc_feature: MA Experiment 20000182 PARAMETER Experiment Name: At_2mM_SA_P Parameter: Tissue Value: Aerial
  misc_feature: MA Experiment 20000182 PARAMETER Experiment Name: At_2mM_SA_P Parameter: Treatment Value: 2mM SA vs. No Treatment
  misc_feature: MA Experiment ID: 20000184 Result: Down-regulated in Transcription
  misc_feature: MA Experiment 20000184 PARAMETER Experiment Name: At_Shoots__P Parameter: Age (day) Value: 7
  misc_feature: MA Experiment 20000184 PARAMETER Experiment Name: At_Shoots__P Parameter: Tissue Value: Shoots vs. Whole Plant
  misc_feature: MA Experiment ID: 20000185 Result: Down-regulated in Transcription
  misc_feature: MA Experiment 20000185 PARAMETER Experiment Name: At_Roots__P Parameter: Age (day) Value: 7 vs. 21
  misc_feature: MA Experiment 20000185 PARAMETER Experiment Name: At_Roots__P Parameter: Organism Value: A. thaliana
  misc_feature: MA Experiment 20000185 PARAMETER Experiment Name: At_Roots__P Parameter: Tissue Value: Roots vs. Whole Plant
  misc_feature: MA Experiment ID: 20000234 Result: Down-regulated in Transcription
  misc_feature: MA Experiment 20000234 PARAMETER Experiment Name: At_Siliques_P Parameter: Age (day) Value: 21
  misc_feature: MA Experiment 20000234 PARAMETER Experiment Name: At_Siliques_P Parameter: Organism Value: A. thaliana
  misc_feature: MA Experiment 20000234 PARAMETER Experiment Name: At_Siliques_P Parameter: Plant Line Value: WS
  misc_feature: MA Experiment 20000234 PARAMETER Experiment Name: At_Siliques_P Parameter: Tissue Value: Less Than 5mm Siliques vs. Whole Plant
  misc_feature: MA Experiment ID: 20000265 Result: Up-regulated in Transcription
  misc_feature: MA Experiment 20000265 PARAMETER Experiment Name: At_Open_Flower_P Parameter: Age (day) Value: 21
  misc_feature: MA Experiment 20000265 PARAMETER Experiment Name: At_Open_Flower_P Parameter: Plant Line Value: WS
  misc_feature: MA Experiment 20000265 PARAMETER Experiment Name: At_Open_Flower_P Parameter: Tissue Value: Closed Flower vs. Whole Plant
  misc_feature: MA Experiment ID: 20000438 Result: Up-regulated in Transcription
  misc_feature: MA Experiment 20000438 PARAMETER Experiment Name: At_Shoots__P Parameter: Age (day) Value: 14
  misc_feature: MA Experiment 20000438 PARAMETER Experiment Name: At_Shoots__P Parameter: Tissue Value: Shoots vs. Whole Plant
  misc_feature: MA Experiment ID: 20000439 Result: Down-regulated in Transcription
  misc_feature: MA Experiment 20000439 PARAMETER Experiment Name: At_Roots__P Parameter: Age (day) Value: 14 vs. 21
  misc_feature: MA Experiment 20000439 PARAMETER Experiment Name: At_Roots__P Parameter: Organism Value: A. thaliana
  misc_feature: MA Experiment 20000439 PARAMETER Experiment Name: At_Roots__P Parameter: Tissue Value: Roots vs. Whole Plant
  misc_feature: MA Experiment ID: 20001248 Result: Down-regulated in Transcription
  misc_feature: MA Experiment 20001248 PARAMETER Experiment Name: At_Far-red-induction_P Parameter: Age (day) Value: 7
  misc_feature: MA Experiment 20001248 PARAMETER Experiment Name: At_Far-red-induction_P Parameter: Light Value: Far-red vs. White
  misc_feature: MA Experiment 20001248 PARAMETER Experiment Name: At_Far-red-induction_P Parameter: Organism Value: A. thaliana
  misc_feature: MA Experiment 20001248 PARAMETER Experiment Name: At_Far-red-induction_P Parameter: Plant Line Value: Columbia
  misc_feature: MA Experiment 20001248 PARAMETER Experiment Name: At_Far-red-induction_P Parameter: Timepoint (hr) Value: 4
  misc_feature: MA Experiment 20001248 PARAMETER Experiment Name: At_Far-red-induction_P Parameter: Tissue Value: Whole Plant
  misc_feature: MA Experiment ID: 20001451 Result: Down-regulated in Transcription
  misc_feature: MA Experiment 20001451 PARAMETER Experiment Name: At_Far-red-induction_P Parameter: Age (day) Value: 7
  misc_feature: MA Experiment 20001451 PARAMETER Experiment Name: At_Far-red-induction_P Parameter: Light Value: Far-red vs. White
  misc_feature: MA Experiment 20001451 PARAMETER Experiment Name: At_Far-red-induction_P Parameter: Organism Value: A. thaliana
  misc_feature: MA Experiment 20001451 PARAMETER Experiment Name: At_Far-red-induction_P Parameter: Plant Line Value: Columbia
  misc_feature: MA Experiment 20001451 PARAMETER Experiment Name: At_Far-red-induction_P Parameter: Timepoint (hr) Value: 24
  misc_feature: MA Experiment 20001451 PARAMETER Experiment Name: At_Far-red-induction_P Parameter: Tissue Value: Whole Plant
  misc_feature: MA Experiment ID: 20001557 Result: Down-regulated in Transcription
  misc_feature: MA Experiment 20001557 PARAMETER Experiment Name: At_Drought_Soil_Dry_P Parameter: Age (day) Value: 27
  misc_feature: MA Experiment 20001557 PARAMETER Experiment Name: At_Drought_Soil_Dry_P Parameter: Organism Value: A. thaliana
  misc_feature: MA Experiment 20001557 PARAMETER Experiment Name: At_Drought_Soil_Dry_P Parameter: Plant Line Value: WS
  misc_feature: MA Experiment 20001557 PARAMETER Experiment Name: At_Drought_Soil_Dry_P Parameter: Post Timepoint (hr) Value: 3
  misc_feature: MA Experiment 20001557 PARAMETER Experiment Name: At_Drought_Soil_Dry_P Parameter: Post-Treatment Value: Re-Water vs. No Drought
  misc_feature: MA Experiment 20001557 PARAMETER Experiment Name: At_Drought_Soil_Dry_P Parameter: Timepoint (day) Value: 13
  misc_feature: MA Experiment 20001557 PARAMETER Experiment Name: At_Drought_Soil_Dry_P Parameter: Treatment Value: Drought vs. No Drought
  misc_feature: MA Experiment ID: 20001904 Result: Down-regulated in Transcription
  misc_feature: MA Experiment 20001904 PARAMETER Experiment Name: At_Drought_Reproduction_P Parameter: Age (day) Value: 37
  misc_feature: MA Experiment 20001904 PARAMETER Experiment Name: At_Drought_Reproduction_P Parameter: Organism Value: A. thaliana
  misc_feature: MA Experiment 20001904 PARAMETER Experiment Name: At_Drought_Reproduction_P Parameter: Plant Line Value: WS
  misc_feature: MA Experiment 20001904 PARAMETER Experiment Name: At_Drought_Reproduction_P Parameter: Timepoint (day) Value: 7
  misc_feature: MA Experiment 20001904 PARAMETER Experiment Name: At_Drought_Reproduction_P Parameter: Tissue Value: Rosettes
  misc_feature: MA Experiment 20001904 PARAMETER Experiment Name: At_Drought_Reproduction_P Parameter: Treatment Value: Drought vs. No Drought
  misc_feature: MA Experiment ID: 20001905 Result: Down-regulated in Transcription
  misc_feature: MA Experiment 20001905 PARAMETER Experiment Name: At_Drought_Reproduction_P Parameter: Age (day) Value: 40
  misc_feature: MA Experiment 20001905 PARAMETER Experiment Name: At_Drought_Reproduction_P Parameter: Organism Value: A. thaliana
  misc_feature: MA Experiment 20001905 PARAMETER Experiment Name: At_Drought_Reproduction_P Parameter: Plant Line Value: WS
  misc_feature: MA Experiment 20001905 PARAMETER Experiment Name: At_Drought_Reproduction_P Parameter: Timepoint (day) Value: 10
  misc_feature: MA Experiment 20001905 PARAMETER Experiment Name: At_Drought_Reproduction_P Parameter: Tissue Value: Rosettes
  misc_feature: MA Experiment 20001905 PARAMETER Experiment Name: At_Drought_Reproduction_P Parameter: Treatment Value: Drought vs. No Drought
  misc_feature: MA Experiment ID: 20001906 Result: Down-regulated in Transcription
  misc_feature: MA Experiment 20001906 PARAMETER Experiment Name: At_Drought_Reproduction_P Parameter: Age (day) Value: 35
  misc_feature: MA Experiment 20001906 PARAMETER Experiment Name: At_Drought_Reproduction_P Parameter: Organism Value: A. thaliana
  misc_feature: MA Experiment 20001906 PARAMETER Experiment Name: At_Drought_Reproduction_P Parameter: Plant Line Value: WS
  misc_feature: MA Experiment 20001906 PARAMETER Experiment Name: At_Drought_Reproduction_P Parameter: Timepoint (day) Value: 5
  misc_feature: MA Experiment 20001906 PARAMETER Experiment Name: At_Drought_Reproduction_P Parameter: Tissue Value: Siliques
  misc_feature: MA Experiment 20001906 PARAMETER Experiment Name: At_Drought_Reproduction_P Parameter: Treatment Value: Drought vs. No Drought
  misc_feature: MA Experiment ID: 20001911 Result: Down-regulated in Transcription
  misc_feature: MA Experiment 20001911 PARAMETER Experiment Name: At_Drought_Reproduction_P Parameter: Age (day) Value: 40
  misc_feature: MA Experiment 20001911 PARAMETER Experiment Name: At_Drought_Reproduction_P Parameter: Organism Value: A. thaliana
  misc_feature: MA Experiment 20001911 PARAMETER Experiment Name: At_Drought_Reproduction_P Parameter: Plant Line Value: WS
  misc_feature: MA Experiment 20001911 PARAMETER Experiment Name: At_Drought_Reproduction_P Parameter: Timepoint (day) Value: 10
  misc_feature: MA Experiment 20001911 PARAMETER Experiment Name: At_Drought_Reproduction_P Parameter: Tissue Value: Flowers
  misc_feature: MA Experiment 20001911 PARAMETER Experiment Name: At_Drought_Reproduction_P Parameter: Treatment Value: Drought vs. No Drought
atgaaacatttcaatctgttatccattattctggttatcgttttggcgacaagctacattgatgccttcaccagaaacgattttccagaggatttcctcttcggagccggtacttctgcttatcagtgggaaggagctgctaatgaagacggaagaactcctagcgtctgggatacaacctcccactgttataatggaagtaatggagatatagcatgtgatgggtatcacaaatacaaggaagatgttaagttgatggcagaaatgggcttagaatcattcagattctctatctcctggtcaagacttatacctaatggaagaggacgcattaacccaaaaggtttattgttttacaagaatctcatcaaagagctacgaagccatggaatcgaacctcacgttacactttaccactacgatcttcctcagtctcttgaagatgaagaagactttacagcttttgcagatgtatgcttcagagagtttggggaggatgtgaagttatggactacaatcaacgaagctacaatcttcgcctttgctttttatggcaaagacgttaggtatggaaattgtactacaggaaattattgtatggaaacatatattgcaggccataacatgttgctagctcatgcctctgcttcaaatttgtataaactaaagtacaagagtaagcaaagaggatccataggccttagtatatttgcattggggttaactccttatacaaactccaaggacgatgaaatcgcaactcaaagagctaaagctttcctctatggatggatgttgaagcctttggtatttggggactatccggatgaaatgaagagaaccttgggatcgagattaccggttttctcagaggaagaatcagagcaagttaaaggatcatctgactttgtaggaattatacattacacgacagtttatgtcacaaaccagcccgcaccttatatctttcccagcagcactaacaaagacttctttacagacatgggcgcccactgggaactcttcatcattcgtggtaagtttgatgctgttccatggggtctggaaggtgttcttcagcatataaagcatcgctataacaatcctccaatctacattcttgaaaatggttcaccgatgaaacacgattcgatgctacaagacacaccaagagttgaatacattcaagcttacattggtgctgtcctcaacgctatcaagtatggtcatcctttttcaaattttagtcctcacgttggatataaaagcagcttcggaatgtactatgtcaattttagcgatcctggtcgcaagaggtcgccaaagctctctgcttcttggtacactggttttctcaatggtacaattgatgttgcttctcaagatatgactcagttgcagagaaatttctctggctcttcttcactgtaa

SEQ ID NO: 96933 - protein, 476 aa, Arabidopsis thaliana
  peptide (1)..(476): Ceres Seq. ID no. 12735273
  misc_feature (1)..(476): Homolog of NCBI NO: 22331910 NR Description: glycosyl hydrolase family 1; protein id:
  misc_feature (234)..(476): Homolog of NCBI NO: 11264268 NR Description: beta-glucosidase-like protein - Arabidopsis
  misc_feature (1)..(188): Homolog of NCBI NO: 11264268 NR Description: beta-glucosidase-like protein - Arabidopsis
  misc_feature (150)..(476): Homolog of NCBI NO: 18417073 NR Description: glycosyl hydrolase family 1; protein id: supported by cDNA: gi_15982821 [Arabidopsis thaliana] AT4g27830/T27E11_70 [Arabidopsis thaliana]
  misc_feature (1)..(198): Homolog of NCBI NO: 18417073 NR Description: glycosyl hydrolase family 1; protein id: supported by cDNA: gi_15982821 [Arabidopsis thaliana] AT4g27830/T27E11_70 [Arabidopsis thaliana]
  misc_feature (150)..(476): Homolog of NCBI NO: 7435451 NR Description: beta-glucosidase homolog T27E11.60 - Arabidopsis
  misc_feature (1)..(198): Homolog of NCBI NO: 7435451 NR Description: beta-glucosidase homolog T27E11.60 - Arabidopsis
  misc_feature (150)..(476): Homolog of NCBI NO: 30687750 NR Description: glycosyl hydrolase family 1 [Arabidopsis thaliana]
  misc_feature (1)..(198): Homolog of NCBI NO: 30687750 NR Description: glycosyl hydrolase family 1 [Arabidopsis thaliana]
  misc_feature (1)..(476): Homolog of NCBI NO: 15228847 NR Description: glycosyl hydrolase family 1; protein id:
MKHFNLLSIILVIVLATSYIDAFTRNDFPEDFLFGAGTSAYQWEGAANEDGRTPSVWDTTSHCYNGSNGDIACDGYHKYKEDVKLMAEMGLESFRFSISWSRLIPNGRGRINPKGLLFYKNLIKELRSHGIEPHVTLYHYDLPQSLEDEEDFTAFADVCFREFGEDVKLWTTINEATIFAFAFYGKDVRYGNCTTGNYCMETYIAGHNMLLAHASASNLYKLKYKSKQRGSIGLSIFALGLTPYTNSKDDEIATQRAKAFLYGWMLKPLVFGDYPDEMKRTLGSRLPVFSEEESEQVKGSSDFVGIIHYTTVYVTNQPAPYIFPSSTNKDFFTDMGAHWELFIIRGKFDAVPWGLEGVLQHIKHRYNNPPIYILENGSPMKHDSMLQDTPRVEYIQAYIGAVLNAIKYGHPFSNFSPHVGYKSSFGMYYVNFSDPGRKRSPKLSASWYTGFLNGTIDVASQDMTQLQRNFSGSSSL

SEQ ID NO: 96934 - protein, 391 aa, Arabidopsis thaliana
  peptide (1)..(391): Ceres Seq. ID no. 12735274
  misc_feature (1)..(391): Homolog of NCBI NO: 22331910 NR Description: glycosyl hydrolase family 1; protein id:
  misc_feature (149)..(391): Homolog of NCBI NO: 11264268 NR Description: beta-glucosidase-like protein - Arabidopsis
  misc_feature (1)..(103): Homolog of NCBI NO: 11264268 NR Description: beta-glucosidase-like protein - Arabidopsis
  misc_feature (65)..(391): Homolog of NCBI NO: 18417073 NR Description: glycosyl hydrolase family 1; protein id: supported by cDNA: gi_15982821 [Arabidopsis thaliana] AT4g27830/T27E11_70 [Arabidopsis thaliana]
  misc_feature (1)..(113): Homolog of NCBI NO: 18417073 NR Description: glycosyl hydrolase family 1; protein id: supported by cDNA: gi_15982821 [Arabidopsis thaliana] AT4g27830/T27E11_70 [Arabidopsis thaliana]
  misc_feature (65)..(391): Homolog of NCBI NO: 7435451 NR Description: beta-glucosidase homolog T27E11.60 - Arabidopsis
  misc_feature (1)..(113): Homolog of NCBI NO: 7435451 NR Description: beta-glucosidase homolog T27E11.60 - Arabidopsis
  misc_feature (65)..(391): Homolog of NCBI NO: 30687750 NR Description: glycosyl hydrolase family 1 [Arabidopsis thaliana]
  misc_feature (1)..(113): Homolog of NCBI NO: 30687750 NR Description: glycosyl hydrolase family 1 [Arabidopsis thaliana]
  misc_feature (1)..(391): Homolog of NCBI NO: 15228847 NR Description: glycosyl hydrolase family 1; protein id:
MAEMGLESFRFSISWSRLIPNGRGRINPKGLLFYKNLIKELRSHGIEPHVTLYHYDLPQSLEDEEDFTAFADVCFREFGEDVKLWTTINEATIFAFAFYGKDVRYGNCTTGNYCMETYIAGHNMLLAHASASNLYKLKYKSKQRGSIGLSIFALGLTPYTNSKDDEIATQRAKAFLYGWMLKPLVFGDYPDEMKRTLGSRLPVFSEEESEQVKGSSDFVGIIHYTTVYVTNQPAPYIFPSSTNKDFFTDMGAHWELFIIRGKFDAVPWGLEGVLQHIKHRYNNPPIYILENGSPMKHDSMLQDTPRVEYIQAYIGAVLNAIKYGHPFSNFSPHVGYKSSFGMYYVNFSDPGRKRSPKLSASWYTGFLNGTIDVASQDMTQLQRNFSGSSSL

SEQ ID NO: 96935 - protein, 388 aa, Arabidopsis thaliana
  peptide (1)..(388): Ceres Seq. ID no. 12735275
  misc_feature (1)..(388): Homolog of NCBI NO: 22331910 NR Description: glycosyl hydrolase family 1; protein id:
  misc_feature (146)..(388): Homolog of NCBI NO: 11264268 NR Description: beta-glucosidase-like protein - Arabidopsis
  misc_feature (1)..(100): Homolog of NCBI NO: 11264268 NR Description: beta-glucosidase-like protein - Arabidopsis
  misc_feature (62)..(388): Homolog of NCBI NO: 18417073 NR Description: glycosyl hydrolase family 1; protein id: supported by cDNA: gi_15982821 [Arabidopsis thaliana] AT4g27830/T27E11_70 [Arabidopsis thaliana]
  misc_feature (1)..(110): Homolog of NCBI NO: 18417073 NR Description: glycosyl hydrolase family 1; protein id: supported by cDNA: gi_15982821 [Arabidopsis thaliana] AT4g27830/T27E11_70 [Arabidopsis thaliana]
  misc_feature (62)..(388): Homolog of NCBI NO: 7435451 NR Description: beta-glucosidase homolog T27E11.60 - Arabidopsis
  misc_feature (1)..(110): Homolog of NCBI NO: 7435451 NR Description: beta-glucosidase homolog T27E11.60 - Arabidopsis
  misc_feature (62)..(388): Homolog of NCBI NO: 30687750 NR Description: glycosyl hydrolase family 1 [Arabidopsis thaliana]
  misc_feature (1)..(110): Homolog of NCBI NO: 30687750 NR Description: glycosyl hydrolase family 1 [Arabidopsis thaliana]
  misc_feature (1)..(388): Homolog of NCBI NO: 15228847 NR Description: glycosyl hydrolase family 1; protein id:
MGLESFRFSISWSRLIPNGRGRINPKGLLFYKNLIKELRSHGIEPHVTLYHYDLPQSLEDEEDFTAFADVCFREFGEDVKLWTTINEATIFAFAFYGKDVRYGNCTTGNYCMETYIAGHNMLLAHASASNLYKLKYKSKQRGSIGLSIFALGLTPYTNSKDDEIATQRAKAFLYGWMLKPLVFGDYPDEMKRTLGSRLPVFSEEESEQVKGSSDFVGIIHYTTVYVTNQPAPYIFPSSTNKDFFTDMGAHWELFIIRGKFDAVPWGLEGVLQHIKHRYNNPPIYILENGSPMKHDSMLQDTPRVEYIQAYIGAVLNAIKYGHPFSNFSPHVGYKSSFGMYYVNFSDPGRKRSPKLSASWYTGFLNGTIDVASQDMTQLQRNFSGSSSL

SEQ ID NO: 96936 - DNA, 4170 bp, Arabidopsis thaliana
  misc_feature (1)..(4170): Ceres Seq. ID no. 12735301
  misc_feature: MA Experiment ID: 20000495 Result: Down-regulated in Transcription
  misc_feature: MA Experiment 20000495 PARAMETER Experiment Name: At_Guard_Cells_P Parameter: Harvest Date Value: 8/2/2002
  misc_feature: MA Experiment 20000495 PARAMETER Experiment Name: At_Guard_Cells_P Parameter: Organism Value: A. thaliana
  misc_feature: MA Experiment 20000495 PARAMETER Experiment Name: At_Guard_Cells_P Parameter: Tissue Value: Guard Cells vs. Leaves
  misc_feature: MA Experiment ID: 20001451 Result: Up-regulated in Transcription
  misc_feature: MA Experiment 20001451 PARAMETER Experiment Name: At_Far-red-induction_P Parameter: Age (day) Value: 7
  misc_feature: MA Experiment 20001451 PARAMETER Experiment Name: At_Far-red-induction_P Parameter: Light Value: Far-red vs. White
  misc_feature: MA Experiment 20001451 PARAMETER Experiment Name: At_Far-red-induction_P Parameter: Organism Value: A. thaliana
  misc_feature: MA Experiment 20001451 PARAMETER Experiment Name: At_Far-red-induction_P Parameter: Plant Line Value: Columbia
  misc_feature: MA Experiment 20001451 PARAMETER Experiment Name: At_Far-red-induction_P Parameter: Timepoint (hr) Value: 24
  misc_feature: MA Experiment 20001451 PARAMETER Experiment Name: At_Far-red-induction_P Parameter: Tissue Value: Whole Plant
atggaggagtctgaacttgaagaaggagaggcttgctcttacaatattactaacgaatacgctggaagcatagaccctgataacgatctctcttacattctgagaatcttgaaactcttcttcttggttggggcgaaatatggtggctatggctctttcttgccaacttatcaacgttctcctgtttggtctcacccgaagacaccagcaaaacctcagagttctacagggactagatctccaaacaacttactaggggagtcccagagtggcaatgcagcttcgtctagtgttcctaaaaaggcaaaatctggtcttgcttcctctggaaaccccaaaaaatcagtgaaatctaagaaacctagttccagtgccagaatggaatctgcaactaagaaaccttgtgtcttcagtaagcagaattctctgaagcttcggataaagatggtaccagatggtttatctaccgaaaagaatgctgctgcaatatacagtggccttggacttgatgtgtcaccttctttgtccttagataacaatagtctttcaggtagtgaagggatgaatgaggagcctcagggttattctccaacggagtctcccaccagtattcttaatgtaatgacttcacttcctgtggatcattgtcagttcctatctcctctctctgaggatctgattcgattcattgaaagggaaaaatccgaaaagggatataagtatacatctccatccaggcttttcactgcgagttcttctgctatggcatacggtttggaacctcagaagtctggagagaaaccatcagtagagaagaaaaaaaagatggtggagaggagcagcttttctgctgagacaaatgtccgcagtaagaagggcctgtttgattcaactgatgccattaccaaggagtcaatggaaacaaacacattatatcctacatttgcggagaaagaaacagccagtagtaaattatttgatgcatccaaggaaaactacaatggcactgttaggggcgaaatggtgggtgatgtcgacagaaggttgtggggtctaactcgtcataaagatcttggggcgcatcatgagaatccaaagactatttctgctggaagtgttcgtgaagataaaaaggctaaacttggtgataatgaggcttcaggatacccaaggaaagttggcaaatacaaaggcagcaaagcttctgattcagtcaaaaaggaatcgagtgcatcaaaggcgaaaagtggtcataaagtggagctagaacatcctcttagaaagcagaagtatgaccagatagaacaggagccaccgtcttcatcaaagttcaaggaacagcaaacctctgttgtttttgagactaagctgaatggtcaagctgagaagaaggaagtggtagccgtgaaaccacaaagtgatagcaaaaaagccgaggacacttacaaagacttttttggagacataggggactctgaagaagaagaggaacaagacgtaaaagatttgcggatttcagaaaagggacttccgcccttagaagatatgcctgaaaaatcgagcttgccgctagtagaacctcagaacgttggtcctgaacccatgttgagaaaacttggttctgatgcttctcttccgaaagcaaatcccgtgatcatacaagaacattgggttgcttgtgacaaatgtggaaagtggcggcttcttccttttggcgtcttcccagaagaccttcctgagaaatggatgtgcacaatgcttaattggctgcctggagtgaactattgcaatgttcctgaagatgaaacaacgaaagcactgtatgcaatgtatcagatccctgtccctgagaaccaggcttcgatgcagagtaatcccagtggccctaagcctcagtttacccagggagatgacaacacaaagaagaagaaaaagggtttcaaaaagatagacaatggaatggataaagaaggtgctcgaactgcagaaactaacaagaccatccaaacatcgtcaagaaatggtattcaaaattcgcagggacttggcgacttggccgaggatgagaggcaaatacataaacagaaagagaaaggaaaagcagtggatcacctctctgatgagtcgaagagcttgaaggcgaataacaaaagaaaaacagatctagagagttctatgctggccaaaaaaatgaagatcgaaagttttctgtttcctgatgaatctgaatatggaaatggacgtcctacctcgagtagtggtgtccctatcacgtcagcagatataaagccaaagccccgagtctcctccaaaatgccaaaagaggaaggaggagcttcagacactggaaatagcaatagcactggggggattaaaaagaggaaactgagagaaagccatggttctaggatttacagtgagaacgaaaatcatgaacgaaagaaagctcgagttcgtaaagaagagaaggagcctagttattcacaaggcaatgggaagttggaaaagaaaaatagaagtcattcgaaaatagagtatgcaaatgttcagaactcaatcgcggcaacctcaagttcttctaagatttctgattctcataaacccagaaacagctcccgcgaagctaaatgttctcctgttgagtcggtgtcttcctcacctatgaggctttccaacccggagaaacgtatatctgtgagtaaaaagaaagaagaatcttatgatgctaacgtctttgcagcaggtagtttgaaaaaattctcagatggtgaaggtgaagatgatggtgggagtgatagatcgcagagtcagatgaaggataaacatggatcccatgagtcttctgtgcttgatatttgggataataaaggatctttgaaagcgaaagagcgcgctgatccttctctcgatgccaattttgaaaatggtggccacaagactttaccgcggaaactggatcatattctcggtgaaggaaaacagtctagcgatcatcatcgacgtagcaatgattccctggcaaagaagtcaggaaaaggttcatcttctcggtccaaagaaaagagccaaagcattaggtctgattcacgggatggtccgagacatattgaaaagaagatatatgatggtagtcctgacagtagagcggatatgatcgtgagaccaaacattccaaaaccgcacgactccgaaagaataccagagaggagtaatatagcagatttagcttctccatcacggccaccatctagaggtgtccaaggggattcctctatgctttctgtccgtaagaaagtcgataaatgcagcacatcagctggaaataataatatccaagctgatgatgtgacaaaggcaacagcccaaataagaaggaaaagcgagccttctccaagccccttgcgaaaggaaataacatctgcgcaggccgcccataatactttaaaagaagctaaagacttgaaacatacagctgaccgtctcaagaattctgtatcaaaccttgagcacattgagctctacttccaagcttgccttaagtttcttcacggtgcttttcttttggagatgagtagcaacgagagtgctagacaaggagaaacaatggtccaatctatgaagatttatagtagcactgcgaatctttgcggattttgtgcccatgagtatgagaagtctaaagatatgggagctgctgccctggcttacaaatgcatggaggtcgcgtatatgagagtggttaattcctcctacaccagtgctaatagatatcgaaatgaattgcagacttctctacaaatggttccgccaggtgaatctccttcttcatctgcctcggatgttgataacgtgaaccatccagcagcagtagacagagttggtacctcaaggggcatcagttctcctttagttgctgggaaccacgtcatttctgcacaaaaccgttctaatctcttacgtctgcttcaatttgctcaggacgtaaatctgtcaatggatgcctcgaggaaatcacgtgtggcattaacagcttgtattgaaaactcaggggaggcccaacaacaaggagagggtataatatctattaaaagcgcccttgattataacttccaagacatggagggattgctacgtttagtgaagcttgctatgaaggccaacaaccggtga

SEQ ID NO: 96937 - protein, 1389 aa, Arabidopsis thaliana
  peptide (1)..(1389): Ceres Seq. ID no. 12735302
  misc_feature (600)..(914): Pfam Name: Lipoprotein amino terminal region Pfam Description: Lipoprotein amino terminal region
  misc_feature (684)..(1389): Homolog of NCBI NO: 25518543 NR Description: hypothetical protein F22D16.1 - Arabidopsis >gi|6056403|gb|AAF02867.1|AC009525_1 Hypothetical protein
  misc_feature (17)..(494): Homolog of NCBI NO: 25518543 NR Description: hypothetical protein F22D16.1 - Arabidopsis >gi|6056403|gb|AAF02867.1|AC009525_1 Hypothetical protein
  misc_feature (638)..(1386): Homolog of NCBI NO: 34899330 NR Description: contains ESTs AU056898(S20963)~similar to Arabidopsis thaliana chromosome3,
  misc_feature (43)..(528): Homolog of NCBI NO: 34899330 NR Description: contains ESTs AU056898(S20963)~similar to Arabidopsis thaliana chromosome3,
  misc_feature (1126)..(1386): Homolog of NCBI NO: 30683379 NR Description: expressed protein [Arabidopsis thaliana] unknown protein [Arabidopsis thaliana]
  misc_feature (520)..(732): Homolog of NCBI NO: 30683379 NR Description: expressed protein [Arabidopsis thaliana] unknown protein [Arabidopsis thaliana]
  misc_feature (761)..(903): Homolog of NCBI NO: 30683379 NR Description: expressed protein [Arabidopsis thaliana] unknown protein [Arabidopsis thaliana]
  misc_feature (520)..(732): Homolog of NCBI NO: 7452411 NR Description: hypothetical protein dl3905c - Arabidopsis >gi|2244929|emb|CAB10351.1| hypothetical protein [Arabidopsis >gi|7268321|emb|CAB78615.1| hypothetical protein [Arabidopsis
  misc_feature (1203)..(1386): Homolog of NCBI NO: 7452411 NR Description: hypothetical protein dl3905c - Arabidopsis >gi|2244929|emb|CAB10351.1| hypothetical protein [Arabidopsis >gi|7268321|emb|CAB78615.1| hypothetical protein [Arabidopsis
  misc_feature (761)..(903): Homolog of NCBI NO: 7452411 NR Description: hypothetical protein dl3905c - Arabidopsis >gi|2244929|emb|CAB10351.1| hypothetical protein [Arabidopsis >gi|7268321|emb|CAB78615.1| hypothetical protein [Arabidopsis
MEESELEEGEACSYNITNEYAGSIDPDNDLSYILRILKLFFLVGAKYGGYGSFLPTYQRSPVWSHPKTPAKPQSSTGTRSPNNLLGESQSGNAASSSVPKKAKSGLASSGNPKKSVKSKKPSSSARMESATKKPCVFSKQNSLKLRIKMVPDGLSTEKNAAAIYSGLGLDVSPSLSLDNNSLSGSEGMNEEPQGYSPTESPTSILNVMTSLPVDHCQFLSPLSEDLIRFIEREKSEKGYKYTSPSRLFTASSSAMAYGLEPQKSGEKPSVEKKKKMVERSSFSAETNVRSKKGLFDSTDAITKESMETNTLYPTFAEKETASSKLFDASKENYNGTVRGEMVGDVDRRLWGLTRHKDLGAHHENPKTISAGSVREDKKAKLGDNEASGYPRKVGKYKGSKASDSVKKESSASKAKSGHKVELEHPLRKQKYDQIEQEPPSSSKFKEQQTSVVFETKLNGQAEKKEVVAVKPQSDSKKAEDTYKDFFGDIGDSEEEEEQDVKDLRISEKGLPPLEDMPEKSSLPLVEPQNVGPEPMLRKLGSDASLPKANPVIIQEHWVACDKCGKWRLLPFGVFPEDLPEKWMCTMLNWLPGVNYCNVPEDETTKALYAMYQIPVPENQASMQSNPSGPKPQFTQGDDNTKKKKKGFKKIDNGMDKEGARTAETNKTIQTSSRNGIQNSQGLGDLAEDERQIHKQKEKGKAVDHLSDESKSLKANNKRKTDLESSMLAKKMKIESFLFPDESEYGNGRPTSSSGVPITSADIKPKPRVSSKMPKEEGGASDTGNSNSTGGIKKRKLRESHGSRIYSENENHERKKARVRKEEKEPSYSQGNGKLEKKNRSHSKIEYANVQNSIAATSSSSKISDSHKPRNSSREAKCSPVESVSSSPMRLSNPEKRISVSKKKEESYDANVFAAGSLKKFSDGEGEDDGGSDRSQSQMKDKHGSHESSVLDIWDNKGSLKAKERADPSLDANFENGGHKTLPRKLDHILGEGKQSSDHHRRSNDSLAKKSGKGSSSRSKEKSQSIRSDSRDGPRHIEKKIYDGSPDSRADMIVRPNIPKPHDSERIPERSNIADLASPSRPPSRGVQGDSSMLSVRKKVDKCSTSAGNNNIQADDVTKATAQIRRKSEPSPSPLRKEITSAQAAHNTLKEAKDLKHTADRLKNSVSNLEHIELYFQACLKFLHGAFLLEMSSNESARQGETMVQSMKIYSSTANLCGFCAHEYEKSKDMGAAALAYKCMEVAYMRVVNSSYTSANRYRNELQTSLQMVPPGESPSSSASDVDNVNHPAAVDRVGTSRGISSPLVAGNHVISAQNRSNLLRLLQFAQDVNLSMDASRKSRVALTACIENSGEAQQQGEGIISIKSALDYNFQDMEGLLRLVKLAMKANNR

SEQ ID NO: 96938 - protein, 1263 aa, Arabidopsis thaliana
  peptide (1)..(1263): Ceres Seq. ID no. 12735303
  misc_feature (474)..(788): Pfam Name: Lipoprotein amino terminal region Pfam Description: Lipoprotein amino terminal region
  misc_feature (558)..(1263): Homolog of NCBI NO: 25518543 NR Description: hypothetical protein F22D16.1 - Arabidopsis >gi|6056403|gb|AAF02867.1|AC009525_1 Hypothetical protein
  misc_feature (1)..(368): Homolog of NCBI NO: 25518543 NR Description: hypothetical protein F22D16.1 - Arabidopsis >gi|6056403|gb|AAF02867.1|AC009525_1 Hypothetical protein
  misc_feature (512)..(1260): Homolog of NCBI NO: 34899330 NR Description: contains ESTs AU056898(S20963)~similar to Arabidopsis thaliana chromosome3,
  misc_feature (1)..(402): Homolog of NCBI NO: 34899330 NR Description: contains ESTs AU056898(S20963)~similar to Arabidopsis thaliana chromosome3,
  misc_feature (1000)..(1260): Homolog of NCBI NO: 30683379 NR Description: expressed protein [Arabidopsis thaliana] unknown protein [Arabidopsis thaliana]
  misc_feature (394)..(606): Homolog of NCBI NO: 30683379 NR Description: expressed protein [Arabidopsis thaliana] unknown protein [Arabidopsis thaliana]
  misc_feature (635)..(777): Homolog of NCBI NO: 30683379 NR Description: expressed protein [Arabidopsis thaliana] unknown protein [Arabidopsis thaliana]
  misc_feature (394)..(606): Homolog of NCBI NO: 7452411 NR Description: hypothetical protein dl3905c - Arabidopsis >gi|2244929|emb|CAB10351.1| hypothetical protein [Arabidopsis >gi|7268321|emb|CAB78615.1| hypothetical protein [Arabidopsis
  misc_feature (1077)..(1260): Homolog of NCBI NO: 7452411 NR Description: hypothetical protein dl3905c - Arabidopsis >gi|2244929|emb|CAB10351.1| hypothetical protein [Arabidopsis >gi|7268321|emb|CAB78615.1| hypothetical protein [Arabidopsis
  misc_feature (635)..(777): Homolog of NCBI NO: 7452411 NR Description: hypothetical protein dl3905c - Arabidopsis >gi|2244929|emb|CAB10351.1| hypothetical protein [Arabidopsis >gi|7268321|emb|CAB78615.1| hypothetical protein [Arabidopsis
MESATKKPCVFSKQNSLKLRIKMVPDGLSTEKNAAAIYSGLGLDVSPSLSLDNNSLSGSEGMNEEPQGYSPTESPTSILNVMTSLPVDHCQFLSPLSEDLIRFIEREKSEKGYKYTSPSRLFTASSSAMAYGLEPQKSGEKPSVEKKKKMVERSSFSAETNVRSKKGLFDSTDAITKESMETNTLYPTFAEKETASSKLFDASKENYNGTVRGEMVGDVDRRLWGLTRHKDLGAHHENPKTISAGSVREDKKAKLGDNEASGYPRKVGKYKGSKASDSVKKESSASKAKSGHKVELEHPLRKQKYDQIEQEPPSSSKFKEQQTSVVFETKLNGQAEKKEVVAVKPQSDSKKAEDTYKDFFGDIGDSEEEEEQDVKDLRISEKGLPPLEDMPEKSSLPLVEPQNVGPEPMLRKLGSDASLPKANPVIIQEHWVACDKCGKWRLLPFGVFPEDLPEKWMCTMLNWLPGVNYCNVPEDETTKALYAMYQIPVPENQASMQSNPSGPKPQFTQGDDNTKKKKKGFKKIDNGMDKEGARTAETNKTIQTSSRNGIQNSQGLGDLAEDERQIHKQKEKGKAVDHLSDESKSLKANNKRKTDLESSMLAKKMKIESFLFPDESEYGNGRPTSSSGVPITSADIKPKPRVSSKMPKEEGGASDTGNSNSTGGIKKRKLRESHGSRIYSENENHERKKARVRKEEKEPSYSQGNGKLEKKNRSHSKIEYANVQNSIAATSSSSKISDSHKPRNSSREAKCSPVESVSSSPMRLSNPEKRISVSKKKEESYDANVFAAGSLKKFSDGEGEDDGGSDRSQSQMKDKHGSHESSVLDIWDNKGSLKAKERADPSLDANFENGGHKTLPRKLDHILGEGKQSSDHHRRSNDSLAKKSGKGSSSRSKEKSQSIRSDSRDGPRHIEKKIYDGSPDSRADMIVRPNIPKPHDSERIPERSNIADLASPSRPPSRGVQGDSSMLSVRKKVDKCSTSAGNNNIQADDVTKATAQIRRKSEPSPSPLRKEITSAQAAHNTLKEAKDLKHTADRLKNSVSNLEHIELYFQACLKFLHGAFLLEMSSNESARQGETMVQSMKIYSSTANLCGFCAHEYEKSKDMGAAALAYKCMEVAYMRVVNSSYTSANRYRNELQTSLQMVPPGESPSSSASDVDNVNHPAAVDRVGTSRGISSPLVAGNHVISAQNRSNLLRLLQFAQDVNLSMDASRKSRVALTACIENSGEAQQQGEGIISIKSALDYNFQDMEGLLRLVKLAMKANNR

SEQ ID NO: 96939 - protein, 1241 aa, Arabidopsis thaliana
  peptide (1)..(1241): Ceres Seq. ID no. 12735304
  misc_feature (452)..(766): Pfam Name: Lipoprotein amino terminal region Pfam Description: Lipoprotein amino terminal region
  misc_feature (536)..(1241): Homolog of NCBI NO: 25518543 NR Description: hypothetical protein F22D16.1 - Arabidopsis >gi|6056403|gb|AAF02867.1|AC009525_1 Hypothetical protein
  misc_feature (1)..(346): Homolog of NCBI NO: 25518543 NR Description: hypothetical protein F22D16.1 - Arabidopsis >gi|6056403|gb|AAF02867.1|AC009525_1 Hypothetical protein
  misc_feature (490)..(1238): Homolog of NCBI NO: 34899330 NR Description: contains ESTs AU056898(S20963)~similar to Arabidopsis thaliana chromosome3,
  misc_feature (1)..(380): Homolog of NCBI NO: 34899330 NR Description: contains ESTs AU056898(S20963)~similar to Arabidopsis thaliana chromosome3,
  misc_feature (978)..(1238): Homolog of NCBI NO: 30683379 NR Description: expressed protein [Arabidopsis thaliana] unknown protein [Arabidopsis thaliana]
  misc_feature (372)..(584): Homolog of NCBI NO: 30683379 NR Description: expressed protein [Arabidopsis thaliana] unknown protein [Arabidopsis thaliana]
  misc_feature (613)..(755): Homolog of NCBI NO: 30683379 NR Description: expressed protein [Arabidopsis thaliana] unknown protein [Arabidopsis thaliana]
  misc_feature (372)..(584): Homolog of NCBI NO: 7452411 NR Description: hypothetical protein dl3905c - Arabidopsis >gi|2244929|emb|CAB10351.1| hypothetical protein [Arabidopsis >gi|7268321|emb|CAB78615.1| hypothetical protein [Arabidopsis
  misc_feature (1055)..(1238): Homolog of NCBI NO: 7452411 NR Description: hypothetical protein dl3905c - Arabidopsis >gi|2244929|emb|CAB10351.1| hypothetical protein [Arabidopsis >gi|7268321|emb|CAB78615.1| hypothetical protein [Arabidopsis
  misc_feature (613)..(755): Homolog of NCBI NO: 7452411 NR Description: hypothetical protein dl3905c - Arabidopsis >gi|2244929|emb|CAB10351.1| hypothetical protein [Arabidopsis >gi|7268321|emb|CAB78615.1| hypothetical protein [Arabidopsis
MVPDGLSTEKNAAAIYSGLGLDVSPSLSLDNNSLSGSEGMNEEPQGYSPTESPTSILNVMTSLPVDHCQFLSPLSEDLIRFIEREKSEKGYKYTSPSRLFTASSSAMAYGLEPQKSGEKPSVEKKKKMVERSSFSAETNVRSKKGLFDSTDAITKESMETNTLYPTFAEKETASSKLFDASKENYNGTVRGEMVGDVDRRLWGLTRHKDLGAHHENPKTISAGSVREDKKAKLGDNEASGYPRKVGKYKGSKASDSVKKESSASKAKSGHKVELEHPLRKQKYDQIEQEPPSSSKFKEQQTSVVFETKLNGQAEKKEVVAVKPQSDSKKAEDTYKDFFGDIGDSEEEEEQDVKDLRISEKGLPPLEDMPEKSSLPLVEPQNVGPEPMLRKLGSDASLPKANPVIIQEHWVACDKCGKWRLLPFGVFPEDLPEKWMCTMLNWLPGVNYCNVPEDETTKALYAMYQIPVPENQASMQSNPSGPKPQFTQGDDNTKKKKKGFKKIDNGMDKEGARTAETNKTIQTSSRNGIQNSQGLGDLAEDERQIHKQKEKGKAVDHLSDESKSLKANNKRKTDLESSMLAKKMKIESFLFPDESEYGNGRPTSSSGVPITSADIKPKPRVSSKMPKEEGGASDTGNSNSTGGIKKRKLRESHGSRIYSENENHERKKARVRKEEKEPSYSQGNGKLEKKNRSHSKIEYANVQNSIAATSSSSKISDSHKPRNSSREAKCSPVESVSSSPMRLSNPEKRISVSKKKEESYDANVFAAGSLKKFSDGEGEDDGGSDRSQSQMKDKHGSHESSVLDIWDNKGSLKAKERADPSLDANFENGGHKTLPRKLDHILGEGKQSSDHHRRSNDSLAKKSGKGSSSRSKEKSQSIRSDSRDGPRHIEKKIYDGSPDSRADMIVRPNIPKPHDSERIPERSNIADLASPSRPPSRGVQGDSSMLSVRKKVDKCSTSAGNNNIQADDVTKATAQIRRKSEPSPSPLRKEITSAQAAHNTLKEAKDLKHTADRLKNSVSNLEHIELYFQACLKFLHGAFLLEMSSNESARQGETMVQSMKIYSSTANLCGFCAHEYEKSKDMGAAALAYKCMEVAYMRVVNSSYTSANRYRNELQTSLQMVPPGESPSSSASDVDNVNHPAAVDRVGTSRGISSPLVAGNHVISAQNRSNLLRLLQFAQDVNLSMDASRKSRVALTACIENSGEAQQQGEGIISIKSALDYNFQDMEGLLRLVKLAMKANNR

SEQ ID NO: 96940 - DNA, 432 bp, Arabidopsis thaliana
  misc_feature (1)..(432): Ceres Seq. ID no. 12735364
  misc_feature: MA Experiment ID: 20000171 Result: Up-regulated in Transcription
  misc_feature: MA Experiment 20000171 PARAMETER Experiment Name: At_42deg_Heat_P Parameter: Age (day) Value: 14
  misc_feature: MA Experiment 20000171 PARAMETER Experiment Name: At_42deg_Heat_P Parameter: Organism Value: A. thaliana
  misc_feature: MA Experiment 20000171 PARAMETER Experiment Name: At_42deg_Heat_P Parameter: Plant Line Value: WS
  misc_feature: MA Experiment 20000171 PARAMETER Experiment Name: At_42deg_Heat_P Parameter: Temperature (deg C) Value: 42 vs. 22
  misc_feature: MA Experiment 20000171 PARAMETER Experiment Name: At_42deg_Heat_P Parameter: Timepoint (hr) Value: 1
  misc_feature: MA Experiment 20000171 PARAMETER Experiment Name: At_42deg_Heat_P Parameter: Tissue Value: Aerial
  misc_feature: MA Experiment ID: 20000173 Result: Up-regulated in Transcription
  misc_feature: MA Experiment 20000173 PARAMETER Experiment Name: At_42deg_Heat_P Parameter: Age (day) Value: 14
  misc_feature: MA Experiment 20000173 PARAMETER Experiment Name: At_42deg_Heat_P Parameter: Organism Value: A. thaliana
  misc_feature: MA Experiment 20000173 PARAMETER Experiment Name: At_42deg_Heat_P Parameter: Plant Line Value: WS
  misc_feature: MA Experiment 20000173 PARAMETER Experiment Name: At_42deg_Heat_P Parameter: Temperature (deg C) Value: 42 vs. 22
  misc_feature: MA Experiment 20000173 PARAMETER Experiment Name: At_42deg_Heat_P Parameter: Timepoint (hr) Value: 6
  misc_feature: MA Experiment 20000173 PARAMETER Experiment Name: At_42deg_Heat_P Parameter: Tissue Value: Aerial
atggtggaagacaagaaaaaggctgaggaaatgaagatggtggaaacggagaagatggtggaaacaaagaagaaggctaggaggatgaaacattcggtgaatcggcctccgacaccagatgaagacgatgtggcggatggtttcgagaaagacaaggtcacgcttcgagaaatcatcaacgtcaagttggtggagagtggagagaaggagaatctaatggagcttgtgagagatagattggtggagtgtggttggaaagatgagatgagaattgcttgcagggagcatgtaaagaagaaagggagaaaagatgttacagtcgatgaactgatccgagtgatcactcctaaaggcagagcttcagtaccagattctgtgaaggcagagctgttgaacagaattcaaaacttcattgtatcagctgctctttga

SEQ ID NO: 96941 - protein, 143 aa, Arabidopsis thaliana
  peptide (1)..(143): Ceres Seq. ID no. 12735365
  misc_feature (29)..(143): Homolog of NCBI NO: 30688637 NR Description: expressed protein [Arabidopsis thaliana]
  misc_feature (29)..(94): Homolog of NCBI NO: 9279634 NR Description: gene_id:MOJ10.18~unknown protein [Arabidopsis
  misc_feature (44)..(142): Homolog of NCBI NO: 9910186 NR Description: DC6 protein [Homo sapiens] hypothetical protein 6720481I12 [Mus musculus] similar to DC6 protein [Homo sapiens] [Rattus norvegicus]
  misc_feature (50)..(142): Homolog of NCBI NO: 34866121 NR Description: similar to DC6 protein [Rattus norvegicus]
  misc_feature (44)..(142): Homolog of NCBI NO: 38086720 NR Description: similar to DC6 protein; e(y)2 homolog; enhancer
  misc_feature (32)..(93): Homolog of NCBI NO: 19386734 NR Description: P0678F11.23 [Oryza sativa (japonica
  misc_feature (64)..(138): Homolog of NCBI NO: 17864496 NR Description: enhancer of yellow 2 CG15191-PA
  misc_feature (64)..(134): Homolog of NCBI NO: 24644735 NR Description: CG14612-PA [Drosophila melanogaster]
MVEDKKKAEEMKMVETEKMVETKKKARRMKHSVNRPPTPDEDDVADGFEKDKVTLREIINVKLVESGEKENLMELVRDRLVECGWKDEMRIACREHVKKKGRKDVTVDELIRVITPKGRASVPDSVKAELLNRIQNFIVSAAL

SEQ ID NO: 96942 - protein, 133 aa, Arabidopsis thaliana
  peptide (1)..(133): Ceres Seq. ID no. 12735366
  misc_feature (19)..(133): Homolog of NCBI NO: 30688637 NR Description: expressed protein [Arabidopsis thaliana]
  misc_feature (19)..(84): Homolog of NCBI NO: 9279634 NR Description: gene_id:MOJ10.18~unknown protein [Arabidopsis
  misc_feature (34)..(132): Homolog of NCBI NO: 9910186 NR Description: DC6 protein [Homo sapiens] hypothetical protein 6720481I12 [Mus musculus] similar to DC6 protein [Homo sapiens] [Rattus norvegicus]
  misc_feature (40)..(132): Homolog of NCBI NO: 34866121 NR Description: similar to DC6 protein [Rattus norvegicus]
  misc_feature (34)..(132): Homolog of NCBI NO: 38086720 NR Description: similar to DC6 protein; e(y)2 homolog; enhancer
  misc_feature (22)..(83): Homolog of NCBI NO: 19386734 NR Description: P0678F11.23 [Oryza sativa (japonica
  misc_feature (54)..(128): Homolog of NCBI NO: 17864496 NR Description: enhancer of yellow 2 CG15191-PA
  misc_feature (54)..(124): Homolog of NCBI NO: 24644735 NR Description: CG14612-PA [Drosophila melanogaster]
MKMVETEKMVETKKKARRMKHSVNRPPTPDEDDVADGFEKDKVTLREIINVKLVESGEKENLMELVRDRLVECGWKDEMRIACREHVKKKGRKDVTVDELIRVITPKGRASVPDSVKAELLNRIQNFIVSAAL

SEQ ID NO: 96943 - protein, 131 aa, Arabidopsis thaliana
  peptide (1)..(131): Ceres Seq. ID no. 12735367
  misc_feature (17)..(131): Homolog of NCBI NO: 30688637 NR Description: expressed protein [Arabidopsis thaliana]
  misc_feature (17)..(82): Homolog of NCBI NO: 9279634 NR Description: gene_id:MOJ10.18~unknown protein [Arabidopsis
  misc_feature (32)..(130): Homolog of NCBI NO: 9910186 NR Description: DC6 protein [Homo sapiens] hypothetical protein 6720481I12 [Mus musculus] similar to DC6 protein [Homo sapiens] [Rattus norvegicus]
  misc_feature (38)..(130): Homolog of NCBI NO: 34866121 NR Description: similar to DC6 protein [Rattus norvegicus]
  misc_feature (32)..(130): Homolog of NCBI NO: 38086720 NR Description: similar to DC6 protein; e(y)2 homolog; enhancer
  misc_feature (20)..(81): Homolog of NCBI NO: 19386734 NR Description: P0678F11.23 [Oryza sativa (japonica
  misc_feature (52)..(126): Homolog of NCBI NO: 17864496 NR Description: enhancer of yellow 2 CG15191-PA
  misc_feature (52)..(122): Homolog of NCBI NO: 24644735 NR Description: CG14612-PA [Drosophila melanogaster]
MVETEKMVETKKKARRMKHSVNRPPTPDEDDVADGFEKDKVTLREIINVKLVESGEKENLMELVRDRLVECGWKDEMRIACREHVKKKGRKDVTVDELIRVITPKGRASVPDSVKAELLNRIQNFIVSAAL

SEQ ID NO: 96944 - DNA, 984 bp, Arabidopsis thaliana
  misc_feature (1)..(984): Ceres Seq. ID no. 12735368
  misc_feature: MA Experiment ID: 20001451 Result: Down-regulated in Transcription
  misc_feature: MA Experiment 20001451 PARAMETER Experiment Name: At_Far-red-induction_P Parameter: Age (day) Value: 7
  misc_feature: MA Experiment 20001451 PARAMETER Experiment Name: At_Far-red-induction_P Parameter: Light Value: Far-red vs. White
  misc_feature: MA Experiment 20001451 PARAMETER Experiment Name: At_Far-red-induction_P Parameter: Organism Value: A. thaliana
  misc_feature: MA Experiment 20001451 PARAMETER Experiment Name: At_Far-red-induction_P Parameter: Plant Line Value: Columbia
  misc_feature: MA Experiment 20001451 PARAMETER Experiment Name: At_Far-red-induction_P Parameter: Timepoint (hr) Value: 24
  misc_feature: MA Experiment 20001451 PARAMETER Experiment Name: At_Far-red-induction_P Parameter: Tissue Value: Whole Plant
atgcccatttacttactatcctgttctagtttggagatgctctgtggtcctgatggtgagcttcccgagaagttgagaaatttggaacctcgtcttatagagcatgtcagcaacgagattatggatcgagaccccaatgtccgctgggatgatattgctggtctggagcatgctaaaaagtgtgtaactgagatggtcatttggccattgttgcgtcctgacattttcaaaggttgtcgttcacctggaaaaggacttcttctctttggcccaccaggaactggtaaaacaatgattggaaaagctatagctggagaagcgaaagcaacctttttctatatatcagccagttcattgacaagcaagtggattggcgaaggtgaaaagctagtgagggccctttttggagttgcgagttgccgccagcctgcagtaatatttgtcgatgaaatagattctctactatctcagcgtaagtcagatggtgaacatgaatcgagtagaagactcaagacacaattcctgattgaaatggaaggtttcgacagtggcagcgagcaaattctcctaataggagcaacaaatagaccgcaagagctcgatgaagcagcaagaagacgactaaccaagagactctacattcctcttccttcatctgaagcaagagcatggataatacagaatctcctaaagaaagatgggttgtttactctgtcggatgatgatatgaacatcatatgcaacctaacggaagggtactcgggatcagatatgaagaacctggtgaaagatgcaactatgggtccattaagagaagctctcaaacgaggcatagatataactaacctgactaaagatgacatgcgtctagtaactcttcaggactttaaagacgcattgcaagaagtaaggccttctgtttctcagaacgaacttggaatctatgaaaattggaacaatcagtttggtagtttaagcctctaa

SEQ ID NO: 96945 - protein, 327 aa, Arabidopsis thaliana
  peptide (1)..(327): Ceres Seq. ID no. 12735369
  misc_feature (85)..(271): Pfam Name: ATPase family associated with various cellular Pfam Description: ATPase family associated with various cellular
  misc_feature (1)..(327): Homolog of NCBI NO: 15232089 NR Description: spastin protein, putative; protein id:
  misc_feature (1)..(327): Homolog of NCBI NO: 9279636 NR Description: gene_id:MOJ10.20~unknown protein [Arabidopsis
  misc_feature (25)..(323): Homolog of NCBI NO: 26353602 NR Description: unnamed protein product [Mus musculus]
  misc_feature (17)..(323): Homolog of NCBI NO: 21740068 NR Description: hypothetical protein [Homo sapiens]
  misc_feature (17)..(323): Homolog of NCBI NO: 34783280 NR Description: Fidgetin-like 1 [Homo sapiens]
  misc_feature (23)..(323): Homolog of NCBI NO: 27697328 NR Description: similar to fidgetin-like 1 [Homo sapiens] [Rattus
  misc_feature (23)..(326): Homolog of NCBI NO: 19074903 NR Description: PROTEASOME REGULATORY SUBUNIT YTA6 OF THE AAA OF ATPASES [Encephalitozoon cuniculi] PROTEASOME REGULATORY SUBUNIT YTA6 OF THE AAA FAMILY OF ATPASES
  misc_feature (18)..(325): Homolog of NCBI NO: 39581818 NR Description: Hypothetical protein CBG21866 [Caenorhabditis
  misc_feature (25)..(325): Homolog of NCBI NO: 17560432 NR Description: ATPase Associated with diverse cellular Activities
  misc_feature (23)..(327): Homolog of NCBI NO: 12230605 NR Description: Spastin >gi|6273572|emb|CAB60143.1| spastin
MPIYLLSCSSLEMLCGPDGELPEKLRNLEPRLIEHVSNEIMDRDPNVRWDDIAGLEHAKKCVTEMVIWPLLRPDIFKGCRSPGKGLLLFGPPGTGKTMIGKAIAGEAKATFFYISASSLTSKWIGEGEKLVRALFGVASCRQPAVIFVDEIDSLLSQRKSDGEHESSRRLKTQFLIEMEGFDSGSEQILLIGATNRPQELDEAARRRLTKRLYIPLPSSEARAWIIQNLLKKDGLFTLSDDDMNIICNLTEGYSGSDMKNLVKDATMGPLREALKRGIDITNLTKDDMRLVTLQDFKDALQEVRPSVSQNELGIYENWNNQFGSLSL

SEQ ID NO: 96946 - protein, 315 aa, Arabidopsis thaliana
  peptide (1)..(315): Ceres Seq. ID no. 12735370
  misc_feature (73)..(259): Pfam Name: ATPase family associated with various cellular Pfam Description: ATPase family associated with various cellular
  misc_feature (1)..(315): Homolog of NCBI NO: 15232089 NR Description: spastin protein, putative; protein id:
  misc_feature (1)..(315): Homolog of NCBI NO: 9279636 NR Description: gene_id:MOJ10.20~unknown protein [Arabidopsis
  misc_feature (13)..(311): Homolog of NCBI NO: 26353602 NR Description: unnamed protein product [Mus musculus]
  misc_feature (5)..(311): Homolog of NCBI NO: 21740068 NR Description: hypothetical protein [Homo sapiens]
  misc_feature (5)..(311): Homolog of NCBI NO: 34783280 NR Description: Fidgetin-like 1 [Homo sapiens]
  misc_feature (11)..(311): Homolog of NCBI NO: 27697328 NR Description: similar to fidgetin-like 1 [Homo sapiens] [Rattus
  misc_feature (11)..(314): Homolog of NCBI NO: 19074903 NR Description: PROTEASOME REGULATORY SUBUNIT YTA6 OF THE AAA OF ATPASES [Encephalitozoon cuniculi] PROTEASOME REGULATORY SUBUNIT YTA6 OF THE AAA FAMILY OF ATPASES
  misc_feature (6)..(313): Homolog of NCBI NO: 39581818 NR Description: Hypothetical protein CBG21866 [Caenorhabditis
  misc_feature (13)..(313): Homolog of NCBI NO: 17560432 NR Description: ATPase Associated with diverse cellular Activities
  misc_feature (11)..(315): Homolog of NCBI NO: 12230605 NR Description: Spastin >gi|6273572|emb|CAB60143.1| spastin
MLCGPDGELPEKLRNLEPRLIEHVSNEIMDRDPNVRWDDIAGLEHAKKCVTEMVIWPLLRPDIFKGCRSPGKGLLLFGPPGTGKTMIGKAIAGEAKATFFYISASSLTSKWIGEGEKLVRALFGVASCRQPAVIFVDEIDSLLSQRKSDGEHESSRRLKTQFLIEMEGFDSGSEQILLIGATNRPQELDEAARRRLTKRLYIPLPSSEARAWIIQNLLKKDGLFTLSDDDMNIICNLTEGYSGSDMKNLVKDATMGPLREALKRGIDITNLTKDDMRLVTLQDFKDALQEVRPSVSQNELGIYENWNNQFGSLSL

SEQ ID NO: 96947 - protein, 287 aa, Arabidopsis thaliana
  peptide (1)..(287): Ceres Seq. ID no. 12735371
  misc_feature (45)..(231): Pfam Name: ATPase family associated with various cellular Pfam Description: ATPase family associated with various cellular
  misc_feature (1)..(287): Homolog of NCBI NO: 15232089 NR Description: spastin protein, putative; protein id:
  misc_feature (1)..(287): Homolog of NCBI NO: 9279636 NR Description: gene_id:MOJ10.20~unknown protein [Arabidopsis
  misc_feature (1)..(283): Homolog of NCBI NO: 26353602 NR Description: unnamed protein product [Mus musculus]
  misc_feature (1)..(283): Homolog of NCBI NO: 21740068 NR Description: hypothetical protein [Homo sapiens]
  misc_feature (1)..(283): Homolog of NCBI NO: 34783280 NR Description: Fidgetin-like 1 [Homo sapiens]
  misc_feature (1)..(283): Homolog of NCBI NO: 27697328 NR Description: similar to fidgetin-like 1 [Homo sapiens] [Rattus
  misc_feature (1)..(286): Homolog of NCBI NO: 19074903 NR Description: PROTEASOME REGULATORY SUBUNIT YTA6 OF THE AAA OF ATPASES [Encephalitozoon cuniculi] PROTEASOME REGULATORY SUBUNIT YTA6 OF THE AAA FAMILY OF ATPASES
  misc_feature (1)..(285): Homolog of NCBI NO: 39581818 NR Description: Hypothetical protein CBG21866 [Caenorhabditis
  misc_feature (1)..(285): Homolog of NCBI NO: 17560432 NR Description: ATPase Associated with diverse cellular Activities
  misc_feature (1)..(287): Homolog of NCBI NO: 12230605 NR Description: Spastin >gi|6273572|emb|CAB60143.1| spastin
MDRDPNVRWDDIAGLEHAKKCVTEMVIWPLLRPDIFKGCRSPGKGLLLFGPPGTGKTMIGKAIAGEAKATFFYISASSLTSKWIGEGEKLVRALFGVASCRQPAVIFVDEIDSLLSQRKSDGEHESSRRLKTQFLIEMEGFDSGSEQILLIGATNRPQELDEAARRRLTKRLYIPLPSSEARAWIIQNLLKKDGLFTLSDDDMNIICNLTEGYSGSDMKNLVKDATMGPLREALKRGIDITNLTKDDMRLVTLQDFKDALQEVRPSVSQNELGIYENWNNQFGSLSL

SEQ ID NO: 96948 - DNA, 738 bp, Arabidopsis thaliana
  misc_feature (1)..(738): Ceres Seq. ID no. 12735372
  misc_feature: MA Experiment ID: 20000314 Result: Down-regulated in Transcription
  misc_feature: MA Experiment 20000314 PARAMETER Experiment Name: At_14day_Shoots-Roots_Sub_P Parameter: Age (day) Value: 14
  misc_feature: MA Experiment 20000314 PARAMETER Experiment Name: At_14day_Shoots-Roots_Sub_P Parameter: Organism Value: A. thaliana
  misc_feature: MA Experiment 20000314 PARAMETER Experiment Name: At_14day_Shoots-Roots_Sub_P Parameter: Plant Line Value: WS
  misc_feature: MA Experiment 20000314 PARAMETER Experiment Name: At_14day_Shoots-Roots_Sub_P Parameter: Tissue Value: Roots vs. Whole Plant
  misc_feature: MA Experiment ID: 20000315 Result: Down-regulated in Transcription
  misc_feature: MA Experiment 20000315 PARAMETER Experiment Name: At_14day_Shoots-Roots_Sub_P Parameter: Age (day) Value: 14
  misc_feature: MA Experiment 20000315 PARAMETER Experiment Name: At_14day_Shoots-Roots_Sub_P Parameter: Organism Value: A. thaliana
  misc_feature: MA Experiment 20000315 PARAMETER Experiment Name: At_14day_Shoots-Roots_Sub_P Parameter: Plant Line Value: WS
  misc_feature: MA Experiment 20000315 PARAMETER Experiment Name: At_14day_Shoots-Roots_Sub_P Parameter: Tissue Value: Shoots vs. Whole Plant
  misc_feature: MA Experiment ID: 20000327 Result: Down-regulated in Transcription
  misc_feature: MA Experiment 20000327 PARAMETER Experiment Name: At_42deg_Heat_Sub_P Parameter: Age (day) Value: 14
  misc_feature: MA Experiment 20000327 PARAMETER Experiment Name: At_42deg_Heat_Sub_P Parameter: Organism Value: A. thaliana
  misc_feature: MA Experiment 20000327 PARAMETER Experiment Name: At_42deg_Heat_Sub_P Parameter: Plant Line Value: WS
  misc_feature: MA Experiment 20000327 PARAMETER Experiment Name: At_42deg_Heat_Sub_P Parameter: Temperature (deg C) Value: 42 vs. 22
  misc_feature: MA Experiment 20000327 PARAMETER Experiment Name: At_42deg_Heat_Sub_P Parameter: Timepoint (hr) Value: 1
  misc_feature: MA Experiment 20000327 PARAMETER Experiment Name: At_42deg_Heat_Sub_P Parameter: Tissue Value: Aerial
  misc_feature: MA Experiment ID: 20000346 Result: Up-regulated in Transcription
  misc_feature: MA Experiment 20000346 PARAMETER Experiment Name: At_2mM_SA_Sub_P Parameter: Age (day) Value: 14
  misc_feature: MA Experiment 20000346 PARAMETER Experiment Name: At_2mM_SA_Sub_P Parameter: Organism Value: A. thaliana
  misc_feature: MA Experiment 20000346 PARAMETER Experiment Name: At_2mM_SA_Sub_P Parameter: Plant Line Value: WS
  misc_feature: MA Experiment 20000346 PARAMETER Experiment Name: At_2mM_SA_Sub_P Parameter: Timepoint (hr) Value: 1
  misc_feature: MA Experiment 20000346 PARAMETER Experiment Name: At_2mM_SA_Sub_P Parameter: Tissue Value: Aerial
  misc_feature: MA Experiment 20000346 PARAMETER Experiment Name: At_2mM_SA_Sub_P Parameter: Treatment Value: 2mM SA vs. No Treatment
  misc_feature: MA Experiment ID: 20000352 Result: Up-regulated in Transcription
  misc_feature: MA Experiment 20000352 PARAMETER Experiment Name: At_Drought_Sub_P Parameter: Age (day) Value: 7
  misc_feature: MA Experiment 20000352 PARAMETER Experiment Name: At_Drought_Sub_P Parameter: Organism Value: A. thaliana
  misc_feature: MA Experiment 20000352 PARAMETER Experiment Name: At_Drought_Sub_P Parameter: Plant Line Value: WS
  misc_feature: MA Experiment 20000352 PARAMETER Experiment Name: At_Drought_Sub_P Parameter: Timepoint (hr) Value: 6
  misc_feature: MA Experiment 20000352 PARAMETER Experiment Name: At_Drought_Sub_P Parameter: Tissue Value: Whole Plant
  misc_feature: MA Experiment 20000352 PARAMETER Experiment Name: At_Drought_Sub_P Parameter: Treatment Value: Drought vs. No Drought
  misc_feature: MA Experiment ID: 20000355 Result: Down-regulated in Transcription
  misc_feature: MA Experiment 20000355 PARAMETER Experiment Name: At_Siliques_Sub_P Parameter: Age (day) Value: 21
  misc_feature: MA Experiment 20000355 PARAMETER Experiment Name: At_Siliques_Sub_P Parameter: Organism Value: A. thaliana
  misc_feature: MA Experiment 20000355 PARAMETER Experiment Name: At_Siliques_Sub_P Parameter: Plant Line Value: WS
  misc_feature: MA Experiment 20000355 PARAMETER Experiment Name: At_Siliques_Sub_P Parameter: Tissue Value: Less Than 5mm Siliques vs. Whole Plant
  misc_feature: MA Experiment ID: 20000440 Result: Down-regulated in Transcription
  misc_feature: MA Experiment 20000440 PARAMETER Experiment Name: At_Closed-Flower__Sub_P Parameter: Tissue Value: Closed Flower vs. Whole Plant
  misc_feature: MA Experiment ID: 20000634 Result: Up-regulated in Transcription
  misc_feature: MA Experiment 20000634 PARAMETER Experiment Name: At_10percent_PEG_Sub_P Parameter: Age (day) Value: 12
  misc_feature: MA Experiment 20000634 PARAMETER Experiment Name: At_10percent_PEG_Sub_P Parameter: Organism Value: A. thaliana
  misc_feature: MA Experiment 20000634 PARAMETER Experiment Name: At_10percent_PEG_Sub_P Parameter: Plant Line Value: WS
  misc_feature: MA Experiment 20000634 PARAMETER Experiment Name: At_10percent_PEG_Sub_P Parameter: Timepoint (day) Value: 12
  misc_feature: MA Experiment 20000634 PARAMETER Experiment Name: At_10percent_PEG_Sub_P Parameter: Tissue Value: Whole Plant
  misc_feature: MA Experiment 20000634 PARAMETER Experiment Name: At_10percent_PEG_Sub_P Parameter: Treatment Value: 10% PEG vs. No Treatment
  misc_feature: MA Experiment ID: 20001807 Result: Down-regulated in Transcription
  misc_feature: MA Experiment 20001807 PARAMETER Experiment Name: At_50mM_NH4NO3_L-to-H_Sub_P Parameter: Timepoint (hr) Value: 6
  misc_feature: MA Experiment 20001807 PARAMETER Experiment Name: At_50mM_NH4NO3_L-to-H_Sub_P Parameter: Tissue Value: Leaf
  misc_feature: MA Experiment 20001807 PARAMETER Experiment Name: At_50mM_NH4NO3_L-to-H_Sub_P Parameter: Treatment Value: 50mM NH4NO3 vs 100mM Mannitol
atggaggatcggttctccactatcaccaatcttcatggagatcgtaaacaggcaatatttggagtctatgttggtcatggaggagttaaagcggctgagtgtccagctaagaacttagataagaacattgtagaagaagtagttggtaaaagacacgagttggagatagctgaagcgggtggttcatcctgtgtcacggctttggttagcgaagggagccttgttgtgtcaaacgccggtgactgtcgtgctgttatgagtgtaggaggtgtagctaaaggatccttagttgtgccaagaggaatcggagatgctcaacttaagaaatgggttatagctgaaccagagacaaagatctcgagagttgagcatgaccatgagttcttaatcttggcatcacatggtttatgggataaggtgagtaaccaagaagcagtagacattgctcgtcccttctgcttacgaaccgagaagccattgttgttagcagcttgtaagaagcttgttgatctctcggcttcacgaggctcgtttgatgatatcagtgtgatgttgatcccattgcggccagttcgtatagaaaagagaggcatcttagaagatgtttcatcctcaaaggcgaattcaatagcaagggacattgctataagtgtgacaagggatggtcgtttcagatcttatttagctagaggaggccctggatggttactttccagaattgaagaagacaagcgatga

SEQ ID NO: 96949 - protein, 245 aa, Arabidopsis thaliana
  peptide (1)..(245): Ceres Seq. ID no. 12735373
  misc_feature (1)..(100): Pfam Name: Protein phosphatase 2C Pfam Description: Protein phosphatase 2C
  misc_feature (1)..(245): Homolog of NCBI NO: 22331365 NR Description: protein phosphatase 2C (PP2C), putative; protein
  misc_feature (93)..(202): Homolog of NCBI NO: 9294079 NR Description: serine/threonine phosphatase type 2c-like protein
  misc_feature (1)..(100): Homolog of NCBI NO: 9294079 NR Description: serine/threonine phosphatase type 2c-like protein
  misc_feature (1)..(100): Homolog of NCBI NO: 15236450 NR Description: protein phosphatase 2C (PP2C), putative; protein At4g08260.1 [Arabidopsis thaliana] >gi|7486866|pir||T10553
  misc_feature (93)..(189): Homolog of NCBI NO: 15236450 NR Description: protein phosphatase 2C (PP2C), putative; protein At4g08260.1 [Arabidopsis thaliana] >gi|7486866|pir||T10553
  misc_feature (1)..(106): Homolog of NCBI NO: 15227687 NR Description: protein phosphatase 2C (PP2C); protein id: supported by cDNA: gi_13877670 [Arabidopsis thaliana]
  misc_feature (93)..(189): Homolog of NCBI NO: 15227687 NR Description: protein phosphatase 2C (PP2C); protein id: supported by cDNA: gi_13877670 [Arabidopsis thaliana]
  misc_feature (60)..(93): Homolog of NCBI NO: 15227687 NR Description: protein phosphatase 2C (PP2C); protein id: supported by cDNA: gi_13877670 [Arabidopsis thaliana]
  misc_feature (29)..(188): Homolog of NCBI NO: 15222312 NR Description: protein phosphatase 2C (PP2C); protein id: supported by cDNA: gi_20258779 [Arabidopsis thaliana]
  misc_feature (93)..(188): Homolog of NCBI NO: 25352225 NR Description: hypothetical protein [imported] - Arabidopsis >gi|8954030|gb|AAF82204.1|AC067971_12 Contains similarity to phosphatase 2C from Arabidopsis thaliana gb|AF085279. It contains
MEDRFSTITNLHGDRKQAIFGVYVGHGGVKAAECPAKNLDKNIVEEVVGKRHELEIAEAGGSSCVTALVSEGSLVVSNAGDCRAVMSVGGVAKGSLVVPRGIGDAQLKKWVIAEPETKISRVEHDHEFLILASHGLWDKVSNQEAVDIARPFCLRTEKPLLLAACKKLVDLSASRGSFDDISVMLIPLRPVRIEKRGILEDVSSSKANSIARDIAISVTRDGRFRSYLARGGPGWLLSRIEEDKR

SEQ ID NO: 96950 - protein, 160 aa, Arabidopsis thaliana
  peptide (1)..(160): Ceres Seq. ID no. 12735374
  misc_feature (8)..(96): Pfam Name: Protein phosphatase 2C Pfam Description: Protein phosphatase 2C
  misc_feature (1)..(160): Homolog of NCBI NO: 22331365 NR Description: protein phosphatase 2C (PP2C), putative; protein
  misc_feature (8)..(117): Homolog of NCBI NO: 9294079 NR Description: serine/threonine phosphatase type 2c-like protein
  misc_feature (1)..(15): Homolog of NCBI NO: 9294079 NR Description: serine/threonine phosphatase type 2c-like protein
  misc_feature (1)..(15): Homolog of NCBI NO: 15236450 NR Description: protein phosphatase 2C (PP2C), putative; protein At4g08260.1 [Arabidopsis thaliana] >gi|7486866|pir||T10553
  misc_feature (8)..(104): Homolog of NCBI NO: 15236450 NR Description: protein phosphatase 2C (PP2C), putative; protein At4g08260.1 [Arabidopsis thaliana] >gi|7486866|pir||T10553
  misc_feature (1)..(21): Homolog of NCBI NO: 15227687 NR Description: protein phosphatase 2C (PP2C); protein id: supported by cDNA: gi_13877670 [Arabidopsis thaliana]
  misc_feature (8)..(104): Homolog of NCBI NO: 15227687 NR Description: protein phosphatase 2C (PP2C); protein id: supported by cDNA: gi_13877670 [Arabidopsis thaliana]
  misc_feature (1)..(103): Homolog of NCBI NO: 15222312 NR Description: protein phosphatase 2C (PP2C); protein id: supported by cDNA: gi_20258779 [Arabidopsis thaliana]
  misc_feature (8)..(103): Homolog of NCBI NO: 25352225 NR Description: hypothetical protein [imported] - Arabidopsis >gi|8954030|gb|AAF82204.1|AC067971_12 Contains similarity to phosphatase 2C from Arabidopsis thaliana gb|AF085279. It contains
  misc_feature (1)..(104): Homolog of NCBI NO: 15225656 NR Description: protein phosphatase 2C (PP2C); protein id: [Arabidopsis thaliana] >gi|25352216|pir||C84826 protein
MSVGGVAKGSLVVPRGIGDAQLKKWVIAEPETKISRVEHDHEFLILASHGLWDKVSNQEAVDIARPFCLRTEKPLLLAACKKLVDLSASRGSFDDISVMLIPLRPVRIEKRGILEDVSSSKANSIARDIAISVTRDGRFRSYLARGGPGWLLSRIEEDKR

SEQ ID NO: 96951 - DNA, 1456 bp, Arabidopsis thaliana
  misc_feature (1)..(1456): Ceres Seq. ID no. 12735395
  misc_feature: MA Experiment ID: 20000306 Result: Up-regulated in Transcription
  misc_feature: MA Experiment 20000306 PARAMETER Experiment Name: At_Germinating_Seeds_Sub_P Parameter: Age (hr) Value: 6 vs. 0
  misc_feature: MA Experiment 20000306 PARAMETER Experiment Name: At_Germinating_Seeds_Sub_P Parameter: Organism Value: A. thaliana
  misc_feature: MA Experiment 20000306 PARAMETER Experiment Name: At_Germinating_Seeds_Sub_P Parameter: Plant Line Value: WS
  misc_feature: MA Experiment 20000306 PARAMETER Experiment Name: At_Germinating_Seeds_Sub_P Parameter: Tissue Value: Germinating Seeds
  misc_feature: MA Experiment ID: 20000307 Result: Up-regulated in Transcription
  misc_feature: MA Experiment 20000307 PARAMETER Experiment Name: At_Germinating_Seeds_Sub_P Parameter: Age (hr) Value: 24 vs. 0
  misc_feature: MA Experiment 20000307 PARAMETER Experiment Name: At_Germinating_Seeds_Sub_P Parameter: Organism Value: A. thaliana
  misc_feature: MA Experiment 20000307 PARAMETER Experiment Name: At_Germinating_Seeds_Sub_P Parameter: Plant Line Value: WS
  misc_feature: MA Experiment 20000307 PARAMETER Experiment Name: At_Germinating_Seeds_Sub_P Parameter: Tissue Value: Germinating Seeds
  misc_feature: MA Experiment ID: 20000315 Result: Down-regulated in Transcription
  misc_feature: MA Experiment 20000315 PARAMETER Experiment Name: At_14day_Shoots-Roots_Sub_P Parameter: Age (day) Value: 14
  misc_feature: MA Experiment 20000315 PARAMETER Experiment Name: At_14day_Shoots-Roots_Sub_P Parameter: Organism Value: A. thaliana
  misc_feature: MA Experiment 20000315 PARAMETER Experiment Name: At_14day_Shoots-Roots_Sub_P Parameter: Plant Line Value: WS
  misc_feature: MA Experiment 20000315 PARAMETER Experiment Name: At_14day_Shoots-Roots_Sub_P Parameter: Tissue Value: Shoots vs. Whole Plant
  misc_feature: MA Experiment ID: 20000328 Result: Up-regulated in Transcription
  misc_feature: MA Experiment 20000328 PARAMETER Experiment Name: At_42deg_Heat_Sub_P Parameter: Age (day) Value: 14
  misc_feature: MA Experiment 20000328 PARAMETER Experiment Name: At_42deg_Heat_Sub_P Parameter: Organism Value: A. thaliana
  misc_feature: MA Experiment 20000328 PARAMETER Experiment Name: At_42deg_Heat_Sub_P Parameter: Plant Line Value: WS
  misc_feature: MA Experiment 20000328 PARAMETER Experiment Name: At_42deg_Heat_Sub_P Parameter: Temperature (deg C) Value: 42 vs. 22
  misc_feature: MA Experiment 20000328 PARAMETER Experiment Name: At_42deg_Heat_Sub_P Parameter: Timepoint (hr) Value: 6
  misc_feature: MA Experiment 20000328 PARAMETER Experiment Name: At_42deg_Heat_Sub_P Parameter: Tissue Value: Aerial
  misc_feature: MA Experiment ID: 20000440 Result: Up-regulated in Transcription
  misc_feature: MA Experiment 20000440 PARAMETER Experiment Name: At_Closed-Flower__Sub_P Parameter: Tissue Value: Closed Flower vs. Whole Plant
aaatcatcactgtttctcgttgcggtctatatgaatgagatgtctctttcaatagctctgcataaacacaaatggcgaataaacctgatcatcatcatcatcatcaccaatcttcaaggagattgatgcttgtgttgtacttcaccagtgttcttgggattggattcatcgcagcttttctttgtctctcttcttcaattccctcagtatccgctgttttttcaatctgggttcccgttaaccggccggagatacagattccgatcatcgattccaaaattgttcaaaagagaagcaaacaatcgaatgatacaaaagatcatgtccgattcttatcggcaatatttgccgatataccggcgccggagttaaaatgggaggaaatggaatcagctccagttcctcgtcttgatggatactcagttcaaatcaataaccttttgtatgtcttctccggttacggcagtctcgactatgttcattctcatgtggatgtgttcaatttcacagacaataagtggtgtgacagattccacactcctaaagaaatggcgaattcgcacctcgggattgtgacggatggacggtatgtatatgtggtttcagggcagcttggtccacaatgtagaggacctacttctcgttcctttgttttagactcattcacaaagacttggctcgaatttccttcactaccagctccaaggtatgctcctgcgactcagatatggagagggaggcttcatgtgatgggtggaagcaaagagaatcgcaatgccgttgcttttgaccattggagcatagctgtaaaagatggcaaagcactcgacgaatggcgggaagaggtccctattcctcgaggtggaccacacagggcttgtgtagttgctaacgataaactacttgtaatcggtggccaagaaggtgacttcatggccaaacctaactcacccatcttcaagtgctcacgtagacgcgagatctttaatggtgaggtgtacatgatggacgaggagatgaagtggaaaatgttgccaccaatgccaaaaaacaattcccacattgaatctgcgtggatcattgtcaataactcaattgttatcgttggtggtaccacagattggcatccagtgacgaaaaggcttgttcttgttggagagatattccggtttcagttagatacgttgacttggtctgtgattggacggttaccataccgtgtcaaaacagcgatggccggattctggaacggttatttgtacttcacgtcgggacagagggatagaggaccagataatccacagcctgggaaagttattggagaaatgtggagaaccaagttgaagttttgagtcttagtgtgtactttttaatatagaaaaatcatttttttttagacaaactgttgaatctgaacttttgattagttcttcaaagagaaatcttcaatgagaac

SEQ ID NO: 96952 - protein, 426 aa, Arabidopsis thaliana
  peptide (1)..(426): Ceres Seq. ID no. 12735396
  misc_feature (264)..(325): Pfam Name: Kelch motif Pfam Description: Kelch motif
  misc_feature (1)..(426): Homolog of NCBI NO: 18405273 NR Description: expressed protein; protein id: At3g27220.1, by cDNA: gi_15081754, supported by cDNA: gi_15912244 [Arabidopsis >gi|9294215|dbj|BAB02117.1| gene_id:K17E12.4~unknown protein
  misc_feature (1)..(426): Homolog of NCBI NO: 15912245 NR Description: AT3g27220/K17E12_4 [Arabidopsis thaliana]
  misc_feature (19)..(426): Homolog of NCBI NO: 29150199 NR Description: hypothetical protein [Oryza sativa (indica
  misc_feature (19)..(424): Homolog of NCBI NO: 38344229 NR Description: OJ991113_30.6 [Oryza sativa (japonica
  misc_feature (26)..(424): Homolog of NCBI NO: 15217949 NR Description: unknown protein; protein id: At1g51540.1
  misc_feature (26)..(424): Homolog of NCBI NO: 28416695 NR Description: At1g51540 [Arabidopsis thaliana]
  misc_feature (102)..(347): Homolog of NCBI NO: 34932909 NR Description: similar to hypothetical protein MGC35097 [Rattus
MANKPDHHHHHHQSSRRLMLVLYFTSVLGIGFIAAFLCLSSSIPSVSAVFSIWVPVNRPEIQIPIIDSKIVQKRSKQSNDTKDHVRFLSAIFADIPAPELKWEEMESAPVPRLDGYSVQINNLLYVFSGYGSLDYVHSHVDVFNFTDNKWCDRFHTPKEMANSHLGIVTDGRYVYVVSGQLGPQCRGPTSRSFVLDSFTKTWLEFPSLPAPRYAPATQIWRGRLHVMGGSKENRNAVAFDHWSIAVKDGKALDEWREEVPIPRGGPHRACVVANDKLLVIGGQEGDFMAKPNSPIFKCSRRREIFNGEVYMMDEEMKWKMLPPMPKNNSHIESAWIIVNNSIVIVGGTTDWHPVTKRLVLVGEIFRFQLDTLTWSVIGRLPYRVKTAMAGFWNGYLYFTSGQRDRGPDNPQPGKVIGEMWRTKLKF

SEQ ID NO: 96953 - protein, 408 aa, Arabidopsis thaliana
  peptide (1)..(408): Ceres Seq. ID no. 12735397
  misc_feature (246)..(307): Pfam Name: Kelch motif Pfam Description: Kelch motif
  misc_feature (1)..(408): Homolog of NCBI NO: 18405273 NR Description: expressed protein; protein id: At3g27220.1, by cDNA: gi_15081754, supported by cDNA: gi_15912244 [Arabidopsis >gi|9294215|dbj|BAB02117.1| gene_id:K17E12.4~unknown protein
  misc_feature (1)..(408): Homolog of NCBI NO: 15912245 NR Description: AT3g27220/K17E12_4 [Arabidopsis thaliana]
  misc_feature (1)..(408): Homolog of NCBI NO: 29150199 NR Description: hypothetical protein [Oryza sativa (indica
  misc_feature (1)..(406): Homolog of NCBI NO: 38344229 NR Description: OJ991113_30.6 [Oryza sativa (japonica
  misc_feature (8)..(406): Homolog of NCBI NO: 15217949 NR Description: unknown protein; protein id: At1g51540.1
  misc_feature (8)..(406): Homolog of NCBI NO: 28416695 NR Description: At1g51540 [Arabidopsis thaliana]
  misc_feature (84)..(329): Homolog of NCBI NO: 34932909 NR Description: similar to hypothetical protein MGC35097 [Rattus
MLVLYFTSVLGIGFIAAFLCLSSSIPSVSAVFSIWVPVNRPEIQIPIIDSKIVQKRSKQSNDTKDHVRFLSAIFADIPAPELKWEEMESAPVPRLDGYSVQINNLLYVFSGYGSLDYVHSHVDVFNFTDNKWCDRFHTPKEMANSHLGIVTDGRYVYVVSGQLGPQCRGPTSRSFVLDSFTKTWLEFPSLPAPRYAPATQIWRGRLHVMGGSKENRNAVAFDHWSIAVKDGKALDEWREEVPIPRGGPHRACVVANDKLLVIGGQEGDFMAKPNSPIFKCSRRREIFNGEVYMMDEEMKWKMLPPMPKNNSHIESAWIIVNNSIVIVGGTTDWHPVTKRLVLVGEIFRFQLDTLTWSVIGRLPYRVKTAMAGFWNGYLYFTSGQRDRGPDNPQPGKVIGEMWRTKLKF

SEQ ID NO: 96954 - protein, 322 aa, Arabidopsis thaliana
  peptide (1)..(322): Ceres Seq. ID no. 12735398
  misc_feature (160)..(221): Pfam Name: Kelch motif Pfam Description: Kelch motif
  misc_feature (1)..(322): Homolog of NCBI NO: 18405273 NR Description: expressed protein; protein id: At3g27220.1, by cDNA: gi_15081754, supported by cDNA: gi_15912244 [Arabidopsis >gi|9294215|dbj|BAB02117.1| gene_id:K17E12.4~unknown protein
  misc_feature (1)..(322): Homolog of NCBI NO: 15912245 NR Description: AT3g27220/K17E12_4 [Arabidopsis thaliana]
  misc_feature (1)..(322): Homolog of NCBI NO: 29150199 NR Description: hypothetical protein [Oryza sativa (indica
  misc_feature (1)..(320): Homolog of NCBI NO: 38344229 NR Description: OJ991113_30.6 [Oryza sativa (japonica
  misc_feature (1)..(320): Homolog of NCBI NO: 15217949 NR Description: unknown protein; protein id: At1g51540.1
  misc_feature (1)..(320): Homolog of NCBI NO: 28416695 NR Description: At1g51540 [Arabidopsis thaliana]
  misc_feature (1)..(243): Homolog of NCBI NO: 34932909 NR Description: similar to hypothetical protein MGC35097 [Rattus
MESAPVPRLDGYSVQINNLLYVFSGYGSLDYVHSHVDVFNFTDNKWCDRFHTPKEMANSHLGIVTDGRYVYVVSGQLGPQCRGPTSRSFVLDSFTKTWLEFPSLPAPRYAPATQIWRGRLHVMGGSKENRNAVAFDHWSIAVKDGKALDEWREEVPIPRGGPHRACVVANDKLLVIGGQEGDFMAKPNSPIFKCSRRREIFNGEVYMMDEEMKWKMLPPMPKNNSHIESAWIIVNNSIVIVGGTTDWHPVTKRLVLVGEIFRFQLDTLTWSVIGRLPYRVKTAMAGFWNGYLYFTSGQRDRGPDNPQPGKVIGEMWRTKLKF

SEQ ID NO: 96955 - DNA, 849 bp, Arabidopsis thaliana
  misc_feature (1)..(849): Ceres Seq. ID no. 12735399
  misc_feature: MA Experiment ID: 20000355 Result: Down-regulated in Transcription
  misc_feature: MA Experiment 20000355 PARAMETER Experiment Name: At_Siliques_Sub_P Parameter: Age (day) Value: 21
  misc_feature: MA Experiment 20000355 PARAMETER Experiment Name: At_Siliques_Sub_P Parameter: Organism Value: A. thaliana
  misc_feature: MA Experiment 20000355 PARAMETER Experiment Name: At_Siliques_Sub_P Parameter: Plant Line Value: WS
  misc_feature: MA Experiment 20000355 PARAMETER Experiment Name: At_Siliques_Sub_P Parameter: Tissue Value: Less Than 5mm Siliques vs. Whole Plant
atggatcaagatgactggttgggaacgctaagatacgccggtaaggcgcaggataaagtttccgttgacgctctcatgctccggtaccgtccgatcgctccaaagccgacgactggtcagccatgtggtgtggcagataacaacaacaatagctcatacggtatgagcaaacgaaccaaacgaaagtacgttagggtttcgaagaataataaaggcacgtgtcgaggtaagagcagatctgacttgtctgatgatcgggaacaaactgatgtcgtgacgttgcaactcttgccggaaaaatcagatatttccggtgagtactcgccgttggatcaagatagtctcgatccgtcggtgaaatcgataatcggagaggaaacacaagaaaccaacacgtggggtatgtttaacggcagcgtcacggcggagatggagacgtgggtgacggtggagtccgtcacaagcgtgtgtgagggtagtttgagttcccatgcggtggggattacggacgttgagatcgttgataatcttggtaaggacacgtgtccagcgttcgtatcggatggctcgaaccgtgtggtgtgggtcaacgaggcttaccggagaaatgtttccggtgatgattcaacggcgtcagtatcgccggaagttgtggtgtggttggtggcggaggaggcaacggcggcgatgcattgtaactaccaagctttcacgtgtagggtgaggatgcaatacacgtggaaggaaacaaagtataccaaaacggtgccgtgtgatgtgtggaaaatggagtttggtggttttgcatggaggctagacacaacagctgctctgactctctggctttga

SEQ ID NO: 96956 - protein, 282 aa, Arabidopsis thaliana
  peptide (1)..(282): Ceres Seq. ID no. 12735400
  misc_feature (1)..(282): Homolog of NCBI NO: 15232126 NR Description: hypothetical protein; protein id: At3g27250.1 thaliana] >gi|9294218|dbj|BAB02120.1|
  misc_feature (1)..(282): Homolog of NCBI NO: 15237495 NR Description: putative protein; protein id: At5g40800.1 thaliana] >gi|10177959|dbj|BAB11342.1|
  misc_feature (11)..(280): Homolog of NCBI NO: 15240662 NR Description: putative protein; protein id: At5g50360.1, by cDNA: 103870., supported by cDNA: gi_13878116, supported by gi_17104788 [Arabidopsis thaliana] >gi|9758918|dbj|BAB09455.1|
  misc_feature (23)..(280): Homolog of NCBI NO: 15242729 NR Description: putative protein; protein id: At5g63350.1 thaliana] >gi|10177443|dbj|BAB10739.1| to unknown protein [Arabidopsis thaliana]
  misc_feature (11)..(280): Homolog of NCBI NO: 18408645 NR Description: expressed protein; protein id: At3g48510.1, by cDNA: 124275. [Arabidopsis thaliana] >gi|11280671|pir||T46195
  misc_feature (11)..(280): Homolog of NCBI NO: 21537225 NR Description: unknown [Arabidopsis thaliana]
  misc_feature (44)..(280): Homolog of NCBI NO: 15237494 NR Description: putative protein; protein id: At5g40790.1 thaliana] >gi|10177958|dbj|BAB11341.1|
  misc_feature (17)..(157): Homolog of NCBI NO: 15237494 NR Description: putative protein; protein id: At5g40790.1 thaliana] >gi|10177958|dbj|BAB11341.1|
MDQDDWLGTLRYAGKAQDKVSVDALMLRYRPIAPKPTTGQPCGVADNNNNSSYGMSKRTKRKYVRVSKNNKGTCRGKSRSDLSDDREQTDVVTLQLLPEKSDISGEYSPLDQDSLDPSVKSIIGEETQETNTWGMFNGSVTAEMETWVTVESVTSVCEGSLSSHAVGITDVEIVDNLGKDTCPAFVSDGSNRVVWVNEAYRRNVSGDDSTASVSPEVVVWLVAEEATAAMHCNYQAFTCRVRMQYTWKETKYTKTVPCDVWKMEFGGFAWRLDTTAALTLWL

SEQ ID NO: 96957 - protein, 257 aa, Arabidopsis thaliana
  peptide (1)..(257): Ceres Seq. ID no. 12735401
  misc_feature (1)..(257): Homolog of NCBI NO: 15232126 NR Description: hypothetical protein; protein id: At3g27250.1 thaliana] >gi|9294218|dbj|BAB02120.1|
  misc_feature (1)..(257): Homolog of NCBI NO: 15237495 NR Description: putative protein; protein id: At5g40800.1 thaliana] >gi|10177959|dbj|BAB11342.1|
  misc_feature (1)..(255): Homolog of NCBI NO: 15240662 NR Description: putative protein; protein id: At5g50360.1, by cDNA: 103870., supported by cDNA: gi_13878116, supported by gi_17104788 [Arabidopsis thaliana] >gi|9758918|dbj|BAB09455.1|
  misc_feature (1)..(255): Homolog of NCBI NO: 15242729 NR Description: putative protein; protein id: At5g63350.1 thaliana] >gi|10177443|dbj|BAB10739.1| to unknown protein [Arabidopsis thaliana]
  misc_feature (1)..(255): Homolog of NCBI NO: 18408645 NR Description: expressed protein; protein id: At3g48510.1, by cDNA: 124275. [Arabidopsis thaliana] >gi|11280671|pir||T46195
  misc_feature (1)..(255): Homolog of NCBI NO: 21537225 NR Description: unknown [Arabidopsis thaliana]
  misc_feature (19)..(255): Homolog of NCBI NO: 15237494 NR Description: putative protein; protein id: At5g40790.1 thaliana] >gi|10177958|dbj|BAB11341.1|
  misc_feature (1)..(132): Homolog of NCBI NO: 15237494 NR Description: putative protein; protein id: At5g40790.1 thaliana] >gi|10177958|dbj|BAB11341.1|
MLRYRPIAPKPTTGQPCGVADNNNNSSYGMSKRTKRKYVRVSKNNKGTCRGKSRSDLSDDREQTDVVTLQLLPEKSDISGEYSPLDQDSLDPSVKSIIGEETQETNTWGMFNGSVTAEMETWVTVESVTSVCEGSLSSHAVGITDVEIVDNLGKDTCPAFVSDGSNRVVWVNEAYRRNVSGDDSTASVSPEVVVWLVAEEATAAMHCNYQAFTCRVRMQYTWKETKYTKTVPCDVWKMEFGGFAWRLDTTAALTLWL

SEQ ID NO: 96958 - protein, 228 aa, Arabidopsis thaliana
  peptide (1)..(228): Ceres Seq. ID no. 12735402
  misc_feature (1)..(228): Homolog of NCBI NO: 15232126 NR Description: hypothetical protein; protein id: At3g27250.1 thaliana] >gi|9294218|dbj|BAB02120.1|
  misc_feature (1)..(228): Homolog of NCBI NO: 15237495 NR Description: putative protein; protein id: At5g40800.1 thaliana] >gi|10177959|dbj|BAB11342.1|
  misc_feature (1)..(226): Homolog of NCBI NO: 15240662 NR Description: putative protein; protein id: At5g50360.1, by cDNA: 103870., supported by cDNA: gi_13878116, supported by gi_17104788 [Arabidopsis thaliana] >gi|9758918|dbj|BAB09455.1|
  misc_feature (1)..(226): Homolog of NCBI NO: 15242729 NR Description: putative protein; protein id: At5g63350.1 thaliana] >gi|10177443|dbj|BAB10739.1| to unknown protein [Arabidopsis thaliana]
  misc_feature (1)..(226): Homolog of NCBI NO: 18408645 NR Description: expressed protein; protein id: At3g48510.1, by cDNA: 124275. [Arabidopsis thaliana] >gi|11280671|pir||T46195
  misc_feature (1)..(226): Homolog of NCBI NO: 21537225 NR Description: unknown [Arabidopsis thaliana]
  misc_feature (1)..(226): Homolog of NCBI NO: 15237494 NR Description: putative protein; protein id: At5g40790.1 thaliana] >gi|10177958|dbj|BAB11341.1|
  misc_feature (1)..(103): Homolog of NCBI NO: 15237494 NR Description: putative protein; protein id: At5g40790.1 thaliana] >gi|10177958|dbj|BAB11341.1|
MSKRTKRKYVRVSKNNKGTCRGKSRSDLSDDREQTDVVTLQLLPEKSDISGEYSPLDQDSLDPSVKSIIGEETQETNTWGMFNGSVTAEMETWVTVESVTSVCEGSLSSHAVGITDVEIVDNLGKDTCPAFVSDGSNRVVWVNEAYRRNVSGDDSTASVSPEVVVWLVAEEATAAMHCNYQAFTCRVRMQYTWKETKYTKTVPCDVWKMEFGGFAWRLDTTAALTLWL

SEQ ID NO: 96959 - DNA, 1170 bp, Arabidopsis thaliana
  misc_feature (1)..(1170): Ceres Seq. ID no. 12735464
  misc_feature: MA Experiment ID: 20000315 Result: Down-regulated in Transcription
  misc_feature: MA Experiment 20000315 PARAMETER Experiment Name: At_14day_Shoots-Roots_Sub_P Parameter: Age (day) Value: 14
  misc_feature: MA Experiment 20000315 PARAMETER Experiment Name: At_14day_Shoots-Roots_Sub_P Parameter: Organism Value: A. thaliana
  misc_feature: MA Experiment 20000315 PARAMETER Experiment Name: At_14day_Shoots-Roots_Sub_P Parameter: Plant Line Value: WS
  misc_feature: MA Experiment 20000315 PARAMETER Experiment Name: At_14day_Shoots-Roots_Sub_P Parameter: Tissue Value: Shoots vs. Whole Plant
  misc_feature: MA Experiment ID: 20000328 Result: Down-regulated in Transcription
  misc_feature: MA Experiment 20000328 PARAMETER Experiment Name: At_42deg_Heat_Sub_P Parameter: Age (day) Value: 14
  misc_feature: MA Experiment 20000328 PARAMETER Experiment Name: At_42deg_Heat_Sub_P Parameter: Organism Value: A. thaliana
  misc_feature: MA Experiment 20000328 PARAMETER Experiment Name: At_42deg_Heat_Sub_P Parameter: Plant Line Value: WS
  misc_feature: MA Experiment 20000328 PARAMETER Experiment Name: At_42deg_Heat_Sub_P Parameter: Temperature (deg C) Value: 42 vs. 22
  misc_feature: MA Experiment 20000328 PARAMETER Experiment Name: At_42deg_Heat_Sub_P Parameter: Timepoint (hr) Value: 6
  misc_feature: MA Experiment 20000328 PARAMETER Experiment Name: At_42deg_Heat_Sub_P Parameter: Tissue Value: Aerial
  misc_feature: MA Experiment ID: 20000347 Result: Up-regulated in Transcription
  misc_feature: MA Experiment 20000347 PARAMETER Experiment Name: At_2mM_SA_Sub_P Parameter: Age (day) Value: 14
  misc_feature: MA Experiment 20000347 PARAMETER Experiment Name: At_2mM_SA_Sub_P Parameter: Organism Value: A. thaliana
  misc_feature: MA Experiment 20000347 PARAMETER Experiment Name: At_2mM_SA_Sub_P Parameter: Plant Line Value: WS
  misc_feature: MA Experiment 20000347 PARAMETER Experiment Name: At_2mM_SA_Sub_P Parameter: Timepoint (hr) Value: 6
  misc_feature: MA Experiment 20000347 PARAMETER Experiment Name: At_2mM_SA_Sub_P Parameter: Tissue Value: Aerial
  misc_feature: MA Experiment 20000347 PARAMETER Experiment Name: At_2mM_SA_Sub_P Parameter: Treatment Value: 2mM SA vs. No Treatment
atggcggagtctgcgatccgaaccatcgtcgaatcaattcactcatcgccgacgcaagccgtcgtgtatctctccggcggtgcctctcagtctttaggttggttaatgtcagttcctggagcttcgaacacacttctcgaagccgtggttccgtattccatgatctctatggttcaattactcggcagggttccgaaccaacactgtagccaatcaatggcgaatgaaatggctttgttagcttataatcgtgctcttaagctttctaagccaggatgtgcggttcttggtgttggttttactggaacgttagcaacttctcgtccaaagcgtggggatcataggttctttttgtcgataagagcttccaaccggatatgggaaacttcagttactctaacaaagggaaaacgaagccgagaggaagaagataaagtggcaagctctgtactgattcaggctatggctaaggcatgccaagtttctgagacacttgactctggcttgactgattctgaggtgcttaatgagtctgtaatccagtttagtgaagaagaagaactagaacagcttatagatggacaaatatgctctaagatctatccattttctaaagaatcatacgggtcggataaagatagaaagattatactgcctggttcttttaacccattacatgacggtgatctcaagctgttggaagctgctatgagtgtttctgaggaaggagggtatccatgttttgaaatatctgcactgaatgcagacaaaccatcgcttacagttacagagattaaagatcgtgtcaaacaatttgaagtacttgaaaagacggtaatagtttcaaatcagcctttcttctacaagaaagctgaactcttcccaggaagcagttttgtaattggtgctgatactgcagcaaggattgttaatccaaagtactatgaaggaagccacaaaaggatgttggaggtactaggtgattgcaaacgaacaggttgcaagttccttgttggtggccgtaatgtagatagtgtattcaaggttcttgacgatcatgagattccaaaggaaataagtacaatgtttacctcaatttcagcagatacattccgtatggatatatcctctacagagctaagaaagaaccaaggaggtgttatttcataa

SEQ ID NO: 96960 - protein, 389 aa, Arabidopsis thaliana
  peptide (1)..(389): Ceres Seq. ID no. 12735465
  misc_feature (1)..(389): Homolog of NCBI NO: 15232221 NR Description: unknown protein; protein id: At3g27610.1
  misc_feature (1)..(389): Homolog of NCBI NO: 9294466 NR Description: gb|AAD14522.1~gene_id:MGF10.2~similar to unknown
  misc_feature (1)..(386): Homolog of NCBI NO: 30677893 NR Description: expressed protein [Arabidopsis thaliana]
  misc_feature (1)..(386): Homolog of NCBI NO: 26451899 NR Description: unknown protein [Arabidopsis thaliana]
  misc_feature (1)..(386): Homolog of NCBI NO: 30677890 NR Description: expressed protein [Arabidopsis thaliana]
  misc_feature (1)..(386): Homolog of NCBI NO: 21537099 NR Description: unknown [Arabidopsis thaliana]
  misc_feature (151)..(272): Homolog of NCBI NO: 34911372 NR Description: P0034C09.17 [Oryza sativa (japonica
  misc_feature (3)..(96): Homolog of NCBI NO: 34911372 NR Description: P0034C09.17 [Oryza sativa (japonica
  misc_feature (312)..(385): Homolog of NCBI NO: 34911372 NR Description: P0034C09.17 [Oryza sativa (japonica
  misc_feature (1)..(153): Homolog of NCBI NO: 25371182 NR Description: hypothetical protein At2g01220 [imported] - thaliana >gi|4262229|gb|AAD14522.1| unknown protein [Arabidopsis
MAESAIRTIVESIHSSPTQAVVYLSGGASQSLGWLMSVPGASNTLLEAVVPYSMISMVQLLGRVPNQHCSQSMANEMALLAYNRALKLSKPGCAVLGVGFTGTLATSRPKRGDHRFFLSIRASNRIWETSVTLTKGKRSREEEDKVASSVLIQAMAKACQVSETLDSGLTDSEVLNESVIQFSEEEELEQLIDGQICSKIYPFSKESYGSDKDRKIILPGSFNPLHDGDLKLLEAAMSVSEEGGYPCFEISALNADKPSLTVTEIKDRVKQFEVLEKTVIVSNQPFFYKKAELFPGSSFVIGADTAARIVNPKYYEGSHKRMLEVLGDCKRTGCKFLVGGRNVDSVFKVLDDHEIPKEISTMFTSISADTFRMDISSTELRKNQGGVIS

SEQ ID NO: 96961 - protein, 354 aa, Arabidopsis thaliana
  peptide (1)..(354): Ceres Seq. ID no. 12735466
  misc_feature (1)..(354): Homolog of NCBI NO: 15232221 NR Description: unknown protein; protein id: At3g27610.1
  misc_feature (1)..(354): Homolog of NCBI NO: 9294466 NR Description: gb|AAD14522.1~gene_id:MGF10.2~similar to unknown
  misc_feature (1)..(351): Homolog of NCBI NO: 30677893 NR Description: expressed protein [Arabidopsis thaliana]
  misc_feature (1)..(351): Homolog of NCBI NO: 26451899 NR Description: unknown protein [Arabidopsis thaliana]
  misc_feature (1)..(351): Homolog of NCBI NO: 30677890 NR Description: expressed protein [Arabidopsis thaliana]
  misc_feature (1)..(351): Homolog of NCBI NO: 21537099 NR Description: unknown [Arabidopsis thaliana]
  misc_feature (116)..(237): Homolog of NCBI NO: 34911372 NR Description: P0034C09.17 [Oryza sativa (japonica
  misc_feature (1)..(61): Homolog of NCBI NO: 34911372 NR Description: P0034C09.17 [Oryza sativa (japonica
  misc_feature (277)..(350): Homolog of NCBI NO: 34911372 NR Description: P0034C09.17 [Oryza sativa (japonica
  misc_feature (1)..(118): Homolog of NCBI NO: 25371182 NR Description: hypothetical protein At2g01220 [imported] - thaliana >gi|4262229|gb|AAD14522.1| unknown protein [Arabidopsis
MSVPGASNTLLEAVVPYSMISMVQLLGRVPNQHCSQSMANEMALLAYNRALKLSKPGCAVLGVGFTGTLATSRPKRGDHRFFLSIRASNRIWETSVTLTKGKRSREEEDKVASSVLIQAMAKACQVSETLDSGLTDSEVLNESVIQFSEEEELEQLIDGQICSKIYPFSKESYGSDKDRKIILPGSFNPLHDGDLKLLEAAMSVSEEGGYPCFEISALNADKPSLTVTEIKDRVKQFEVLEKTVIVSNQPFFYKKAELFPGSSFVIGADTAARIVNPKYYEGSHKRMLEVLGDCKRTGCKFLVGGRNVDSVFKVLDDHEIPKEISTMFTSISADTFRMDISSTELRKNQGGVIS

SEQ ID NO: 96962 - protein, 336 aa, Arabidopsis thaliana
  peptide (1)..(336): Ceres Seq. ID no. 12735467
  misc_feature (1)..(336): Homolog of NCBI NO: 15232221 NR Description: unknown protein; protein id: At3g27610.1
  misc_feature (1)..(336): Homolog of NCBI NO: 9294466 NR Description: gb|AAD14522.1~gene_id:MGF10.2~similar to unknown
  misc_feature (1)..(333): Homolog of NCBI NO: 30677893 NR Description: expressed protein [Arabidopsis thaliana]
  misc_feature (1)..(333): Homolog of NCBI NO: 26451899 NR Description: unknown protein [Arabidopsis thaliana]
  misc_feature (1)..(333): Homolog of NCBI NO: 30677890 NR Description: expressed protein [Arabidopsis thaliana]
  misc_feature (1)..(333): Homolog of NCBI NO: 21537099 NR Description: unknown [Arabidopsis thaliana]
  misc_feature (98)..(219): Homolog of NCBI NO: 34911372 NR Description: P0034C09.17 [Oryza sativa (japonica
  misc_feature (1)..(43): Homolog of NCBI NO: 34911372 NR Description: P0034C09.17 [Oryza sativa (japonica
  misc_feature (259)..(332): Homolog of NCBI NO: 34911372 NR Description: P0034C09.17 [Oryza sativa (japonica
  misc_feature (1)..(100): Homolog of NCBI NO: 25371182 NR Description: hypothetical protein At2g01220 [imported] - thaliana >gi|4262229|gb|AAD14522.1| unknown protein [Arabidopsis
MISMVQLLGRVPNQHCSQSMANEMALLAYNRALKLSKPGCAVLGVGFTGTLATSRPKRGDHRFFLSIRASNRIWETSVTLTKGKRSREEEDKVASSVLIQAMAKACQVSETLDSGLTDSEVLNESVIQFSEEEELEQLIDGQICSKIYPFSKESYGSDKDRKIILPGSFNPLHDGDLKLLEAAMSVSEEGGYPCFEISALNADKPSLTVTEIKDRVKQFEVLEKTVIVSNQPFFYKKAELFPGSSFVIGADTAARIVNPKYYEGSHKRMLEVLGDCKRTGCKFLVGGRNVDSVFKVLDDHEIPKEISTMFTSISADTFRMDISSTELRKNQGGVIS

SEQ ID NO: 96963 - DNA, 687 bp, Arabidopsis thaliana
  misc_feature (1)..(687): Ceres Seq. ID no. 12735496
  misc_feature: MA Experiment ID: 20000328 Result: Down-regulated in Transcription
  misc_feature: MA Experiment 20000328 PARAMETER Experiment Name: At_42deg_Heat_Sub_P Parameter: Age (day) Value: 14
  misc_feature: MA Experiment 20000328 PARAMETER Experiment Name: At_42deg_Heat_Sub_P Parameter: Organism Value: A. thaliana
  misc_feature: MA Experiment 20000328 PARAMETER Experiment Name: At_42deg_Heat_Sub_P Parameter: Plant Line Value: WS
  misc_feature: MA Experiment 20000328 PARAMETER Experiment Name: At_42deg_Heat_Sub_P Parameter: Temperature (deg C) Value: 42 vs. 22
  misc_feature: MA Experiment 20000328 PARAMETER Experiment Name: At_42deg_Heat_Sub_P Parameter: Timepoint (hr) Value: 6
  misc_feature: MA Experiment 20000328 PARAMETER Experiment Name: At_42deg_Heat_Sub_P Parameter: Tissue Value: Aerial
atgagaataaggagaagagatgaaaaagagaatcaagaatacaagaaaggtttatggacagttgaagaagacaacatccttatggactatgttcttaatcatggcactggccaatggaaccgcatcgtcagaaaaactgggctaaagagatgtgggaaaagttgtagactgagatggatgaattatttgagccctaatgtgaacaaaggcaatttcactgaacaagaagaagacctcattattcgtctccacaagctcctcggcaatagatggtctttgatagctaaaagagtaccgggaagaacagataaccaagtcaagaactactggaacactcatctcagcaaaaaactcgtcggagattactcctccgccgtcaaaaccaccggagaagacgacgactctccaccgtcattgttcatcactgccgccacaccttcttcttgtcatcatcaacaagaaaatatctacgagaatatagccaagagctttaacggcgtcgtatcagcttcgtacgaggataaaccaaaacaagaactggctcaaaaagatgtcctaatggcaactactaatgatccaagtcactattatggcaataacgctttatgggttcatgacgacgattttgagcttagttcactcgtaatgatgaattttgcttctggtgatgttgagtactgcctttag

SEQ ID NO: 96964 - protein, 228 aa, Arabidopsis thaliana
  peptide (1)..(228): Ceres Seq. ID no. 12735497
  misc_feature (16)..(63): Pfam Name: Myb-like DNA-binding domain Pfam Description: Myb-like DNA-binding domain
  misc_feature (1)..(228): Homolog of NCBI NO: 15232860 NR Description: MYB family transcription factor (GL1); protein At3g27920.1, supported by cDNA: gi_20162512 [Arabidopsis >gi|17865662|sp|P27900|GL1_ARATH Trichome differentiation protein
  misc_feature (1)..(228): Homolog of NCBI NO: 15529304 NR Description: glabrous 1 [Arabidopsis thaliana]
  misc_feature (1)..(228): Homolog of NCBI NO: 9367652 NR Description: Glabrous 1 [Arabidopsis thaliana]
  misc_feature (1)..(228): Homolog of NCBI NO: 68888 NR Description: trichome differentiation protein GL1 - thaliana >gi|166780|gb|AAC97387.1| GL1 [Arabidopsis thaliana] glabrous 1 [Arabidopsis thaliana]
  misc_feature (1)..(228): Homolog of NCBI NO: 15529322 NR Description: glabrous 1 [Arabidopsis thaliana]
  misc_feature (1)..(228): Homolog of NCBI NO: 15529344 NR Description: glabrous 1 [Arabidopsis thaliana]
  misc_feature (1)..(227): Homolog of NCBI NO: 15529362 NR Description: glabrous 1 [Arabidopsis lyrata]
  misc_feature (1)..(201): Homolog of NCBI NO: 438453 NR Description: GL1 mutant [Arabidopsis thaliana]
  misc_feature (1)..(181): Homolog of NCBI NO: 9367650 NR Description: Glabrous 1 [Arabidopsis thaliana]
  misc_feature (1)..(228): Homolog of NCBI NO: 15242649 NR Description: myb-related protein; protein id: At5g40330.1
MRIRRRDEKENQEYKKGLWTVEEDNILMDYVLNHGTGQWNRIVRKTGLKRCGKSCRLRWMNYLSPNVNKGNFTEQEEDLIIRLHKLLGNRWSLIAKRVPGRTDNQVKNYWNTHLSKKLVGDYSSAVKTTGEDDDSPPSLFITAATPSSCHHQQENIYENIAKSFNGVVSASYEDKPKQELAQKDVLMATTNDPSHYYGNNALWVHDDDFELSSLVMMNFASGDVEYCL

SEQ ID NO: 96965 - protein, 201 aa, Arabidopsis thaliana
  peptide (1)..(201): Ceres Seq. ID no. 12735498
  misc_feature (1)..(36): Pfam Name: Myb-like DNA-binding domain Pfam Description: Myb-like DNA-binding domain
  misc_feature (1)..(201): Homolog of NCBI NO: 15232860 NR Description: MYB family transcription factor (GL1); protein At3g27920.1, supported by cDNA: gi_20162512 [Arabidopsis >gi|17865662|sp|P27900|GL1_ARATH Trichome differentiation protein
  misc_feature (1)..(201): Homolog of NCBI NO: 15529304 NR Description: glabrous 1 [Arabidopsis thaliana]
  misc_feature (1)..(201): Homolog of NCBI NO: 9367652 NR Description: Glabrous 1 [Arabidopsis thaliana]
  misc_feature (1)..(201): Homolog of NCBI NO: 68888 NR Description: trichome differentiation protein GL1 - thaliana >gi|166780|gb|AAC97387.1| GL1 [Arabidopsis thaliana] glabrous 1 [Arabidopsis thaliana]
  misc_feature (1)..(201): Homolog of NCBI NO: 15529322 NR Description: glabrous 1 [Arabidopsis thaliana]
  misc_feature (1)..(201): Homolog of NCBI NO: 15529344 NR Description: glabrous 1 [Arabidopsis thaliana]
  misc_feature (1)..(200): Homolog of NCBI NO: 15529362 NR Description: glabrous 1 [Arabidopsis lyrata]
  misc_feature (1)..(174): Homolog of NCBI NO: 438453 NR Description: GL1 mutant [Arabidopsis thaliana]
  misc_feature (1)..(154): Homolog of NCBI NO: 9367650 NR Description: Glabrous 1 [Arabidopsis thaliana]
  misc_feature (1)..(201): Homolog of NCBI NO: 15242649 NR Description: myb-related protein; protein id: At5g40330.1
MDYVLNHGTGQWNRIVRKTGLKRCGKSCRLRWMNYLSPNVNKGNFTEQEEDLIIRLHKLLGNRWSLIAKRVPGRTDNQVKNYWNTHLSKKLVGDYSSAVKTTGEDDDSPPSLFITAATPSSCHHQQENIYENIAKSFNGVVSASYEDKPKQELAQKDVLMATTNDPSHYYGNNALWVHDDDFELSSLVMMNFASGDVEYCL

SEQ ID NO: 96966 - protein, 169 aa, Arabidopsis thaliana
  peptide (1)..(169): Ceres Seq. ID no. 12735499
  misc_feature (1)..(169): Homolog of NCBI NO: 15232860 NR Description: MYB family transcription factor (GL1); protein At3g27920.1, supported by cDNA: gi_20162512 [Arabidopsis >gi|17865662|sp|P27900|GL1_ARATH Trichome differentiation protein
  misc_feature (1)..(169): Homolog of NCBI NO: 15529304 NR Description: glabrous 1 [Arabidopsis thaliana]
  misc_feature (1)..(169): Homolog of NCBI NO: 9367652 NR Description: Glabrous 1 [Arabidopsis thaliana]
  misc_feature (1)..(169): Homolog of NCBI NO: 68888 NR Description: trichome differentiation protein GL1 - thaliana >gi|166780|gb|AAC97387.1| GL1 [Arabidopsis thaliana] glabrous 1 [Arabidopsis thaliana]
  misc_feature (1)..(169): Homolog of NCBI NO: 15529322 NR Description: glabrous 1 [Arabidopsis thaliana]
  misc_feature (1)..(169): Homolog of NCBI NO: 15529344 NR Description: glabrous 1 [Arabidopsis thaliana]
  misc_feature (1)..(168): Homolog of NCBI NO: 15529362 NR Description: glabrous 1 [Arabidopsis lyrata]
  misc_feature (1)..(142): Homolog of NCBI NO: 438453 NR Description: GL1 mutant [Arabidopsis thaliana]
  misc_feature (1)..(122): Homolog of NCBI NO: 9367650 NR Description: Glabrous 1 [Arabidopsis thaliana]
  misc_feature (1)..(169): Homolog of NCBI NO: 15242649 NR Description: myb-related protein; protein id: At5g40330.1
MNYLSPNVNKGNFTEQEEDLIIRLHKLLGNRWSLIAKRVPGRTDNQVKNYWNTHLSKKLVGDYSSAVKTTGEDDDSPPSLFITAATPSSCHHQQENIYENIAKSFNGVVSASYEDKPKQELAQKDVLMATTNDPSHYYGNNALWVHDDDFELSSLVMMNFASGDVEYCL

SEQ ID NO: 96967 - DNA, 1131 bp, Arabidopsis thaliana
  misc_feature (1)..(1131): Ceres Seq. ID no. 12735519
  misc_feature: MA Experiment ID: 20000184 Result: Up-regulated in Transcription
  misc_feature: MA Experiment 20000184 PARAMETER Experiment Name: At_Shoots__P Parameter: Age (day) Value: 7
  misc_feature: MA Experiment 20000184 PARAMETER Experiment Name: At_Shoots__P Parameter: Tissue Value: Shoots vs. Whole Plant
  misc_feature: MA Experiment ID: 20000265 Result: Up-regulated in Transcription
  misc_feature: MA Experiment 20000265 PARAMETER Experiment Name: At_Open_Flower_P Parameter: Age (day) Value: 21
  misc_feature: MA Experiment 20000265 PARAMETER Experiment Name: At_Open_Flower_P Parameter: Plant Line Value: WS
  misc_feature: MA Experiment 20000265 PARAMETER Experiment Name: At_Open_Flower_P Parameter: Tissue Value: Closed Flower vs. Whole Plant
  misc_feature: MA Experiment ID: 20000438 Result: Up-regulated in Transcription
  misc_feature: MA Experiment 20000438 PARAMETER Experiment Name: At_Shoots__P Parameter: Age (day) Value: 14
  misc_feature: MA Experiment 20000438 PARAMETER Experiment Name: At_Shoots__P Parameter: Tissue Value: Shoots vs. Whole Plant
  misc_feature: MA Experiment ID: 20000573 Result: Down-regulated in Transcription
  misc_feature: MA Experiment 20000573 PARAMETER Experiment Name: At_100uM_ABA_Mutants__P Parameter: Organism Value: A. thaliana
  misc_feature: MA Experiment 20000573 PARAMETER Experiment Name: At_100uM_ABA_Mutants__P Parameter: Plant Line Value: CS22 vs. Ler wt
  misc_feature: MA Experiment 20000573 PARAMETER Experiment Name: At_100uM_ABA_Mutants__P Parameter: Timepoint (hr) Value: N/A
  misc_feature: MA Experiment 20000573 PARAMETER Experiment Name: At_100uM_ABA_Mutants__P Parameter: Tissue Value: Whole Plant
  misc_feature: MA Experiment 20000573 PARAMETER Experiment Name: At_100uM_ABA_Mutants__P Parameter: Treatment Value: None
  misc_feature: MA Experiment ID: 20001248 Result: Down-regulated in Transcription
  misc_feature: MA Experiment 20001248 PARAMETER Experiment Name: At_Far-red-induction_P Parameter: Age (day) Value: 7
  misc_feature: MA Experiment 20001248 PARAMETER Experiment Name: At_Far-red-induction_P Parameter: Light Value: Far-red vs. White
  misc_feature: MA Experiment 20001248 PARAMETER Experiment Name: At_Far-red-induction_P Parameter: Organism Value: A. thaliana
  misc_feature: MA Experiment 20001248 PARAMETER Experiment Name: At_Far-red-induction_P Parameter: Plant Line Value: Columbia
  misc_feature: MA Experiment 20001248 PARAMETER Experiment Name: At_Far-red-induction_P Parameter: Timepoint (hr) Value: 4
  misc_feature: MA Experiment 20001248 PARAMETER Experiment Name: At_Far-red-induction_P Parameter: Tissue Value: Whole Plant
  misc_feature: MA Experiment ID: 20001906 Result: Up-regulated in Transcription
  misc_feature: MA Experiment 20001906 PARAMETER Experiment Name: At_Drought_Reproduction_P Parameter: Age (day) Value: 35
  misc_feature: MA Experiment 20001906 PARAMETER Experiment Name: At_Drought_Reproduction_P Parameter: Organism Value: A. thaliana
  misc_feature: MA Experiment 20001906 PARAMETER Experiment Name: At_Drought_Reproduction_P Parameter: Plant Line Value: WS
  misc_feature: MA Experiment 20001906 PARAMETER Experiment Name: At_Drought_Reproduction_P Parameter: Timepoint (day) Value: 5
  misc_feature: MA Experiment 20001906 PARAMETER Experiment Name: At_Drought_Reproduction_P Parameter: Tissue Value: Siliques
  misc_feature: MA Experiment 20001906 PARAMETER Experiment Name: At_Drought_Reproduction_P Parameter: Treatment Value: Drought vs. No Drought
  misc_feature: MA Experiment ID: 20001908 Result: Up-regulated in Transcription
  misc_feature: MA Experiment 20001908 PARAMETER Experiment Name: At_Drought_Reproduction_P Parameter: Age (day) Value: 40
  misc_feature: MA Experiment 20001908 PARAMETER Experiment Name: At_Drought_Reproduction_P Parameter: Organism Value: A. thaliana
  misc_feature: MA Experiment 20001908 PARAMETER Experiment Name: At_Drought_Reproduction_P Parameter: Plant Line Value: WS
  misc_feature: MA Experiment 20001908 PARAMETER Experiment Name: At_Drought_Reproduction_P Parameter: Timepoint (day) Value: 10
  misc_feature: MA Experiment 20001908 PARAMETER Experiment Name: At_Drought_Reproduction_P Parameter: Tissue Value: Siliques
  misc_feature: MA Experiment 20001908 PARAMETER Experiment Name: At_Drought_Reproduction_P Parameter: Treatment Value: Drought vs. No Drought
atgatgaaactcctcttggtggtggcaacttctgttgcccttatctttagcgtcactgatttatccggtgagggaccaaaacatggaggagaatccatgttgacagtccaaatccctgatttccgtctgattcctaccaccggagctttgggaccggagagttttgtctttgattttttcggcgatggtccttacaccggtttatctgacggtcgaattgttaagtggctagctaatgagagccgttggatcgatttcgccgtcaccacctccgcaagagaaggttgtgagggcccgcacgagcaccaacgaacagaacacgtgtgtggacgaccattgggccttgcctttgacaaatccactggtgacctttatatagccgatgcttatatgggccttcttaaagttggcccaacaggtggtgtcgccactcaggtgttaccacgtgagctaaatgaggcccttcgatttaccaattctttggatatcaatccacggaccggagttgtctactttaccgacagtagttcggtttatcaacggaggaactatataggggcgatgatgagtggggacaaaactggtagactgatgaagtacgacaacacgaaacaagtgaccactcttctaagcaacttagcgtttgtaaacggtgtcgctttaagccaaaacggtgattaccttctcgtcgtcgagaccgccatgtgtcgtatcttacgttactggctcaacgaaacgtcggtaaagtctcaatctcacgataactacgagattttcgcggaggggctccctgggtttccagacaacataaagagaagtccacgtggcggattctgggtaggcttgaacacaaaacactcaaagctgacaaagttcgccatgtcgaacgcgtggcttggacgtgccgctttgggcctgccggtggattggatgaaggtccattcggtttgggccaggtacaatgggaacggcatggccgtgaggttgagcgaggatagtggcgttatattagaggtattcgaaggtaaaaatgaaaataagtggatatctataagtgaggttgaagaaaaagatggaactctttgggttggatcggtgaatactcctttcgctggcatgtataaaatctaa

SEQ ID NO: 96968 - protein, 376 aa, Arabidopsis thaliana
  peptide (1)..(376): Ceres Seq. ID no. 12735520
  misc_feature (6)..(371): Pfam Name: Strictosidine synthase Pfam Description: Strictosidine synthase
  misc_feature (1)..(376): Homolog of NCBI NO: 15227323 NR Description: strictosidine synthase-related; protein id: [Arabidopsis thaliana] >gi|25335890|pir||A84840 probable
  misc_feature (1)..(376): Homolog of NCBI NO: 3342552 NR Description: putative strictosidine synthase [Arabidopsis
  misc_feature (2)..(376): Homolog of NCBI NO: 11280567 NR Description: hypothetical protein F24I3.110 - Arabidopsis >gi|6911873|emb|CAB72173.1| putative protein [Arabidopsis
  misc_feature (2)..(376): Homolog of NCBI NO: 30694556 NR Description: strictosidine synthase-related [Arabidopsis
  misc_feature (51)..(376): Homolog of NCBI NO: 22326950 NR Description: similar to strictosidine synthase-related; id: At5g22020.1 [Arabidopsis thaliana]
  misc_feature (51)..(374): Homolog of NCBI NO: 40538997 NR Description: putative strictosidine synthase [Oryza sativa
  misc_feature (51)..(376): Homolog of NCBI NO: 18390900 NR Description: strictosidine synthase-related; protein id: supported by cDNA: gi_16930480, supported by cDNA: gi_17381181 thaliana] >gi|16930481|gb|AAL31926.1|AF419594_1 At1g08470/T27G7_9
  misc_feature (51)..(247): Homolog of NCBI NO: 25335889 NR Description: protein T27G7.16 [imported] - Arabidopsis >gi|6664319|gb|AAF22901.1|AC006932_18 T27G7.16 [Arabidopsis
  misc_feature (223)..(376): Homolog of NCBI NO: 25335889 NR Description: protein T27G7.16 [imported] - Arabidopsis >gi|6664319|gb|AAF22901.1|AC006932_18 T27G7.16 [Arabidopsis
  misc_feature (42)..(349): Homolog of NCBI NO: 8489790 NR Description: putative strictosidine synthase [Lycopersicon
MMKLLLVVATSVALIFSVTDLSGEGPKHGGESMLTVQIPDFRLIPTTGALGPESFVFDFFGDGPYTGLSDGRIVKWLANESRWIDFAVTTSAREGCEGPHEHQRTEHVCGRPLGLAFDKSTGDLYIADAYMGLLKVGPTGGVATQVLPRELNEALRFTNSLDINPRTGVVYFTDSSSVYQRRNYIGAMMSGDKTGRLMKYDNTKQVTTLLSNLAFVNGVALSQNGDYLLVVETAMCRILRYWLNETSVKSQSHDNYEIFAEGLPGFPDNIKRSPRGGFWVGLNTKHSKLTKFAMSNAWLGRAALGLPVDWMKVHSVWARYNGNGMAVRLSEDSGVILEVFEGKNENKWISISEVEEKDGTLWVGSVNTPFAGMYKI

SEQ ID NO: 96969 - protein, 375 aa, Arabidopsis thaliana
  peptide (1)..(375): Ceres Seq. ID no. 12735521
  misc_feature (5)..(370): Pfam Name: Strictosidine synthase Pfam Description: Strictosidine synthase
  misc_feature (1)..(375): Homolog of NCBI NO: 15227323 NR Description: strictosidine synthase-related; protein id: [Arabidopsis thaliana] >gi|25335890|pir||A84840 probable
  misc_feature (1)..(375): Homolog of NCBI NO: 3342552 NR Description: putative strictosidine synthase [Arabidopsis
  misc_feature (1)..(375): Homolog of NCBI NO: 11280567 NR Description: hypothetical protein F24I3.110 - Arabidopsis >gi|6911873|emb|CAB72173.1| putative protein [Arabidopsis
  misc_feature (1)..(375): Homolog of NCBI NO: 30694556 NR Description: strictosidine synthase-related [Arabidopsis
  misc_feature (50)..(375): Homolog of NCBI NO: 22326950 NR Description: similar to strictosidine synthase-related; id: At5g22020.1 [Arabidopsis thaliana]
  misc_feature (50)..(373): Homolog of NCBI NO: 40538997 NR Description: putative strictosidine synthase [Oryza sativa
  misc_feature (50)..(375): Homolog of NCBI NO: 18390900 NR Description: strictosidine synthase-related; protein id: supported by cDNA: gi_16930480, supported by cDNA: gi_17381181 thaliana] >gi|16930481|gb|AAL31926.1|AF419594_1 At1g08470/T27G7_9
  misc_feature (50)..(246): Homolog of NCBI NO: 25335889 NR Description: protein T27G7.16 [imported] - Arabidopsis >gi|6664319|gb|AAF22901.1|AC006932_18 T27G7.16 [Arabidopsis
  misc_feature (222)..(375): Homolog of NCBI NO: 25335889 NR Description: protein T27G7.16 [imported] - Arabidopsis >gi|6664319|gb|AAF22901.1|AC006932_18 T27G7.16 [Arabidopsis
  misc_feature (41)..(348): Homolog of NCBI NO: 8489790 NR Description: putative strictosidine synthase [Lycopersicon
MKLLLVVATSVALIFSVTDLSGEGPKHGGESMLTVQIPDFRLIPTTGALGPESFVFDFFGDGPYTGLSDGRIVKWLANESRWIDFAVTTSAREGCEGPHEHQRTEHVCGRPLGLAFDKSTGDLYIADAYMGLLKVGPTGGVATQVLPRELNEALRFTNSLDINPRTGVVYFTDSSSVYQRRNYIGAMMSGDKTGRLMKYDNTKQVTTLLSNLAFVNGVALSQNGDYLLVVETAMCRILRYWLNETSVKSQSHDNYEIFAEGLPGFPDNIKRSPRGGFWVGLNTKHSKLTKFAMSNAWLGRAALGLPVDWMKVHSVWARYNGNGMAVRLSEDSGVILEVFEGKNENKWISISEVEEKDGTLWVGSVNTPFAGMYKI

SEQ ID NO: 96970 - protein, 344 aa, Arabidopsis thaliana
  peptide (1)..(344): Ceres Seq. ID no. 12735522
  misc_feature (1)..(339): Pfam Name: Strictosidine synthase Pfam Description: Strictosidine synthase
  misc_feature (1)..(344): Homolog of NCBI NO: 15227323 NR Description: strictosidine synthase-related; protein id: [Arabidopsis thaliana] >gi|25335890|pir||A84840 probable
  misc_feature (1)..(344): Homolog of NCBI NO: 3342552 NR Description: putative strictosidine synthase [Arabidopsis
  misc_feature (1)..(344): Homolog of NCBI NO: 11280567 NR Description: hypothetical protein F24I3.110 - Arabidopsis >gi|6911873|emb|CAB72173.1| putative protein [Arabidopsis
  misc_feature (1)..(344): Homolog of NCBI NO: 30694556 NR Description: strictosidine synthase-related [Arabidopsis
  misc_feature (19)..(344): Homolog of NCBI NO: 22326950 NR Description: similar to strictosidine synthase-related; id: At5g22020.1 [Arabidopsis thaliana]
  misc_feature (19)..(342): Homolog of NCBI NO: 40538997 NR Description: putative strictosidine synthase [Oryza sativa
  misc_feature (19)..(344): Homolog of NCBI NO: 18390900 NR Description: strictosidine synthase-related; protein id: supported by cDNA: gi_16930480, supported by cDNA: gi_17381181 thaliana] >gi|16930481|gb|AAL31926.1|AF419594_1 At1g08470/T27G7_9
  misc_feature (19)..(215): Homolog of NCBI NO: 25335889 NR Description: protein T27G7.16 [imported] - Arabidopsis >gi|6664319|gb|AAF22901.1|AC006932_18 T27G7.16 [Arabidopsis
  misc_feature (191)..(344): Homolog of NCBI NO: 25335889 NR Description: protein T27G7.16 [imported] - Arabidopsis >gi|6664319|gb|AAF22901.1|AC006932_18 T27G7.16 [Arabidopsis
  misc_feature (10)..(317): Homolog of NCBI NO: 8489790 NR Description: putative strictosidine synthase [Lycopersicon
MLTVQIPDFRLIPTTGALGPESFVFDFFGDGPYTGLSDGRIVKWLANESRWIDFAVTTSAREGCEGPHEHQRTEHVCGRPLGLAFDKSTGDLYIADAYMGLLKVGPTGGVATQVLPRELNEALRFTNSLDINPRTGVVYFTDSSSVYQRRNYIGAMMSGDKTGRLMKYDNTKQVTTLLSNLAFVNGVALSQNGDYLLVVETAMCRILRYWLNETSVKSQSHDNYEIFAEGLPGFPDNIKRSPRGGFWVGLNTKHSKLTKFAMSNAWLGRAALGLPVDWMKVHSVWARYNGNGMAVRLSEDSGVILEVFEGKNENKWISISEVEEKDGTLWVGSVNTPFAGMYKI

SEQ ID NO: 96971 - DNA, 1269 bp, Arabidopsis thaliana
  misc_feature (1)..(1269): Ceres Seq. ID no. 12735527
  misc_feature: MA Experiment ID: 20000327 Result: Down-regulated in Transcription
  misc_feature: MA Experiment 20000327 PARAMETER Experiment Name: At_42deg_Heat_Sub_P Parameter: Age (day) Value: 14
  misc_feature: MA Experiment 20000327 PARAMETER Experiment Name: At_42deg_Heat_Sub_P Parameter: Organism Value: A. thaliana
  misc_feature: MA Experiment 20000327 PARAMETER Experiment Name: At_42deg_Heat_Sub_P Parameter: Plant Line Value: WS
  misc_feature: MA Experiment 20000327 PARAMETER Experiment Name: At_42deg_Heat_Sub_P Parameter: Temperature (deg C) Value: 42 vs. 22
  misc_feature: MA Experiment 20000327 PARAMETER Experiment Name: At_42deg_Heat_Sub_P Parameter: Timepoint (hr) Value: 1
  misc_feature: MA Experiment 20000327 PARAMETER Experiment Name: At_42deg_Heat_Sub_P Parameter: Tissue Value: Aerial
  misc_feature: MA Experiment ID: 20000328 Result: Down-regulated in Transcription
  misc_feature: MA Experiment 20000328 PARAMETER Experiment Name: At_42deg_Heat_Sub_P Parameter: Age (day) Value: 14
  misc_feature: MA Experiment 20000328 PARAMETER Experiment Name: At_42deg_Heat_Sub_P Parameter: Organism Value: A. thaliana
  misc_feature: MA Experiment 20000328 PARAMETER Experiment Name: At_42deg_Heat_Sub_P Parameter: Plant Line Value: WS
  misc_feature: MA Experiment 20000328 PARAMETER Experiment Name: At_42deg_Heat_Sub_P Parameter: Temperature (deg C) Value: 42 vs. 22
  misc_feature: MA Experiment 20000328 PARAMETER Experiment Name: At_42deg_Heat_Sub_P Parameter: Timepoint (hr) Value: 6
  misc_feature: MA Experiment 20000328 PARAMETER Experiment Name: At_42deg_Heat_Sub_P Parameter: Tissue Value: Aerial
  misc_feature: MA Experiment ID: 20000346 Result: Up-regulated in Transcription
  misc_feature: MA Experiment 20000346 PARAMETER Experiment Name: At_2mM_SA_Sub_P Parameter: Age (day) Value: 14
  misc_feature: MA Experiment 20000346 PARAMETER Experiment Name: At_2mM_SA_Sub_P Parameter: Organism Value: A. thaliana
  misc_feature: MA Experiment 20000346 PARAMETER Experiment Name: At_2mM_SA_Sub_P Parameter: Plant Line Value: WS
  misc_feature: MA Experiment 20000346 PARAMETER Experiment Name: At_2mM_SA_Sub_P Parameter: Timepoint (hr) Value: 1
  misc_feature: MA Experiment 20000346 PARAMETER Experiment Name: At_2mM_SA_Sub_P Parameter: Tissue Value: Aerial
  misc_feature: MA Experiment 20000346 PARAMETER Experiment Name: At_2mM_SA_Sub_P Parameter: Treatment Value: 2mM SA vs. No Treatment
gttcttcttctctgttctgcttcgaaattatgggttcctctgtttctaaaaccgcttcctctgcttctgcttcttctataacatcgattttgaattcacctccggagacggaattcaacatcccttcttcatcggtacctaaagctttcacatttccgatgccgtcgattcatcatccacctgctaaaaaaggcgacacacaccactttgtctctcttacatcgaccacttacggttctcttgttctcgacgacagacaaacattgcctcacatctccgtttccgggaagagtaacaagaagatgcctgaaacagaggaggctcgcgactcgttctctcctgactcagtgatcaacacatgggagctcatgaacgacctcgacgacgaattcgattccgcgaattccgatacaagtaagagtaattccgtcgtaaatttggattccttttctaaacccatcacgaatcgagacgtggttattaatgggtctgcgtatggatcttacgaagatgaggaagattggagattattgccttttaaacctaagcaacctctgtggaaacatatgtctgaagaatcatttctctctgatttagatcctaacattatctcatcttacaaaagagcactgtcctccaaacagctaggcaagaacagtagcaatggccactcaaatcattcggttttagtcagtttaccagaatatgtatcttctagtccattgagttctcagacttcggaaaaagaccaagagaaaccaagattgcttgaaaaagaagataacgagaacaagatagtagtatacttcactagcctcagaggaattcgaaagacgtatgaagattgttgttgcgttagagcgatattgagagggtttcaggttgcggtagaggagcgtgacatctcaatggactccaaatacaggaaagagcttcagaatgcactcggcgaagagaaaccggtttgtttgcctcaggtgtttataagaggcgtccgcattggtggaattgaggagatcaagatactcaacgatggaggtgaactggcagagatgttaaaagattttcctgcttgcgaatccattggagcctgcgatagctgcggagatgcaaggtttgtgccgtgtactaattgtggcggtagtactaaagtgtttgaggaacaagaagatgggtttaagagatgcaatggatgcaatgagaatggattggtacgttgtaacaagtgttgtctttagtaattggattcgtttgagtgatgttgttgtg

SEQ ID NO: 96972 - protein, 411 aa, Arabidopsis thaliana
  peptide (1)..(411): Ceres Seq. ID no. 12735528
  misc_feature (264)..(352): Pfam Name: Glutaredoxin Pfam Description: Glutaredoxin
  misc_feature (10)..(411): Homolog of NCBI NO: 15227326 NR Description: unknown protein; protein id: At2g41330.1, by cDNA: gi_18491270 [Arabidopsis thaliana]
  misc_feature (10)..(411): Homolog of NCBI NO: 30694571 NR Description: expressed protein [Arabidopsis thaliana]
  misc_feature (123)..(411): Homolog of NCBI NO: 15451042 NR Description: putative protein [Arabidopsis thaliana]
  misc_feature (262)..(409): Homolog of NCBI NO: 15240723 NR Description: putative protein; protein id: At5g13810.1, by cDNA: 124023., supported by cDNA: gi_14532459, supported by gi_16974532 [Arabidopsis thaliana] >gi|10177647|dbj|BAB11109.1|
  misc_feature (251)..(410): Homolog of NCBI NO: 34899098 NR Description: hypothetical protein~similar to Arabidopsis
  misc_feature (56)..(409): Homolog of NCBI NO: 22327469 NR Description: Expressed protein; protein id: At5g39865.1, by cDNA: gi_19347748 [Arabidopsis thaliana] gb|AAC78540.1~gene_id:MYH19.5~similar to unknown protein
  misc_feature (256)..(410): Homolog of NCBI NO: 32490043 NR Description: OSJNBa0063C18.3 [Oryza sativa (japonica
  misc_feature (101)..(409): Homolog of NCBI NO: 15237554 NR Description: putative protein; protein id: At5g03870.1
  misc_feature (256)..(406): Homolog of NCBI NO: 10241626 NR Description: Contains similarity to F1N 19.7 [Oryza sativa
  misc_feature (206)..(409): Homolog of NCBI NO: 15237686 NR Description: putative protein; protein id: At5g58530.1 thaliana] >gi|10177031|dbj|BAB10269.1| to unknown protein [Arabidopsis thaliana]
SSSLFCFEIMGSSVSKTASSASASSITSILNSPPETEFNIPSSSVPKAFTFPMPSIHHPPAKKGDTHHFVSLTSTTYGSLVLDDRQTLPHISVSGKSNKKMPETEEARDSFSPDSVINTWELMNDLDDEFDSANSDTSKSNSVVNLDSFSKPITNRDVVINGSAYGSYEDEEDWRLLPFKPKQPLWKHMSEESFLSDLDPNIISSYKRALSSKQLGKNSSNGHSNHSVLVSLPEYVSSSPLSSQTSEKDQEKPRLLEKEDNENKIVVYFTSLRGIRKTYEDCCCVRAILRGFQVAVEERDISMDSKYRKELQNALGEEKPVCLPQVFIRGVRIGGIEEIKILNDGGELAEMLKDFPACESIGACDSCGDARFVPCTNCGGSTKVFEEQEDGFKRCNGCNENGLVRCNKCCL

SEQ ID NO: 96973 - protein, 402 aa, Arabidopsis thaliana
  peptide (1)..(402): Ceres Seq. ID no. 12735529
  misc_feature (255)..(343): Pfam Name: Glutaredoxin Pfam Description: Glutaredoxin
  misc_feature (1)..(402): Homolog of NCBI NO: 15227326 NR Description: unknown protein; protein id: At2g41330.1, by cDNA: gi_18491270 [Arabidopsis thaliana]
  misc_feature (1)..(402): Homolog of NCBI NO: 30694571 NR Description: expressed protein [Arabidopsis thaliana]
  misc_feature (114)..(402): Homolog of NCBI NO: 15451042 NR Description: putative protein [Arabidopsis thaliana]
  misc_feature (253)..(400): Homolog of NCBI NO: 15240723 NR Description: putative protein; protein id: At5g13810.1, by cDNA: 124023., supported by cDNA: gi_14532459, supported by gi_16974532 [Arabidopsis thaliana] >gi|10177647|dbj|BAB11109.1|
  misc_feature (242)..(401): Homolog of NCBI NO: 34899098 NR Description: hypothetical protein~similar to Arabidopsis
  misc_feature (47)..(400): Homolog of NCBI NO: 22327469 NR Description: Expressed protein; protein id: At5g39865.1, by cDNA: gi_19347748 [Arabidopsis thaliana] gb|AAC78540.1~gene_id:MYH19.5~similar to unknown protein
  misc_feature (247)..(401): Homolog of NCBI NO: 32490043 NR Description: OSJNBa0063C18.3 [Oryza sativa (japonica
  misc_feature (92)..(400): Homolog of NCBI NO: 15237554 NR Description: putative protein; protein id: At5g03870.1
  misc_feature (247)..(397): Homolog of NCBI NO: 10241626 NR Description: Contains similarity to F1N 19.7 [Oryza sativa
  misc_feature (197)..(400): Homolog of NCBI NO: 15237686 NR Description: putative protein; protein id: At5g58530.1 thaliana] >gi|10177031|dbj|BAB10269.1| to unknown protein [Arabidopsis thaliana]
MGSSVSKTASSASASSITSILNSPPETEFNIPSSSVPKAFTFPMPSIHHPPAKKGDTHHFVSLTSTTYGSLVLDDRQTLPHISVSGKSNKKMPETEEARDSFSPDSVINTWELMNDLDDEFDSANSDTSKSNSVVNLDSFSKPITNRDVVINGSAYGSYEDEEDWRLLPFKPKQPLWKHMSEESFLSDLDPNIISSYKRALSSKQLGKNSSNGHSNHSVLVSLPEYVSSSPLSSQTSEKDQEKPRLLEKEDNENKIVVYFTSLRGIRKTYEDCCCVRAILRGFQVAVEERDISMDSKYRKELQNALGEEKPVCLPQVFIRGVRIGGIEEIKILNDGGELAEMLKDFPACESIGACDSCGDARFVPCTNCGGSTKVFEEQEDGFKRCNGCNENGLVRCNKCCL

SEQ ID NO: 96974 - protein, 359 aa, Arabidopsis thaliana
  peptide (1)..(359): Ceres Seq. ID no. 12735530
  misc_feature (212)..(300): Pfam Name: Glutaredoxin Pfam Description: Glutaredoxin
  misc_feature (1)..(359): Homolog of NCBI NO: 15227326 NR Description: unknown protein; protein id: At2g41330.1, by cDNA: gi_18491270 [Arabidopsis thaliana]
  misc_feature (1)..(359): Homolog of NCBI NO: 30694571 NR Description: expressed protein [Arabidopsis thaliana]
  misc_feature (71)..(359): Homolog of NCBI NO: 15451042 NR Description: putative protein [Arabidopsis thaliana]
  misc_feature (210)..(357): Homolog of NCBI NO: 15240723 NR Description: putative protein; protein id: At5g13810.1, by cDNA: 124023., supported by cDNA: gi_14532459, supported by gi_16974532 [Arabidopsis thaliana] >gi|10177647|dbj|BAB11109.1|
  misc_feature (199)..(358): Homolog of NCBI NO: 34899098 NR Description: hypothetical protein~similar to Arabidopsis
  misc_feature (4)..(357): Homolog of NCBI NO: 22327469 NR Description: Expressed protein; protein id: At5g39865.1, by cDNA: gi_19347748 [Arabidopsis thaliana] gb|AAC78540.1~gene_id:MYH19.5~similar to unknown protein
  misc_feature (204)..(358): Homolog of NCBI NO: 32490043 NR Description: OSJNBa0063C18.3 [Oryza sativa (japonica
  misc_feature (49)..(357): Homolog of NCBI NO: 15237554 NR Description: putative protein; protein id: At5g03870.1
  misc_feature (204)..(354): Homolog of NCBI NO: 10241626 NR Description: Contains similarity to F1N 19.7 [Oryza sativa
  misc_feature (154)..(357): Homolog of NCBI NO: 15237686 NR Description: putative protein; protein id: At5g58530.1 thaliana] >gi|10177031|dbj|BAB10269.1| to unknown protein [Arabidopsis thaliana]
MPSIHHPPAKKGDTHHFVSLTSTTYGSLVLDDRQTLPHISVSGKSNKKMPETEEARDSFSPDSVINTWELMNDLDDEFDSANSDTSKSNSVVNLDSFSKPITNRDVVINGSAYGSYEDEEDWRLLPFKPKQPLWKHMSEESFLSDLDPNIISSYKRALSSKQLGKNSSNGHSNHSVLVSLPEYVSSSPLSSQTSEKDQEKPRLLEKEDNENKIVVYFTSLRGIRKTYEDCCCVRAILRGFQVAVEERDISMDSKYRKELQNALGEEKPVCLPQVFIRGVRIGGIEEIKILNDGGELAEMLKDFPACESIGACDSCGDARFVPCTNCGGSTKVFEEQEDGFKRCNGCNENGLVRCNKCCL

SEQ ID NO: 96975 - DNA, 715 bp, Arabidopsis thaliana
  misc_feature (1)..(715): Ceres Seq. ID no. 12735531
  misc_feature: MA Experiment ID: 20000179 Result: Up-regulated in Transcription
  misc_feature: MA Experiment 20000179 PARAMETER Experiment Name: At_Germinating_Seeds_P Parameter: Age (hr) Value: 6 vs. 0
  misc_feature: MA Experiment 20000179 PARAMETER Experiment Name: At_Germinating_Seeds_P Parameter: Tissue Value: Germinating Seeds
  misc_feature: MA Experiment ID: 20000180 Result: Up-regulated in Transcription
  misc_feature: MA Experiment 20000180 PARAMETER Experiment Name: At_Germinating_Seeds_P Parameter: Age (hr) Value: 24 vs. 0
  misc_feature: MA Experiment 20000180 PARAMETER Experiment Name: At_Germinating_Seeds_P Parameter: Tissue Value: Germinating Seeds
  misc_feature: MA Experiment ID: 20000265 Result: Up-regulated in Transcription
  misc_feature: MA Experiment 20000265 PARAMETER Experiment Name: At_Open_Flower_P Parameter: Age (day) Value: 21
  misc_feature: MA Experiment 20000265 PARAMETER Experiment Name: At_Open_Flower_P Parameter: Plant Line Value: WS
  misc_feature: MA Experiment 20000265 PARAMETER Experiment Name: At_Open_Flower_P Parameter: Tissue Value: Closed Flower vs. Whole Plant
  misc_feature: MA Experiment ID: 20000436 Result: Down-regulated in Transcription
  misc_feature: MA Experiment 20000436 PARAMETER Experiment Name: At_Drought_P Parameter: Age (day) Value: 7
  misc_feature: MA Experiment 20000436 PARAMETER Experiment Name: At_Drought_P Parameter: Organism Value: A. thaliana
  misc_feature: MA Experiment 20000436 PARAMETER Experiment Name: At_Drought_P Parameter: Plant Line Value: WS
  misc_feature: MA Experiment 20000436 PARAMETER Experiment Name: At_Drought_P Parameter: Timepoint (hr) Value: 12
  misc_feature: MA Experiment 20000436 PARAMETER Experiment Name: At_Drought_P Parameter: Tissue Value: Whole Plant
  misc_feature: MA Experiment 20000436 PARAMETER Experiment Name: At_Drought_P Parameter: Treatment Value: Drought vs. No Drought
  misc_feature: MA Experiment ID: 20000438 Result: Up-regulated in Transcription
  misc_feature: MA Experiment 20000438 PARAMETER Experiment Name: At_Shoots__P Parameter: Age (day) Value: 14
  misc_feature: MA Experiment 20000438 PARAMETER Experiment Name: At_Shoots__P Parameter: Tissue Value: Shoots vs. Whole Plant
  misc_feature: MA Experiment ID: 20001556 Result: Up-regulated in Transcription
  misc_feature: MA Experiment 20001556 PARAMETER Experiment Name: At_Drought_Soil_Dry_P Parameter: Age (day) Value: 26
  misc_feature: MA Experiment 20001556 PARAMETER Experiment Name: At_Drought_Soil_Dry_P Parameter: Organism Value: A. thaliana
  misc_feature: MA Experiment 20001556 PARAMETER Experiment Name: At_Drought_Soil_Dry_P Parameter: Plant Line Value: WS
  misc_feature: MA Experiment 20001556 PARAMETER Experiment Name: At_Drought_Soil_Dry_P Parameter: Post Timepoint (hr) Value: None
  misc_feature: MA Experiment 20001556 PARAMETER Experiment Name: At_Drought_Soil_Dry_P Parameter: Post-Treatment Value: None
  misc_feature: MA Experiment 20001556 PARAMETER Experiment Name: At_Drought_Soil_Dry_P Parameter: Timepoint (day) Value: 12
  misc_feature: MA Experiment 20001556 PARAMETER Experiment Name: At_Drought_Soil_Dry_P Parameter: Treatment Value: Drought vs. No Drought
  misc_feature: MA Experiment ID: 20001560 Result: Up-regulated in Transcription
  misc_feature: MA Experiment 20001560 PARAMETER Experiment Name: At_Drought_Soil_Dry_P Parameter: Age (day) Value: 28
  misc_feature: MA Experiment 20001560 PARAMETER Experiment Name: At_Drought_Soil_Dry_P Parameter: Organism Value: A. thaliana
  misc_feature: MA Experiment 20001560 PARAMETER Experiment Name: At_Drought_Soil_Dry_P Parameter: Plant Line Value: WS
  misc_feature: MA Experiment 20001560 PARAMETER Experiment Name: At_Drought_Soil_Dry_P Parameter: Post Timepoint (hr) Value: None
  misc_feature: MA Experiment 20001560 PARAMETER Experiment Name: At_Drought_Soil_Dry_P Parameter: Post-Treatment Value: None
  misc_feature: MA Experiment 20001560 PARAMETER Experiment Name: At_Drought_Soil_Dry_P Parameter: Timepoint (day) Value: 14
  misc_feature: MA Experiment 20001560 PARAMETER Experiment Name: At_Drought_Soil_Dry_P Parameter: Treatment Value: Drought vs. No Drought
gagagagagagagagacgatggaggggaaagggaaagagatagtggttggacattccattagtaaatcaagtgtagagtgtcacaaatattacctggcacgtcgaaccaccatggagatgctccgagacagaggatacgatgtctccgacgaagatattaacctctccctccagcaatttcgagcgctctatggggaacatcctgacgtagatctacttcgtatctcagccaaacatcgctttgattcttcgaaaaagatctcggtagtgttttgtggaactggtatagttaaagtcaatgcgatgcgcgtcattgcagcagatgtgcttagccgagaaaatataaccggactgatactggttttgcaaagtcatataacgaaccaagctcttaaagccgttgaacttttctcctttaaggtcgagttattcgagattaccgatttgttggttaacgtaagcaaacatgtcttgaggccaaaacatcaggttctgaacgataaagagaaggaatcacttctcaagaagttcagtattgaggagaaacaacttcctcggttatcgagcaaagacccgattgtgcgatactatggactagagacagggcaagtcatgaaggtcacatacaaagacgagctcagtgagtcgcatgttacataccgatgcgtttcttaaactcgttttgtttatattttcagctctttctttgtgtagc

SEQ ID NO: 96976 - protein, 224 aa, Arabidopsis thaliana
  peptide (1)..(224): Ceres Seq. ID no. 12735532
  misc_feature (20)..(111): Pfam Name: RNA polymerase Rpb5, N-terminal domain Pfam Description: RNA polymerase Rpb5, N-terminal domain
  misc_feature (7)..(224): Homolog of NCBI NO: 15227327 NR Description: putative DNA-directed RNA polymerase 23kD protein id: At2g41340.1, supported by cDNA: gi_19310384 thaliana] >gi|25288347|pir||E84840 hypothetical protein At2g41340
  misc_feature (7)..(222): Homolog of NCBI NO: 8896071 NR Description: RPB5d [Brassica napus]
  misc_feature (7)..(223): Homolog of NCBI NO: 15230206 NR Description: putative protein; protein id: At3g57080.1, by cDNA: 8751. [Arabidopsis thaliana] >gi|11261045|pir||T47768
  misc_feature (7)..(223): Homolog of NCBI NO: 21617912 NR Description: putative DNA-directed RNA polymerase 23kD subunit
  misc_feature (25)..(223): Homolog of NCBI NO: 15232524 NR Description: RNA polymerase 24kDa subunit -like protein; id: At3g54490.1 [Arabidopsis thaliana] >gi|11261042|pir||T47608
  misc_feature (26)..(223): Homolog of NCBI NO: 15228724 NR Description: RNA polymerase I, II and III 24.3 kDa subunit; id: At3g22320.1, supported by cDNA: 21828., supported by cDNA: supported by cDNA: gi_15724321, supported by cDNA: gi_3372232
  misc_feature (23)..(223): Homolog of NCBI NO: 38344231 NR Description: OJ991113_30.8 [Oryza sativa (japonica
  misc_feature (29)..(221): Homolog of NCBI NO: 19114099 NR Description: dna-directed rna polymerase i ii and iii 24 kd
  misc_feature (20)..(223): Homolog of NCBI NO: 17507947 NR Description: RNA polymerase Rpb5, N-terminal domain and RNA
  misc_feature (116)..(223): Homolog of NCBI NO: 40746238 NR Description: hypothetical protein AN0752.2 [Aspergillus
ERERETMEGKGKEIVVGHSISKSSVECHKYYLARRTTMEMLRDRGYDVSDEDINLSLQQFRALYGEHPDVDLLRISAKHRFDSSKKISVVFCGTGIVKVNAMRVIAADVLSRENITGLILVLQSHITNQALKAVELFSFKVELFEITDLLVNVSKHVLRPKHQVLNDKEKESLLKKFSIEEKQLPRLSSKDPIVRYYGLETGQVMKVTYKDELSESHVTYRCVS

SEQ ID NO: 96977 - protein, 218 aa, Arabidopsis thaliana
  peptide (1)..(218): Ceres Seq. ID no. 12735533
  misc_feature (14)..(105): Pfam Name: RNA polymerase Rpb5, N-terminal domain Pfam Description: RNA polymerase Rpb5, N-terminal domain
  misc_feature (1)..(218): Homolog of NCBI NO: 15227327 NR Description: putative DNA-directed RNA polymerase 23kD protein id: At2g41340.1, supported by cDNA: gi_19310384 thaliana] >gi|25288347|pir||E84840 hypothetical protein At2g41340
  misc_feature (1)..(216): Homolog of NCBI NO: 8896071 NR Description: RPB5d [Brassica napus]
  misc_feature (1)..(217): Homolog of NCBI NO: 15230206 NR Description: putative protein; protein id: At3g57080.1, by cDNA: 8751. [Arabidopsis thaliana] >gi|11261045|pir||T47768
  misc_feature (1)..(217): Homolog of NCBI NO: 21617912 NR Description: putative DNA-directed RNA polymerase 23kD subunit
  misc_feature (19)..(217): Homolog of NCBI NO: 15232524 NR Description: RNA polymerase 24kDa subunit -like protein; id: At3g54490.1 [Arabidopsis thaliana] >gi|11261042|pir||T47608
  misc_feature (20)..(217): Homolog of NCBI NO: 15228724 NR Description: RNA polymerase I, II and III 24.3 kDa subunit; id: At3g22320.1, supported by cDNA: 21828., supported by cDNA: supported by cDNA: gi_15724321, supported by cDNA: gi_3372232
  misc_feature (17)..(217): Homolog of NCBI NO: 38344231 NR Description: OJ991113_30.8 [Oryza sativa (japonica
  misc_feature (23)..(215): Homolog of NCBI NO: 19114099 NR Description: dna-directed rna polymerase i ii and iii 24 kd
  misc_feature (14)..(217): Homolog of NCBI NO: 17507947 NR Description: RNA polymerase Rpb5, N-terminal domain and RNA
  misc_feature (110)..(217): Homolog of NCBI NO: 40746238 NR Description: hypothetical protein AN0752.2 [Aspergillus
MEGKGKEIVVGHSISKSSVECHKYYLARRTTMEMLRDRGYDVSDEDINLSLQQFRALYGEHPDVDLLRISAKHRFDSSKKISVVFCGTGIVKVNAMRVIAADVLSRENITGLILVLQSHITNQALKAVELFSFKVELFEITDLLVNVSKHVLRPKHQVLNDKEKESLLKKFSIEEKQLPRLSSKDPIVRYYGLETGQVMKVTYKDELSESHVTYRCVS

SEQ ID NO: 96978 - protein, 187 aa, Arabidopsis thaliana
  peptide (1)..(187): Ceres Seq. ID no. 12735534
  misc_feature (1)..(74): Pfam Name: RNA polymerase Rpb5, N-terminal domain Pfam Description: RNA polymerase Rpb5, N-terminal domain
  misc_feature (1)..(187): Homolog of NCBI NO: 15227327 NR Description: putative DNA-directed RNA polymerase 23kD protein id: At2g41340.1, supported by cDNA: gi_19310384 thaliana] >gi|25288347|pir||E84840 hypothetical protein At2g41340
  misc_feature (1)..(185): Homolog of NCBI NO: 8896071 NR Description: RPB5d [Brassica napus]
  misc_feature (1)..(186): Homolog of NCBI NO: 15230206 NR Description: putative protein; protein id: At3g57080.1, by cDNA: 8751. [Arabidopsis thaliana] >gi|11261045|pir||T47768
  misc_feature (1)..(186): Homolog of NCBI NO: 21617912 NR Description: putative DNA-directed RNA polymerase 23kD subunit
  misc_feature (1)..(186): Homolog of NCBI NO: 15232524 NR Description: RNA polymerase 24kDa subunit -like protein; id: At3g54490.1 [Arabidopsis thaliana] >gi|11261042|pir||T47608
  misc_feature (1)..(186): Homolog of NCBI NO: 15228724 NR Description: RNA polymerase I, II and III 24.3 kDa subunit; id: At3g22320.1, supported by cDNA: 21828., supported by cDNA: supported by cDNA: gi_15724321, supported by cDNA: gi_3372232
  misc_feature (1)..(186): Homolog of NCBI NO: 38344231 NR Description: OJ991113_30.8 [Oryza sativa (japonica
  misc_feature (1)..(184): Homolog of NCBI NO: 19114099 NR Description: dna-directed rna polymerase i ii and iii 24 kd
  misc_feature (1)..(186): Homolog of NCBI NO: 17507947 NR Description: RNA polymerase Rpb5, N-terminal domain and RNA
  misc_feature (79)..(186): Homolog of NCBI NO: 40746238 NR Description: hypothetical protein AN0752.2 [Aspergillus
MEMLRDRGYDVSDEDINLSLQQFRALYGEHPDVDLLRISAKHRFDSSKKISVVFCGTGIVKVNAMRVIAADVLSRENITGLILVLQSHITNQALKAVELFSFKVELFEITDLLVNVSKHVLRPKHQVLNDKEKESLLKKFSIEEKQLPRLSSKDPIVRYYGLETGQVMKVTYKDELSESHVTYRCVS

SEQ ID NO: 96979 - DNA, 1002 bp, Arabidopsis thaliana
  misc_feature (1)..(1002): Ceres Seq. ID no. 12735539
  misc_feature: MA Experiment ID: 20000171 Result: Down-regulated in Transcription
  misc_feature: MA Experiment 20000171 PARAMETER Experiment Name: At_42deg_Heat_P Parameter: Age (day) Value: 14
  misc_feature: MA Experiment 20000171 PARAMETER Experiment Name: At_42deg_Heat_P Parameter: Organism Value: A. thaliana
  misc_feature: MA Experiment 20000171 PARAMETER Experiment Name: At_42deg_Heat_P Parameter: Plant Line Value: WS
  misc_feature: MA Experiment 20000171 PARAMETER Experiment Name: At_42deg_Heat_P Parameter: Temperature (deg C) Value: 42 vs. 22
  misc_feature: MA Experiment 20000171 PARAMETER Experiment Name: At_42deg_Heat_P Parameter: Timepoint (hr) Value: 1
  misc_feature: MA Experiment 20000171 PARAMETER Experiment Name: At_42deg_Heat_P Parameter: Tissue Value: Aerial
  misc_feature: MA Experiment ID: 20000182 Result: Up-regulated in Transcription
  misc_feature: MA Experiment 20000182 PARAMETER Experiment Name: At_2mM_SA_P Parameter: Age (day) Value: 14
  misc_feature: MA Experiment 20000182 PARAMETER Experiment Name: At_2mM_SA_P Parameter: Organism Value: A. thaliana
  misc_feature: MA Experiment 20000182 PARAMETER Experiment Name: At_2mM_SA_P Parameter: Plant Line Value: WS
  misc_feature: MA Experiment 20000182 PARAMETER Experiment Name: At_2mM_SA_P Parameter: Timepoint (hr) Value: 6
  misc_feature: MA Experiment 20000182 PARAMETER Experiment Name: At_2mM_SA_P Parameter: Tissue Value: Aerial
  misc_feature: MA Experiment 20000182 PARAMETER Experiment Name: At_2mM_SA_P Parameter: Treatment Value: 2mM SA vs. No Treatment
  misc_feature: MA Experiment ID: 20000185 Result: Up-regulated in Transcription
  misc_feature: MA Experiment 20000185 PARAMETER Experiment Name: At_Roots__P Parameter: Age (day) Value: 7 vs. 21
  misc_feature: MA Experiment 20000185 PARAMETER Experiment Name: At_Roots__P Parameter: Organism Value: A. thaliana
  misc_feature: MA Experiment 20000185 PARAMETER Experiment Name: At_Roots__P Parameter: Tissue Value: Roots vs. Whole Plant
  misc_feature: MA Experiment ID: 20000234 Result: Down-regulated in Transcription
  misc_feature: MA Experiment 20000234 PARAMETER Experiment Name: At_Siliques_P Parameter: Age (day) Value: 21
  misc_feature: MA Experiment 20000234 PARAMETER Experiment Name: At_Siliques_P Parameter: Organism Value: A. thaliana
  misc_feature: MA Experiment 20000234 PARAMETER Experiment Name: At_Siliques_P Parameter: Plant Line Value: WS
  misc_feature: MA Experiment 20000234 PARAMETER Experiment Name: At_Siliques_P Parameter: Tissue Value: Less Than 5mm Siliques vs. Whole Plant
  misc_feature: MA Experiment ID: 20000264 Result: Up-regulated in Transcription
  misc_feature: MA Experiment 20000264 PARAMETER Experiment Name: At_Open_Flower_P Parameter: Age (day) Value: 21
  misc_feature: MA Experiment 20000264 PARAMETER Experiment Name: At_Open_Flower_P Parameter: Plant Line Value: WS
  misc_feature: MA Experiment 20000264 PARAMETER Experiment Name: At_Open_Flower_P Parameter: Tissue Value: Open Flower vs. Whole Plant
  misc_feature: MA Experiment ID: 20000265 Result: Down-regulated in Transcription
  misc_feature: MA Experiment 20000265 PARAMETER Experiment Name: At_Open_Flower_P Parameter: Age (day) Value: 21
  misc_feature: MA Experiment 20000265 PARAMETER Experiment Name: At_Open_Flower_P Parameter: Plant Line Value: WS
  misc_feature: MA Experiment 20000265 PARAMETER Experiment Name: At_Open_Flower_P Parameter: Tissue Value: Closed Flower vs. Whole Plant
  misc_feature: MA Experiment ID: 20000439 Result: Up-regulated in Transcription
  misc_feature: MA Experiment 20000439 PARAMETER Experiment Name: At_Roots__P Parameter: Age (day) Value: 14 vs. 21
  misc_feature: MA Experiment 20000439 PARAMETER Experiment Name: At_Roots__P Parameter: Organism Value: A. thaliana
  misc_feature: MA Experiment 20000439 PARAMETER Experiment Name: At_Roots__P Parameter: Tissue Value: Roots vs. Whole Plant
  misc_feature: MA Experiment ID: 20000445 Result: Up-regulated in Transcription
  misc_feature: MA Experiment 20000445 PARAMETER Experiment Name: At_100uM_NAA__P Parameter: Age (day) Value: 14
  misc_feature: MA Experiment 20000445 PARAMETER Experiment Name: At_100uM_NAA__P Parameter: Organism Value: A. thaliana
  misc_feature: MA Experiment 20000445 PARAMETER Experiment Name: At_100uM_NAA__P Parameter: Plant Line Value: WS
  misc_feature: MA Experiment 20000445 PARAMETER Experiment Name: At_100uM_NAA__P Parameter: Timepoint (hr) Value: 6
  misc_feature: MA Experiment 20000445 PARAMETER Experiment Name: At_100uM_NAA__P Parameter: Tissue Value: Aerial
  misc_feature: MA Experiment 20000445 PARAMETER Experiment Name: At_100uM_NAA__P Parameter: Treatment Value: 100uM NAA vs. No Treatment
  misc_feature: MA Experiment ID: 20000451 Result: Down-regulated in Transcription
  misc_feature: MA Experiment 20000451 PARAMETER Experiment Name: At_CS6879_Shoots-Roots_P Parameter: Age (day) Value: 14
  misc_feature: MA Experiment 20000451 PARAMETER Experiment Name: At_CS6879_Shoots-Roots_P Parameter: Organism Value: A. thaliana
  misc_feature: MA Experiment 20000451 PARAMETER Experiment Name: At_CS6879_Shoots-Roots_P Parameter: Plant Line Value: CS6879 vs. WS
  misc_feature: MA Experiment 20000451 PARAMETER Experiment Name: At_CS6879_Shoots-Roots_P Parameter: Tissue Value: Roots
  misc_feature: MA Experiment ID: 20000453 Result: Up-regulated in Transcription
  misc_feature: MA Experiment 20000453 PARAMETER Experiment Name: At_100uM_ABA_P Parameter: Age (day) Value: 15
  misc_feature: MA Experiment 20000453 PARAMETER Experiment Name: At_100uM_ABA_P Parameter: Organism Value: A. thaliana
  misc_feature: MA Experiment 20000453 PARAMETER Experiment Name: At_100uM_ABA_P Parameter: Plant Line Value: WS
  misc_feature: MA Experiment 20000453 PARAMETER Experiment Name: At_100uM_ABA_P Parameter: Timepoint (hr) Value: 24
  misc_feature: MA Experiment 20000453 PARAMETER Experiment Name: At_100uM_ABA_P Parameter: Tissue Value: Aerial
  misc_feature: MA Experiment 20000453 PARAMETER Experiment Name: At_100uM_ABA_P Parameter: Treatment Value: 100uM ABA vs. No Treatment
  misc_feature: MA Experiment ID: 20000495 Result: Up-regulated in Transcription
  misc_feature: MA Experiment 20000495 PARAMETER Experiment Name: At_Guard_Cells_P Parameter: Harvest Date Value: 8/2/2002
  misc_feature: MA Experiment 20000495 PARAMETER Experiment Name: At_Guard_Cells_P Parameter: Organism Value: A. thaliana
  misc_feature: MA Experiment 20000495 PARAMETER Experiment Name: At_Guard_Cells_P Parameter: Tissue Value: Guard Cells vs. Leaves
  misc_feature: MA Experiment ID: 20000527 Result: Down-regulated in Transcription
  misc_feature: MA Experiment 20000527 PARAMETER Experiment Name: At_10percent_PEG_P Parameter: Age (day) Value: 20
  misc_feature: MA Experiment 20000527 PARAMETER Experiment Name: At_10percent_PEG_P Parameter: Organism Value: A. thaliana
  misc_feature: MA Experiment 20000527 PARAMETER Experiment Name: At_10percent_PEG_P Parameter: Plant Line Value: WS
  misc_feature: MA Experiment 20000527 PARAMETER Experiment Name: At_10percent_PEG_P Parameter: Timepoint (day) Value: 20
  misc_feature: MA Experiment 20000527 PARAMETER Experiment Name: At_10percent_PEG_P Parameter: Tissue Value: Whole Plant
  misc_feature: MA Experiment 20000527 PARAMETER Experiment Name: At_10percent_PEG_P Parameter: Treatment Value: 10percent PEG vs. No Treatment
  misc_feature: MA Experiment ID: 20000573 Result: Up-regulated in Transcription
  misc_feature: MA Experiment 20000573 PARAMETER Experiment Name: At_100uM_ABA_Mutants__P Parameter: Organism Value: A. thaliana
  misc_feature: MA Experiment 20000573 PARAMETER Experiment Name: At_100uM_ABA_Mutants__P Parameter: Plant Line Value: CS22 vs. Ler wt
  misc_feature: MA Experiment 20000573 PARAMETER Experiment Name: At_100uM_ABA_Mutants__P Parameter: Timepoint (hr) Value: N/A
  misc_feature: MA Experiment 20000573 PARAMETER Experiment Name: At_100uM_ABA_Mutants__P Parameter: Tissue Value: Whole Plant
  misc_feature: MA Experiment 20000573 PARAMETER Experiment Name: At_100uM_ABA_Mutants__P Parameter: Treatment Value: None
  misc_feature: MA Experiment ID: 20000574 Result: Up-regulated in Transcription
  misc_feature: MA Experiment 20000574 PARAMETER Experiment Name: At_100uM_ABA_Mutants__P Parameter: Organism Value: A. thaliana
  misc_feature: MA Experiment 20000574 PARAMETER Experiment Name: At_100uM_ABA_Mutants__P Parameter: Plant Line Value: CS23 vs. Ler wt
  misc_feature: MA Experiment 20000574 PARAMETER Experiment Name: At_100uM_ABA_Mutants__P Parameter: Timepoint (hr) Value: N/A
  misc_feature: MA Experiment 20000574 PARAMETER Experiment Name: At_100uM_ABA_Mutants__P Parameter: Tissue Value: Whole Plant
  misc_feature: MA Experiment 20000574 PARAMETER Experiment Name: At_100uM_ABA_Mutants__P Parameter: Treatment Value: None
  misc_feature: MA Experiment ID: 20000709 Result: Up-regulated in Transcription
  misc_feature: MA Experiment 20000709 PARAMETER Experiment Name: At_15mM_NH4NO3_L-to-H_P Parameter: Age (hr) Value: 14
  misc_feature: MA Experiment 20000709 PARAMETER Experiment Name: At_15mM_NH4NO3_L-to-H_P Parameter: Organism Value: A. thaliana
  misc_feature: MA Experiment 20000709 PARAMETER Experiment Name: At_15mM_NH4NO3_L-to-H_P Parameter: Plant Line Value: WS
  misc_feature: MA Experiment 20000709 PARAMETER Experiment Name: At_15mM_NH4NO3_L-to-H_P Parameter: Timepoint (hr) Value: 4
  misc_feature: MA Experiment 20000709 PARAMETER Experiment Name: At_15mM_NH4NO3_L-to-H_P Parameter: Tissue Value: Aerial
  misc_feature: MA Experiment 20000709 PARAMETER Experiment Name: At_15mM_NH4NO3_L-to-H_P Parameter: Treatment Value: 15mM NH4NO3 vs. 30mM Mannitol
  misc_feature: MA Experiment ID: 20000794 Result: Up-regulated in Transcription
  misc_feature: MA Experiment 20000794 PARAMETER Experiment Name: At_Petals_P Parameter: Age (day) Value: 23-25 days
  misc_feature: MA Experiment 20000794 PARAMETER Experiment Name: At_Petals_P Parameter: Plant Line Value: WS
  misc_feature: MA Experiment 20000794 PARAMETER Experiment Name: At_Petals_P Parameter: Tissue Value: Petals vs. Whole plant
  misc_feature: MA Experiment ID: 20001458 Result: Down-regulated in Transcription
  misc_feature: MA Experiment 20001458 PARAMETER Experiment Name: At_50mM_NH4NO3_L-to-H_P Parameter: Age (day) Value: Undefined
  misc_feature: MA Experiment 20001458 PARAMETER Experiment Name: At_50mM_NH4NO3_L-to-H_P Parameter: Organism Value: Undefined
  misc_feature: MA Experiment 20001458 PARAMETER Experiment Name: At_50mM_NH4NO3_L-to-H_P Parameter: Plant Line Value: Undefined
  misc_feature: MA Experiment 20001458 PARAMETER Experiment Name: At_50mM_NH4NO3_L-to-H_P Parameter: Timepoint (hr) Value: 2
  misc_feature: MA Experiment 20001458 PARAMETER Experiment Name: At_50mM_NH4NO3_L-to-H_P Parameter: Tissue Value: Siliques
  misc_feature: MA Experiment 20001458 PARAMETER Experiment Name: At_50mM_NH4NO3_L-to-H_P Parameter: Treatment Value: 50mM NH4NO3 vs. 100mM Manitol
  misc_feature: MA Experiment ID: 20001554 Result: Up-regulated in Transcription
  misc_feature: MA Experiment 20001554 PARAMETER Experiment Name: At_Drought_Soil_Dry_P Parameter: Age (day) Value: 21
  misc_feature: MA Experiment 20001554 PARAMETER Experiment Name: At_Drought_Soil_Dry_P Parameter: Organism Value: A. thaliana
  misc_feature: MA Experiment 20001554 PARAMETER Experiment Name: At_Drought_Soil_Dry_P Parameter: Plant Line Value: WS
  misc_feature: MA Experiment 20001554 PARAMETER Experiment Name: At_Drought_Soil_Dry_P Parameter: Post Timepoint (hr) Value: None
  misc_feature: MA Experiment 20001554 PARAMETER Experiment Name: At_Drought_Soil_Dry_P Parameter: Post-Treatment Value: None
  misc_feature: MA Experiment 20001554 PARAMETER Experiment Name: At_Drought_Soil_Dry_P Parameter: Timepoint (day) Value: 7
  misc_feature: MA Experiment 20001554 PARAMETER Experiment Name: At_Drought_Soil_Dry_P Parameter: Treatment Value: Drought vs. No Drought
  misc_feature: MA Experiment ID: 20001757 Result: Down-regulated in Transcription
  misc_feature: MA Experiment 20001757 PARAMETER Experiment Name: At_50mM_NH4NO3_L-to-H_P Parameter: Timepoint (hr) Value: 6
  misc_feature: MA Experiment 20001757 PARAMETER Experiment Name: At_50mM_NH4NO3_L-to-H_P Parameter: Tissue Value: Leaf
  misc_feature: MA Experiment 20001757 PARAMETER Experiment Name: At_50mM_NH4NO3_L-to-H_P Parameter: Treatment Value: 50mM NH4NO3 vs 100mM Mannitol
  misc_feature: MA Experiment ID: 20001905 Result: Up-regulated in Transcription
  misc_feature: MA Experiment 20001905 PARAMETER Experiment Name: At_Drought_Reproduction_P Parameter: Age (day) Value: 40
  misc_feature: MA Experiment 20001905 PARAMETER Experiment Name: At_Drought_Reproduction_P Parameter: Organism Value: A. thaliana
  misc_feature: MA Experiment 20001905 PARAMETER Experiment Name: At_Drought_Reproduction_P Parameter: Plant Line Value: WS
  misc_feature: MA Experiment 20001905 PARAMETER Experiment Name: At_Drought_Reproduction_P Parameter: Timepoint (day) Value: 10
  misc_feature: MA Experiment 20001905 PARAMETER Experiment Name: At_Drought_Reproduction_P Parameter: Tissue Value: Rosettes
  misc_feature: MA Experiment 20001905 PARAMETER Experiment Name: At_Drought_Reproduction_P Parameter: Treatment Value: Drought vs. No Drought
  misc_feature: MA Experiment ID: 20001911 Result: Down-regulated in Transcription
  misc_feature: MA Experiment 20001911 PARAMETER Experiment Name: At_Drought_Reproduction_P Parameter: Age (day) Value: 40
  misc_feature: MA Experiment 20001911 PARAMETER Experiment Name: At_Drought_Reproduction_P Parameter: Organism Value: A. thaliana
  misc_feature: MA Experiment 20001911 PARAMETER Experiment Name: At_Drought_Reproduction_P Parameter: Plant Line Value: WS
  misc_feature: MA Experiment 20001911 PARAMETER Experiment Name: At_Drought_Reproduction_P Parameter: Timepoint (day) Value: 10
  misc_feature: MA Experiment 20001911 PARAMETER Experiment Name: At_Drought_Reproduction_P Parameter: Tissue Value: Flowers
  misc_feature: MA Experiment 20001911 PARAMETER Experiment Name: At_Drought_Reproduction_P Parameter: Treatment Value: Drought vs. No Drought
aagttaaaaaaattattcaagaaacacgagaacaaaaacaatggcgaaattattcatcaagcaagcagagcaatatgcagcagcccgacccagttaccccaccaaactcttcgaatatatcgcatcgaaaacaccgtgccacgaccttgcctgggacgttggcgccggaagcggccaagcctcacgatcgctagccggaatctacaagaacgtgattgctacagacacgagctcaaagcaacttgaatttgctgcaaagcttcccaacgtccgttacgagatcactccaccgacgatgtcttcatcggagatcgagaagctagtagcacctgaatcatcagttgatttagtcaccgtcgctcaagcccttcattggttcgacctcacgaacttttacagcaacgtgaaacacgtgctcaagaaacccaacggagtaatcgccgcctggtgctacaccaatccggaagttaacgacgccgtggacaaggtctttcaacggttttacgatgagaaacttggtcctcattgggatctagcgcgacggcttgtggaggatgggtacagaggaattgagtttccgttcgagaaagtggataatgatgagtcaacggaaagtcaaagttttccggtgaggtttgtaacggagaaagaaatggtgtttgaagagtatatgacgtatctgaggtcatcttcggcgtatcagacggctaaggagaaaggtttagagcttttgacggctgagatggaaggagagtttgctggttcgtggaaagaagatgggaaagagaagaaagttgttaggtatccgatttatctgttgatcggaagagttgcagaagaacgtgtataaattgatatctctcagttaggcatttcgtcgaacaccttgtgcttacacacaagaagacattagttttgattggttcaatgtaaaaataaaactttgtcgttccagcattcctggggatctctaatctttccttttttaccccacgcgcgact

SEQ ID NO: 96980 - protein, 269 aa, Arabidopsis thaliana
  peptide (1)..(269): Ceres Seq. ID no. 12735540
  misc_feature (1)..(269): Homolog of NCBI NO: 15227331 NR Description: putative embryo-abundant protein; protein id: supported by cDNA: gi_18252864 [Arabidopsis thaliana]
  misc_feature (1)..(264): Homolog of NCBI NO: 20339366 NR Description: embryo-abundant protein EMB [Pisum sativum]
  misc_feature (7)..(264): Homolog of NCBI NO: 7484460 NR Description: embryonic abundant protein EMB34 - white spruce
  misc_feature (1)..(264): Homolog of NCBI NO: 15238280 NR Description: embryonic abundant protein -like; protein id:
  misc_feature (1)..(269): Homolog of NCBI NO: 15232436 NR Description: embryonic abundant protein -like; protein id: supported by cDNA: 6529., supported by cDNA: gi_17381219, by cDNA: gi_20465822 [Arabidopsis thaliana]
  misc_feature (1)..(264): Homolog of NCBI NO: 15233061 NR Description: putative protein; protein id: At3g61210.1
  misc_feature (1)..(269): Homolog of NCBI NO: 21594033 NR Description: embryonic abundant protein-like [Arabidopsis
  misc_feature (1)..(170): Homolog of NCBI NO: 34912212 NR Description: P0415C01.8 [Oryza sativa (japonica
  misc_feature (168)..(264): Homolog of NCBI NO: 34912212 NR Description: P0415C01.8 [Oryza sativa (japonica
  misc_feature (1)..(264): Homolog of NCBI NO: 15235684 NR Description: putative protein; protein id: At4g22530.1
MAKLFIKQAEQYAAARPSYPTKLFEYIASKTPCHDLAWDVGAGSGQASRSLAGIYKNVIATDTSSKQLEFAAKLPNVRYEITPPTMSSSEIEKLVAPESSVDLVTVAQALHWFDLTNFYSNVKHVLKKPNGVIAAWCYTNPEVNDAVDKVFQRFYDEKLGPHWDLARRLVEDGYRGIEFPFEKVDNDESTESQSFPVRFVTEKEMVFEEYMTYLRSSSAYQTAKEKGLELLTAEMEGEFAGSWKEDGKEKKVVRYPIYLLIGRVAEERV

SEQ ID NO: 96981 - protein, 184 aa, Arabidopsis thaliana
  peptide (1)..(184): Ceres Seq. ID no. 12735541
  misc_feature (1)..(184): Homolog of NCBI NO: 15227331 NR Description: putative embryo-abundant protein; protein id: supported by cDNA: gi_18252864 [Arabidopsis thaliana]
  misc_feature (1)..(179): Homolog of NCBI NO: 20339366 NR Description: embryo-abundant protein EMB [Pisum sativum]
  misc_feature (1)..(179): Homolog of NCBI NO: 7484460 NR Description: embryonic abundant protein EMB34 - white spruce
  misc_feature (1)..(179): Homolog of NCBI NO: 15238280 NR Description: embryonic abundant protein -like; protein id:
  misc_feature (1)..(184): Homolog of NCBI NO: 15232436 NR Description: embryonic abundant protein -like; protein id: supported by cDNA: 6529., supported by cDNA: gi_17381219, by cDNA: gi_20465822 [Arabidopsis thaliana]
  misc_feature (1)..(179): Homolog of NCBI NO: 15233061 NR Description: putative protein; protein id: At3g61210.1
  misc_feature (1)..(184): Homolog of NCBI NO: 21594033 NR Description: embryonic abundant protein-like [Arabidopsis
  misc_feature (1)..(85): Homolog of NCBI NO: 34912212 NR Description: P0415C01.8 [Oryza sativa (japonica
  misc_feature (83)..(179): Homolog of NCBI NO: 34912212 NR Description: P0415C01.8 [Oryza sativa (japonica
  misc_feature (1)..(179): Homolog of NCBI NO: 15235684 NR Description: putative protein; protein id: At4g22530.1
MSSSEIEKLVAPESSVDLVTVAQALHWFDLTNFYSNVKHVLKKPNGVIAAWCYTNPEVNDAVDKVFQRFYDEKLGPHWDLARRLVEDGYRGIEFPFEKVDNDESTESQSFPVRFVTEKEMVFEEYMTYLRSSSAYQTAKEKGLELLTAEMEGEFAGSWKEDGKEKKVVRYPIYLLIGRVAEERV

SEQ ID NO: 96982 - DNA, 1770 bp, Arabidopsis thaliana
  misc_feature (1)..(1770): Ceres Seq. ID no. 12735549
  misc_feature: MA Experiment ID: 20000179 Result: Down-regulated in Transcription
  misc_feature: MA Experiment 20000179 PARAMETER Experiment Name: At_Germinating_Seeds_P Parameter: Age (hr) Value: 6 vs. 0
  misc_feature: MA Experiment 20000179 PARAMETER Experiment Name: At_Germinating_Seeds_P Parameter: Tissue Value: Germinating Seeds
  misc_feature: MA Experiment ID: 20000180 Result: Down-regulated in Transcription
  misc_feature: MA Experiment 20000180 PARAMETER Experiment Name: At_Germinating_Seeds_P Parameter: Age (hr) Value: 24 vs. 0
  misc_feature: MA Experiment 20000180 PARAMETER Experiment Name: At_Germinating_Seeds_P Parameter: Tissue Value: Germinating Seeds
atgaacaacgttcttcagtttggtctccagagctccgccatatatgtcgccaagtttctggtggtgcctcttaggagtttgagagttggttcatctttcgttggagttggagtgggaacaagaagtttcaacaagaggctaatgtcaaatgctacagctttctctatcaacaacagcaagcgaaaggaactcaagataccaggagcagctattgatcagaattgtcatcagatgggaagtgatactgatagagatgaaatgggaactcttcaagatgatcgaaaggaaattgaggcgatgactgttcaagaacttagatccacgttgaggaaacttggggtacctgtgaaaggacgcaaacaagaacttatctcaactttacgacttcatatggacagcaatttacctgatcaaaaggaaacttcttcgtccacccgttcggatagtgtcaccatcaaaagaaagatcagcaacagggaagagcctactgaagatgaatgcactaactctgaagcttatgacattgaacacggagaaaaaagagtaaaacagtctactgagaaaaacttgaaagctaaagtttctgcgaaagctatcgcgaaagaacagaagtcattgatgagaacaggtaagcagcaaattcagtcaaaagaagaaacatcatcgaccatctctagtgaattactgaaaactgaagaaattatctcatccccgagtcaaagtgaaccgtggactgtacttgctcataagaagcctcagaaggactggaaagcttacaacccaaagacaatgagacctccccctctaccagagggtaccaaatgtgtgaaagttatgacttggaatgttaatggactgagaggattgttgaagtttgagagcttctctgctctgcagcttgcccaaagagaaaattttgacatcttgtgcttgcaggagactaaactccaggtgaaagatgttgaggaaattaagaaaactcttattgatggctatgatcatagtttctggtcctgcagcgtctcaaaacttggctactctggaactgcaataatctcacggataaaaccactctcagttagatatggtactggtctatctggtcatgacacggaagggcgtattgtaactgctgaattcgactccttctacttgataaatacttatgtccctaattccggagatggattaaaaagactgtcatacaggatcgaagaatgggatcgaaccctcagcaatcacatcaaagagctggagaagtctaagcctgtagtcttgacgggtgatctaaactgtgctcatgaagaaattgacatcttcaatcctgcggggaacaaaagaagtgctggttttacaatagaagaaaggcagtcctttggtgcaaacttgttagacaagggatttgtagatacctttagaaaacaacatcctggtgttgtcggttacacttattggggttatcgccatggtggccgcaaaaccaacaaaggatggagactggactacttcttggtgtcccaatcaattgcggccaatgtccatgattcttacatcctccctgatatcaatggaagtgatcattgccccattggccttattctcaagctctgatttgttcaaaatttcaccattcccagctttttgctaaagtcttgagtagattgtagctagagagtcacatgttttgcttctagagagagcttgctcatgtaaaaatatggaataatatatctatcagtaaacaggctccaaacaatctgagtcttgtcc

SEQ ID NO: 96983 - protein, 536 aa, Arabidopsis thaliana
  peptide (1)..(536): Ceres Seq. ID no. 12735550
  misc_feature (276)..(534): Pfam Name: Endonuclease/Exonuclease/phosphatase family Pfam Description: Endonuclease/Exonuclease/phosphatase family
  misc_feature (1)..(536): Homolog of NCBI NO: 15227354 NR Description: DNA-(apurinic or apyrimidinic site) lyase (ARP); id: At2g41460.1 [Arabidopsis thaliana]
  misc_feature (10)..(536): Homolog of NCBI NO: 472869 NR Description: ARP protein [Arabidopsis thaliana]
  misc_feature (190)..(536): Homolog of NCBI NO: 34908948 NR Description: putative exodeoxyribonuclease [Oryza sativa
  misc_feature (238)..(536): Homolog of NCBI NO: 34908950 NR Description: putative exodeoxyribonuclease [Oryza sativa
  misc_feature (180)..(536): Homolog of NCBI NO: 28829076 NR Description: similar to Dictyostelium discoideum (Slime mold).
  misc_feature (276)..(534): Homolog of NCBI NO: 34763743 NR Description: Exodeoxyribonuclease III [Fusobacterium nucleatum vincentii ATCC 49256] >gi|27886479|gb|EAA23735.1|
  misc_feature (180)..(536): Homolog of NCBI NO: 1703336 NR Description: DNA-(apurinic or apyrimidinic site) lyase (Class
  misc_feature (276)..(536): Homolog of NCBI NO: 16081140 NR Description: 3'-exo-deoxyribonuclease [Bacillus subtilis]
  misc_feature (276)..(535): Homolog of NCBI NO: 20808602 NR Description: Exonuclease III [Thermoanaerobacter >gi|20517232|gb|AAM25377.1| Exonuclease III [Thermoanaerobacter
  misc_feature (276)..(535): Homolog of NCBI NO: 19703399 NR Description: Exodeoxyribonuclease III [Fusobacterium nucleatum nucleatum ATCC 25586] >gi|19713467|gb|AAL94260.1|
MNNVLQFGLQSSAIYVAKFLVVPLRSLRVGSSFVGVGVGTRSFNKRLMSNATAFSINNSKRKELKIPGAAIDQNCHQMGSDTDRDEMGTLQDDRKEIEAMTVQELRSTLRKLGVPVKGRKQELISTLRLHMDSNLPDQKETSSSTRSDSVTIKRKISNREEPTEDECTNSEAYDIEHGEKRVKQSTEKNLKAKVSAKAIAKEQKSLMRTGKQQIQSKEETSSTISSELLKTEEIISSPSQSEPWTVLAHKKPQKDWKAYNPKTMRPPPLPEGTKCVKVMTWNVNGLRGLLKFESFSALQLAQRENFDILCLQETKLQVKDVEEIKKTLIDGYDHSFWSCSVSKLGYSGTAIISRIKPLSVRYGTGLSGHDTEGRIVTAEFDSFYLINTYVPNSGDGLKRLSYRIEEWDRTLSNHIKELEKSKPVVLTGDLNCAHEEIDIFNPAGNKRSAGFTIEERQSFGANLLDKGFVDTFRKQHPGVVGYTYWGYRHGGRKTNKGWRLDYFLVSQSIAANVHDSYILPDINGSDHCPIGLILKL

SEQ ID NO: 96984 - protein, 489 aa, Arabidopsis thaliana
  peptide (1)..(489): Ceres Seq. ID no. 12735551
  misc_feature (229)..(487): Pfam Name: Endonuclease/Exonuclease/phosphatase family Pfam Description: Endonuclease/Exonuclease/phosphatase family
  misc_feature (1)..(489): Homolog of NCBI NO: 15227354 NR Description: DNA-(apurinic or apyrimidinic site) lyase (ARP); id: At2g41460.1 [Arabidopsis thaliana]
  misc_feature (1)..(489): Homolog of NCBI NO: 472869 NR Description: ARP protein [Arabidopsis thaliana]
  misc_feature (143)..(489): Homolog of NCBI NO: 34908948 NR Description: putative exodeoxyribonuclease [Oryza sativa
  misc_feature (191)..(489): Homolog of NCBI NO: 34908950 NR Description: putative exodeoxyribonuclease [Oryza sativa
  misc_feature (133)..(489): Homolog of NCBI NO: 28829076 NR Description: similar to Dictyostelium discoideum (Slime mold).
  misc_feature (229)..(487): Homolog of NCBI NO: 34763743 NR Description: Exodeoxyribonuclease III [Fusobacterium nucleatum vincentii ATCC 49256] >gi|27886479|gb|EAA23735.1|
  misc_feature (133)..(489): Homolog of NCBI NO: 1703336 NR Description: DNA-(apurinic or apyrimidinic site) lyase (Class
  misc_feature (229)..(489): Homolog of NCBI NO: 16081140 NR Description: 3'-exo-deoxyribonuclease [Bacillus subtilis]
  misc_feature (229)..(488): Homolog of NCBI NO: 20808602 NR Description: Exonuclease III [Thermoanaerobacter >gi|20517232|gb|AAM25377.1| Exonuclease III [Thermoanaerobacter
  misc_feature (229)..(488): Homolog of NCBI NO: 19703399 NR Description: Exodeoxyribonuclease III [Fusobacterium nucleatum nucleatum ATCC 25586] >gi|19713467|gb|AAL94260.1|
MSNATAFSINNSKRKELKIPGAAIDQNCHQMGSDTDRDEMGTLQDDRKEIEAMTVQELRSTLRKLGVPVKGRKQELISTLRLHMDSNLPDQKETSSSTRSDSVTIKRKISNREEPTEDECTNSEAYDIEHGEKRVKQSTEKNLKAKVSAKAIAKEQKSLMRTGKQQIQSKEETSSTISSELLKTEEIISSPSQSEPWTVLAHKKPQKDWKAYNPKTMRPPPLPEGTKCVKVMTWNVNGLRGLLKFESFSALQLAQRENFDILCLQETKLQVKDVEEIKKTLIDGYDHSFWSCSVSKLGYSGTAIISRIKPLSVRYGTGLSGHDTEGRIVTAEFDSFYLINTYVPNSGDGLKRLSYRIEEWDRTLSNHIKELEKSKPVVLTGDLNCAHEEIDIFNPAGNKRSAGFTIEERQSFGANLLDKGFVDTFRKQHPGVVGYTYWGYRHGGRKTNKGWRLDYFLVSQSIAANVHDSYILPDINGSDHCPIGLILKL

SEQ ID NO: 96985 - protein, 459 aa, Arabidopsis thaliana
  peptide (1)..(459): Ceres Seq. ID no. 12735552
  misc_feature (199)..(457): Pfam Name: Endonuclease/Exonuclease/phosphatase family Pfam Description: Endonuclease/Exonuclease/phosphatase family
  misc_feature (1)..(459): Homolog of NCBI NO: 15227354 NR Description: DNA-(apurinic or apyrimidinic site) lyase (ARP); id: At2g41460.1 [Arabidopsis thaliana]
  misc_feature (1)..(459): Homolog of NCBI NO: 472869 NR Description: ARP protein [Arabidopsis thaliana]
  misc_feature (113)..(459): Homolog of NCBI NO: 34908948 NR Description: putative exodeoxyribonuclease [Oryza sativa
  misc_feature (161)..(459): Homolog of NCBI NO: 34908950 NR Description: putative exodeoxyribonuclease [Oryza sativa
  misc_feature (103)..(459): Homolog of NCBI NO: 28829076 NR Description: similar to Dictyostelium discoideum (Slime mold).
  misc_feature (199)..(457): Homolog of NCBI NO: 34763743 NR Description: Exodeoxyribonuclease III [Fusobacterium nucleatum vincentii ATCC 49256] >gi|27886479|gb|EAA23735.1|
  misc_feature (103)..(459): Homolog of NCBI NO: 1703336 NR Description: DNA-(apurinic or apyrimidinic site) lyase (Class
  misc_feature (199)..(459): Homolog of NCBI NO: 16081140 NR Description: 3'-exo-deoxyribonuclease [Bacillus subtilis]
  misc_feature (199)..(458): Homolog of NCBI NO: 20808602 NR Description: Exonuclease III [Thermoanaerobacter >gi|20517232|gb|AAM25377.1| Exonuclease III [Thermoanaerobacter
  misc_feature (199)..(458): Homolog of NCBI NO: 19703399 NR Description: Exodeoxyribonuclease III [Fusobacterium nucleatum nucleatum ATCC 25586] >gi|19713467|gb|AAL94260.1|
MGSDTDRDEMGTLQDDRKEIEAMTVQELRSTLRKLGVPVKGRKQELISTLRLHMDSNLPDQKETSSSTRSDSVTIKRKISNREEPTEDECTNSEAYDIEHGEKRVKQSTEKNLKAKVSAKAIAKEQKSLMRTGKQQIQSKEETSSTISSELLKTEEIISSPSQSEPWTVLAHKKPQKDWKAYNPKTMRPPPLPEGTKCVKVMTWNVNGLRGLLKFESFSALQLAQRENFDILCLQETKLQVKDVEEIKKTLIDGYDHSFWSCSVSKLGYSGTAIISRIKPLSVRYGTGLSGHDTEGRIVTAEFDSFYLINTYVPNSGDGLKRLSYRIEEWDRTLSNHIKELEKSKPVVLTGDLNCAHEEIDIFNPAGNKRSAGFTIEERQSFGANLLDKGFVDTFRKQHPGVVGYTYWGYRHGGRKTNKGWRLDYFLVSQSIAANVHDSYILPDINGSDHCPIGLILKL

SEQ ID NO: 96986 - DNA, 735 bp, Arabidopsis thaliana
  misc_feature (1)..(735): Ceres Seq. ID no. 12735583
  misc_feature: MA Experiment ID: 20000439 Result: Up-regulated in Transcription
  misc_feature: MA Experiment 20000439 PARAMETER Experiment Name: At_Roots__P Parameter: Age (day) Value: 14 vs. 21
  misc_feature: MA Experiment 20000439 PARAMETER Experiment Name: At_Roots__P Parameter: Organism Value: A. thaliana
  misc_feature: MA Experiment 20000439 PARAMETER Experiment Name: At_Roots__P Parameter: Tissue Value: Roots vs. Whole Plant
  misc_feature: MA Experiment ID: 20000527 Result: Down-regulated in Transcription
  misc_feature: MA Experiment 20000527 PARAMETER Experiment Name: At_10percent_PEG_P Parameter: Age (day) Value: 20
  misc_feature: MA Experiment 20000527 PARAMETER Experiment Name: At_10percent_PEG_P Parameter: Organism Value: A. thaliana
  misc_feature: MA Experiment 20000527 PARAMETER Experiment Name: At_10percent_PEG_P Parameter: Plant Line Value: WS
  misc_feature: MA Experiment 20000527 PARAMETER Experiment Name: At_10percent_PEG_P Parameter: Timepoint (day) Value: 20
  misc_feature: MA Experiment 20000527 PARAMETER Experiment Name: At_10percent_PEG_P Parameter: Tissue Value: Whole Plant
  misc_feature: MA Experiment 20000527 PARAMETER Experiment Name: At_10percent_PEG_P Parameter: Treatment Value: 10percent PEG vs. No Treatment
atggaagatgctggtgaacatttacggtgtaacgataacgttaacgacgaggagcgtttgccattggagtttatgatcggaaactcaacatccacggcggagctacagccgcctccaccgttcttggtaaagacatacaaagtggtggaggatccgacgacggacggggttatatcttggaacgaatacggaactggtttcgtcgtgtggcagccggcagaattcgctagagatctgttaccaacacttttcaagcattgcaacttctctagcttcgttcgccagctcaatacttacggttttcgaaaagtaacgacgataagatgggaatttagtaatgagatgtttcgaaaggggcaaagagagcttatgagcaatatccgaagaaggaagagccaacattggtcacacaacaagtctaatcaccaggttgtaccaacaacaacgatggtgaatcaagaaggtcatcaacggattgggattgatcatcaccatgaggatcaacagtcttccgccacttcatcctctttcgtatacactgcattactcgacgaaaacaaatgcttgaagaatgaaaacgagttattaagctgcgaacttgggaaaaccaagaagaaatgcaagcagcttatggagttggtggagagatacagaggagaagacgaagatgcaactgatgaaagtgatgatgaagaagatgaagggcttaagttgttcggagtaaaacttgaatga

SEQ ID NO: 96987 - protein, 244 aa, Arabidopsis thaliana
  peptide (1)..(244): Ceres Seq. ID no. 12735584
  misc_feature (39)..(225): Pfam Name: HSF-type DNA-binding Pfam Description: HSF-type DNA-binding
  misc_feature (1)..(244): Homolog of NCBI NO: 15227413 NR Description: putative heat shock transcription factor; protein At2g41690.1 [Arabidopsis thaliana] >gi|7485002|pir||T00825
  misc_feature (38)..(217): Homolog of NCBI NO: 5821136 NR Description: heat shock factor [Nicotiana tabacum]
  misc_feature (39)..(243): Homolog of NCBI NO: 38344369 NR Description: OSJNBb0032E06.3 [Oryza sativa (japonica
  misc_feature (38)..(217): Homolog of NCBI NO: 123684 NR Description: HEAT SHOCK FACTOR PROTEIN HSF24 (HEAT SHOCK FACTOR 24) (HSTF 24) (HEAT STRESS TRANSCRIPTION FACTOR)
MEDAGEHLRCNDNVNDEERLPLEFMIGNSTSTAELQPPPPFLVKTYKVVEDPTTDGVISWNEYGTGFVVWQPAEFARDLLPTLFKHCNFSSFVRQLNTYGFRKVTTIRWEFSNEMFRKGQRELMSNIRRRKSQHWSHNKSNHQVVPTTTMVNQEGHQRIGIDHHHEDQQSSATSSSFVYTALLDENKCLKNENELLSCELGKTKKKCKQLMELVERYRGEDEDATDESDDEEDEGLKLFGVKLE

SEQ ID NO: 96988 - protein, 220 aa, Arabidopsis thaliana
  peptide (1)..(220): Ceres Seq. ID no. 12735585
  misc_feature (15)..(201): Pfam Name: HSF-type DNA-binding Pfam Description: HSF-type DNA-binding
  misc_feature (1)..(220): Homolog of NCBI NO: 15227413 NR Description: putative heat shock transcription factor; protein At2g41690.1 [Arabidopsis thaliana] >gi|7485002|pir||T00825
  misc_feature (14)..(193): Homolog of NCBI NO: 5821136 NR Description: heat shock factor [Nicotiana tabacum]
  misc_feature (15)..(219): Homolog of NCBI NO: 38344369 NR Description: OSJNBb0032E06.3 [Oryza sativa (japonica
  misc_feature (14)..(193): Homolog of NCBI NO: 123684 NR Description: HEAT SHOCK FACTOR PROTEIN HSF24 (HEAT SHOCK FACTOR 24) (HSTF 24) (HEAT STRESS TRANSCRIPTION FACTOR)
MIGNSTSTAELQPPPPFLVKTYKVVEDPTTDGVISWNEYGTGFVVWQPAEFARDLLPTLFKHCNFSSFVRQLNTYGFRKVTTIRWEFSNEMFRKGQRELMSNIRRRKSQHWSHNKSNHQVVPTTTMVNQEGHQRIGIDHHHEDQQSSATSSSFVYTALLDENKCLKNENELLSCELGKTKKKCKQLMELVERYRGEDEDATDESDDEEDEGLKLFGVKLE

SEQ ID NO: 96989 - protein, 130 aa, Arabidopsis thaliana
  peptide (1)..(130): Ceres Seq. ID no. 12735586
  misc_feature (1)..(111): Pfam Name: HSF-type DNA-binding Pfam Description: HSF-type DNA-binding
  misc_feature (1)..(130): Homolog of NCBI NO: 15227413 NR Description: putative heat shock transcription factor; protein At2g41690.1 [Arabidopsis thaliana] >gi|7485002|pir||T00825
  misc_feature (1)..(103): Homolog of NCBI NO: 5821136 NR Description: heat shock factor [Nicotiana tabacum]
  misc_feature (1)..(129): Homolog of NCBI NO: 38344369 NR Description: OSJNBb0032E06.3 [Oryza sativa (japonica
  misc_feature (1)..(103): Homolog of NCBI NO: 123684 NR Description: HEAT SHOCK FACTOR PROTEIN HSF24 (HEAT SHOCK FACTOR 24) (HSTF 24) (HEAT STRESS TRANSCRIPTION FACTOR)
MFRKGQRELMSNIRRRKSQHWSHNKSNHQVVPTTTMVNQEGHQRIGIDHHHEDQQSSATSSSFVYTALLDENKCLKNENELLSCELGKTKKKCKQLMELVERYRGEDEDATDESDDEEDEGLKLFGVKLE

SEQ ID NO: 96990 - DNA, 831 bp, Arabidopsis thaliana
  misc_feature (1)..(831): Ceres Seq. ID no. 12735623
  misc_feature: MA Experiment ID: 20001451 Result: Up-regulated in Transcription
  misc_feature: MA Experiment 20001451 PARAMETER Experiment Name: At_Far-red-induction_P Parameter: Age (day) Value: 7
  misc_feature: MA Experiment 20001451 PARAMETER Experiment Name: At_Far-red-induction_P Parameter: Light Value: Far-red vs. White
  misc_feature: MA Experiment 20001451 PARAMETER Experiment Name: At_Far-red-induction_P Parameter: Organism Value: A. thaliana
  misc_feature: MA Experiment 20001451 PARAMETER Experiment Name: At_Far-red-induction_P Parameter: Plant Line Value: Columbia
  misc_feature: MA Experiment 20001451 PARAMETER Experiment Name: At_Far-red-induction_P Parameter: Timepoint (hr) Value: 24
  misc_feature: MA Experiment 20001451 PARAMETER Experiment Name: At_Far-red-induction_P Parameter: Tissue Value: Whole Plant
  misc_feature: MA Experiment ID: 20001558 Result: Down-regulated in Transcription
  misc_feature: MA Experiment 20001558 PARAMETER Experiment Name: At_Drought_Soil_Dry_P Parameter: Age (day) Value: 27
  misc_feature: MA Experiment 20001558 PARAMETER Experiment Name: At_Drought_Soil_Dry_P Parameter: Organism Value: A. thaliana
  misc_feature: MA Experiment 20001558 PARAMETER Experiment Name: At_Drought_Soil_Dry_P Parameter: Plant Line Value: WS
  misc_feature: MA Experiment 20001558 PARAMETER Experiment Name: At_Drought_Soil_Dry_P Parameter: Post Timepoint (hr) Value: 6
  misc_feature: MA Experiment 20001558 PARAMETER Experiment Name: At_Drought_Soil_Dry_P Parameter: Post-Treatment Value: Re-Water vs. No Drought
  misc_feature: MA Experiment 20001558 PARAMETER Experiment Name: At_Drought_Soil_Dry_P Parameter: Timepoint (day) Value: 13
  misc_feature: MA Experiment 20001558 PARAMETER Experiment Name: At_Drought_Soil_Dry_P Parameter: Treatment Value: Drought vs. No Drought
  misc_feature: MA Experiment ID: 20001905 Result: Down-regulated in Transcription
  misc_feature: MA Experiment 20001905 PARAMETER Experiment Name: At_Drought_Reproduction_P Parameter: Age (day) Value: 40
  misc_feature: MA Experiment 20001905 PARAMETER Experiment Name: At_Drought_Reproduction_P Parameter: Organism Value: A. thaliana
  misc_feature: MA Experiment 20001905 PARAMETER Experiment Name: At_Drought_Reproduction_P Parameter: Plant Line Value: WS
  misc_feature: MA Experiment 20001905 PARAMETER Experiment Name: At_Drought_Reproduction_P Parameter: Timepoint (day) Value: 10
  misc_feature: MA Experiment 20001905 PARAMETER Experiment Name: At_Drought_Reproduction_P Parameter: Tissue Value: Rosettes
  misc_feature: MA Experiment 20001905 PARAMETER Experiment Name: At_Drought_Reproduction_P Parameter: Treatment Value: Drought vs. No Drought
atggaatcaaaatcagaacaaaacgagtggagctccggcgtgtgggctcacttaaccgccgtacggcaacaatcgccgcttgttcagtgcatcaccaacttcgtctcgatggatctcgttgccaacacgcttttatccgccggtgcatctccagcgatggtccattccgtcgttgagattcctgatttcactcctcatattcacgcgctctgcgtcaacgtcggaacacttacacctgactggcttccgtcaatgaaagctgccgctgaactcgcttctcagctccgaaagccttgggttcttgatcccgccgccgtgagttgctccggattccgattaaaagcgtgtttggagctcatcgagctaaaacctactgtaatcaaaggaaacggttctgagattattgctctctcctctgcttcacgtggacaaactaagggtgctgatagctcacatgaatcaacagacgctatagaagctgcaaagtcattagcgatgtcaagtggtgctgttgttgcagtgtcaggagctgttgatattgttactgatgggaaacaggttattggtgttcacaacgggacgaagatgatgcaacagattactgcaactggttgttctctagctggtttgattgtagcgtttcttgctattgattcatcacgggtactggaagctacggtttccgctatggctgtctttggcattgcaggtgagttgggtgaagcgatggcgaatggtccagcgtcattgagaatgcatttgatagattgtctttatgggttggatgaaaccacagtgcttaaacgtgtgaatgtgaccaggttgggttga

SEQ ID NO: 96991 - protein, 276 aa, Arabidopsis thaliana
  peptide (1)..(276): Ceres Seq. ID no. 12735624
  misc_feature (18)..(264): Pfam Name: Hydroxyethylthiazole kinase family Pfam Description: Hydroxyethylthiazole kinase family
  misc_feature (1)..(276): Homolog of NCBI NO: 15229565 NR Description: hydoxyethylthiazole kinase, putative; protein id:
  misc_feature (10)..(273): Homolog of NCBI NO: 34915114 NR Description: putative hydoxyethylthiazole kinase [Oryza sativa
  misc_feature (18)..(258): Homolog of NCBI NO: 24216064 NR Description: hydroxyethylthiazole kinase [Leptospira serovar lai str. 56601] >gi|24197300|gb|AAN50563.1|AE011496_2
  misc_feature (11)..(261): Homolog of NCBI NO: 26248479 NR Description: Hydroxyethylthiazole kinase [Escherichia coli >gi|26108884|gb|AAN81087.1|AE016763_46 Hydroxyethylthiazole
  misc_feature (11)..(263): Homolog of NCBI NO: 15802579 NR Description: hydoxyethylthiazole kinase [Escherichia coli
  misc_feature (11)..(263): Homolog of NCBI NO: 15832161 NR Description: hydoxyethylthiazole kinase [Escherichia coli
  misc_feature (16)..(263): Homolog of NCBI NO: 16130042 NR Description: hydoxyethylthiazole kinase [Escherichia coli K12]
  misc_feature (11)..(263): Homolog of NCBI NO: 24113480 NR Description: hydoxyethylthiazole kinase [Shigella flexneri 2a
  misc_feature (18)..(272): Homolog of NCBI NO: 28899986 NR Description: putative hydroxyethylthiazole kinase [Vibrio RIMD 2210633] >gi|28808269|dbj|BAC61474.1| putative
  misc_feature (18)..(276): Homolog of NCBI NO: 14521296 NR Description: hydroxyethylthiazole kinase [Pyrococcus abyssi]
MESKSEQNEWSSGVWAHLTAVRQQSPLVQCITNFVSMDLVANTLLSAGASPAMVHSVVEIPDFTPHIHALCVNVGTLTPDWLPSMKAAAELASQLRKPWVLDPAAVSCSGFRLKACLELIELKPTVIKGNGSEIIALSSASRGQTKGADSSHESTDAIEAAKSLAMSSGAVVAVSGAVDIVTDGKQVIGVHNGTKMMQQITATGCSLAGLIVAFLAIDSSRVLEATVSAMAVFGIAGELGEAMANGPASLRMHLIDCLYGLDETTVLKRVNVTRLG

SEQ ID NO: 96992 - protein, 240 aa, Arabidopsis thaliana
  peptide (1)..(240): Ceres Seq. ID no. 12735625
  misc_feature (1)..(228): Pfam Name: Hydroxyethylthiazole kinase family Pfam Description: Hydroxyethylthiazole kinase family
  misc_feature (1)..(240): Homolog of NCBI NO: 15229565 NR Description: hydoxyethylthiazole kinase, putative; protein id:
  misc_feature (1)..(237): Homolog of NCBI NO: 34915114 NR Description: putative hydoxyethylthiazole kinase [Oryza sativa
  misc_feature (1)..(222): Homolog of NCBI NO: 24216064 NR Description: hydroxyethylthiazole kinase [Leptospira serovar lai str. 56601] >gi|24197300|gb|AAN50563.1|AE011496_2
  misc_feature (1)..(225): Homolog of NCBI NO: 26248479 NR Description: Hydroxyethylthiazole kinase [Escherichia coli >gi|26108884|gb|AAN81087.1|AE016763_46 Hydroxyethylthiazole
  misc_feature (1)..(227): Homolog of NCBI NO: 15802579 NR Description: hydoxyethylthiazole kinase [Escherichia coli
  misc_feature (1)..(227): Homolog of NCBI NO: 15832161 NR Description: hydoxyethylthiazole kinase [Escherichia coli
  misc_feature (1)..(227): Homolog of NCBI NO: 16130042 NR Description: hydoxyethylthiazole kinase [Escherichia coli K12]
  misc_feature (1)..(227): Homolog of NCBI NO: 24113480 NR Description: hydoxyethylthiazole kinase [Shigella flexneri 2a
  misc_feature (1)..(236): Homolog of NCBI NO: 28899986 NR Description: putative hydroxyethylthiazole kinase [Vibrio RIMD 2210633] >gi|28808269|dbj|BAC61474.1| putative
  misc_feature (1)..(240): Homolog of NCBI NO: 14521296 NR Description: hydroxyethylthiazole kinase [Pyrococcus abyssi]
MDLVANTLLSAGASPAMVHSVVEIPDFTPHIHALCVNVGTLTPDWLPSMKAAAELASQLRKPWVLDPAAVSCSGFRLKACLELIELKPTVIKGNGSEIIALSSASRGQTKGADSSHESTDAIEAAKSLAMSSGAVVAVSGAVDIVTDGKQVIGVHNGTKMMQQITATGCSLAGLIVAFLAIDSSRVLEATVSAMAVFGIAGELGEAMANGPASLRMHLIDCLYGLDETTVLKRVNVTRLG

SEQ ID NO: 96993 - protein, 224 aa, Arabidopsis thaliana
  peptide (1)..(224): Ceres Seq. ID no. 12735626
  misc_feature (1)..(212): Pfam Name: Hydroxyethylthiazole kinase family Pfam Description: Hydroxyethylthiazole kinase family
  misc_feature (1)..(224): Homolog of NCBI NO: 15229565 NR Description: hydoxyethylthiazole kinase, putative; protein id:
  misc_feature (1)..(221): Homolog of NCBI NO: 34915114 NR Description: putative hydoxyethylthiazole kinase [Oryza sativa
  misc_feature (1)..(206): Homolog of NCBI NO: 24216064 NR Description: hydroxyethylthiazole kinase [Leptospira serovar lai str. 56601] >gi|24197300|gb|AAN50563.1|AE011496_2
  misc_feature (1)..(209): Homolog of NCBI NO: 26248479 NR Description: Hydroxyethylthiazole kinase [Escherichia coli >gi|26108884|gb|AAN81087.1|AE016763_46 Hydroxyethylthiazole
  misc_feature (1)..(211): Homolog of NCBI NO: 15802579 NR Description: hydoxyethylthiazole kinase [Escherichia coli
  misc_feature (1)..(211): Homolog of NCBI NO: 15832161 NR Description: hydoxyethylthiazole kinase [Escherichia coli
  misc_feature (1)..(211): Homolog of NCBI NO: 16130042 NR Description: hydoxyethylthiazole kinase [Escherichia coli K12]
  misc_feature (1)..(211): Homolog of NCBI NO: 24113480 NR Description: hydoxyethylthiazole kinase [Shigella flexneri 2a
  misc_feature (1)..(220): Homolog of NCBI NO: 28899986 NR Description: putative hydroxyethylthiazole kinase [Vibrio RIMD 2210633] >gi|28808269|dbj|BAC61474.1| putative
  misc_feature (1)..(224): Homolog of NCBI NO: 14521296 NR Description: hydroxyethylthiazole kinase [Pyrococcus abyssi]
MVHSVVEIPDFTPHIHALCVNVGTLTPDWLPSMKAAAELASQLRKPWVLDPAAVSCSGFRLKACLELIELKPTVIKGNGSEIIALSSASRGQTKGADSSHESTDAIEAAKSLAMSSGAVVAVSGAVDIVTDGKQVIGVHNGTKMMQQITATGCSLAGLIVAFLAIDSSRVLEATVSAMAVFGIAGELGEAMANGPASLRMHLIDCLYGLDETTVLKRVNVTRLG

SEQ ID NO: 96994 - DNA, 1143 bp, Arabidopsis thaliana
  misc_feature (1)..(1143): Ceres Seq. ID no. 12735645
  misc_feature: MA Experiment ID: 20000439 Result: Down-regulated in Transcription
  misc_feature: MA Experiment 20000439 PARAMETER Experiment Name: At_Roots__P Parameter: Age (day) Value: 14 vs. 21
  misc_feature: MA Experiment 20000439 PARAMETER Experiment Name: At_Roots__P Parameter: Organism Value: A. thaliana
  misc_feature: MA Experiment 20000439 PARAMETER Experiment Name: At_Roots__P Parameter: Tissue Value: Roots vs. Whole Plant
  misc_feature: MA Experiment ID: 20000495 Result: Down-regulated in Transcription
  misc_feature: MA Experiment 20000495 PARAMETER Experiment Name: At_Guard_Cells_P Parameter: Harvest Date Value: 8/2/2002
  misc_feature: MA Experiment 20000495 PARAMETER Experiment Name: At_Guard_Cells_P Parameter: Organism Value: A. thaliana
  misc_feature: MA Experiment 20000495 PARAMETER Experiment Name: At_Guard_Cells_P Parameter: Tissue Value: Guard Cells vs. Leaves
  misc_feature: MA Experiment ID: 20000496 Result: Up-regulated in Transcription
  misc_feature: MA Experiment 20000496 PARAMETER Experiment Name: At_Guard_Cells_P Parameter: Harvest Date Value: 7/19/2002
  misc_feature: MA Experiment 20000496 PARAMETER Experiment Name: At_Guard_Cells_P Parameter: Organism Value: Canola
  misc_feature: MA Experiment 20000496 PARAMETER Experiment Name: At_Guard_Cells_P Parameter: Tissue Value: Guard Cells vs. Leaves
  misc_feature: MA Experiment ID: 20001911 Result: Down-regulated in Transcription
  misc_feature: MA Experiment 20001911 PARAMETER Experiment Name: At_Drought_Reproduction_P Parameter: Age (day) Value: 40
  misc_feature: MA Experiment 20001911 PARAMETER Experiment Name: At_Drought_Reproduction_P Parameter: Organism Value: A. thaliana
  misc_feature: MA Experiment 20001911 PARAMETER Experiment Name: At_Drought_Reproduction_P Parameter: Plant Line Value: WS
  misc_feature: MA Experiment 20001911 PARAMETER Experiment Name: At_Drought_Reproduction_P Parameter: Timepoint (day) Value: 10
  misc_feature: MA Experiment 20001911 PARAMETER Experiment Name: At_Drought_Reproduction_P Parameter: Tissue Value: Flowers
  misc_feature: MA Experiment 20001911 PARAMETER Experiment Name: At_Drought_Reproduction_P Parameter: Treatment Value: Drought vs. No Drought
atggataaagattactcggcaccaaacttcttaggtgaatcctcaggcggtaacgatgataacagctctggtatgatagactatatgttcaatagaaaccttcaacaacaacaaaagcaatcgatgccacaacagcagcaacatcaactctctccttccggatttggagcaacaccttttgataaaatgaacttctctgatgtgatgcagtttgcggacttcggttcgaaacttgcgttgaaccagaccagaaaccaagacgatcaagaaaccgggattgaccccgtttatttcttgaagttccctgtcttgaacgacaaaatagaggaccataaccaaacccaacatctcatgccttctcatcagacgtctcaagaaggaggtgagtgtggaggaaacataggcaatgtgtttcttgaagaaaaagaagatcaagacgatgacaacgacaacaactccgtgcaactacgttttattggaggagaagaagaagatagggagaacaagaatgttacgaaaaaggaggtgaagagcaagaggaagagagctagaacgagcaagaccagcgaagaagtggaaagccaacggatgactcatatcgcggtcgaaagaaaccgtaggaagcaaatgaatgagcatcttcgtgtccttagatctctcatgcctggctcctacgttcaaaggggagaccaagcgtcaatcataggaggagcaatagagtttgtgagagagctcgagcaactcctacaatgtcttgaatcacagaagcgtcgaagaatcttaggagaaaccggtagggacatgacaacgacaacgacttcttcttcttctcccataactacggtagcgaaccaagcacaaccgctcattattacgggaaatgtaaccgagctagagggcggaggagggcttcgggaggagactgcggagaacaagtcgtgcttggctgacgtggaggtgaagctgctagggtttgacgccatgatcaagatactttcaagaagaaggccgggacagctgattaagactatagctgctttggaggatcttcatctctctattcttcacactaacatcactaccatggaacaaaccgtcctctactcctttaatgtcaaggcaagtttatatgttaaaaagtaa

SEQ ID NO: 96995 - protein, 380 aa, Arabidopsis thaliana
  peptide (1)..(380): Ceres Seq. ID no. 12735646
  misc_feature (195)..(246): Pfam Name: Helix-loop-helix DNA-binding domain Pfam Description: Helix-loop-helix DNA-binding domain
  misc_feature (1)..(380): Homolog of NCBI NO: 11994233 NR Description: contains similarity to helix-loop-helix
  misc_feature (1)..(373): Homolog of NCBI NO: 30687365 NR Description: bHLH protein family [Arabidopsis thaliana]
  misc_feature (163)..(261): Homolog of NCBI NO: 38346722 NR Description: OSJNBa0086O06.20 [Oryza sativa (japonica
  misc_feature (299)..(373): Homolog of NCBI NO: 38346722 NR Description: OSJNBa0086O06.20 [Oryza sativa (japonica
  misc_feature (110)..(373): Homolog of NCBI NO: 28558779 NR Description: helix-loop-helix-like protein [Cucumis melo]
  misc_feature (162)..(373): Homolog of NCBI NO: 15234187 NR Description: bHLH protein; protein id: At4g01460.1, supported cDNA: gi_20127053, supported by cDNA: gi_20466627 [Arabidopsis
  misc_feature (127)..(373): Homolog of NCBI NO: 34902426 NR Description: Unknown protein [Oryza sativa (japonica
  misc_feature (177)..(373): Homolog of NCBI NO: 37533680 NR Description: putative helix-loop-helix DNA-binding protein
  misc_feature (138)..(373): Homolog of NCBI NO: 18395124 NR Description: expressed protein; protein id: At1g22490.1,
  misc_feature (95)..(373): Homolog of NCBI NO: 15218391 NR Description: bHLH protein; protein id: At1g72210.1
MDKDYSAPNFLGESSGGNDDNSSGMIDYMFNRNLQQQQKQSMPQQQQHQLSPSGFGATPFDKMNFSDVMQFADFGSKLALNQTRNQDDQETGIDPVYFLKFPVLNDKIEDHNQTQHLMPSHQTSQEGGECGGNIGNVFLEEKEDQDDDNDNNSVQLRFIGGEEEDRENKNVTKKEVKSKRKRARTSKTSEEVESQRMTHIAVERNRRKQMNEHLRVLRSLMPGSYVQRGDQASIIGGAIEFVRELEQLLQCLESQKRRRILGETGRDMTTTTTSSSSPITTVANQAQPLIITGNVTELEGGGGLREETAENKSCLADVEVKLLGFDAMIKILSRRRPGQLIKTIAALEDLHLSILHTNITTMEQTVLYSFNVKASLYVKK

SEQ ID NO: 96996 - protein, 356 aa, Arabidopsis thaliana
  peptide (1)..(356): Ceres Seq. ID no. 12735647
  misc_feature (171)..(222): Pfam Name: Helix-loop-helix DNA-binding domain Pfam Description: Helix-loop-helix DNA-binding domain
  misc_feature (1)..(356): Homolog of NCBI NO: 11994233 NR Description: contains similarity to helix-loop-helix
  misc_feature (1)..(349): Homolog of NCBI NO: 30687365 NR Description: bHLH protein family [Arabidopsis thaliana]
  misc_feature (139)..(237): Homolog of NCBI NO: 38346722 NR Description: OSJNBa0086O06.20 [Oryza sativa (japonica
  misc_feature (275)..(349): Homolog of NCBI NO: 38346722 NR Description: OSJNBa0086O06.20 [Oryza sativa (japonica
  misc_feature (86)..(349): Homolog of NCBI NO: 28558779 NR Description: helix-loop-helix-like protein [Cucumis melo]
  misc_feature (138)..(349): Homolog of NCBI NO: 15234187 NR Description: bHLH protein; protein id: At4g01460.1, supported cDNA: gi_20127053, supported by cDNA: gi_20466627 [Arabidopsis
  misc_feature (103)..(349): Homolog of NCBI NO: 34902426 NR Description: Unknown protein [Oryza sativa (japonica
  misc_feature (153)..(349): Homolog of NCBI NO: 37533680 NR Description: putative helix-loop-helix DNA-binding protein
  misc_feature (114)..(349): Homolog of NCBI NO: 18395124 NR Description: expressed protein; protein id: At1g22490.1,
  misc_feature (71)..(349): Homolog of NCBI NO: 15218391 NR Description: bHLH protein; protein id: At1g72210.1
MIDYMFNRNLQQQQKQSMPQQQQHQLSPSGFGATPFDKMNFSDVMQFADFGSKLALNQTRNQDDQETGIDPVYFLKFPVLNDKIEDHNQTQHLMPSHQTSQEGGECGGNIGNVFLEEKEDQDDDNDNNSVQLRFIGGEEEDRENKNVTKKEVKSKRKRARTSKTSEEVESQRMTHIAVERNRRKQMNEHLRVLRSLMPGSYVQRGDQASIIGGAIEFVRELEQLLQCLESQKRRRILGETGRDMTTTTTSSSSPITTVANQAQPLIITGNVTELEGGGGLREETAENKSCLADVEVKLLGFDAMIKILSRRRPGQLIKTIAALEDLHLSILHTNITTMEQTVLYSFNVKASLYVKK

SEQ ID NO: 96997 - protein, 352 aa, Arabidopsis thaliana
  peptide (1)..(352): Ceres Seq. ID no. 12735648
  misc_feature (167)..(218): Pfam Name: Helix-loop-helix DNA-binding domain Pfam Description: Helix-loop-helix DNA-binding domain
  misc_feature (1)..(352): Homolog of NCBI NO: 11994233 NR Description: contains similarity to helix-loop-helix
  misc_feature (1)..(345): Homolog of NCBI NO: 30687365 NR Description: bHLH protein family [Arabidopsis thaliana]
  misc_feature (135)..(233): Homolog of NCBI NO: 38346722 NR Description: OSJNBa0086O06.20 [Oryza sativa (japonica
  misc_feature (271)..(345): Homolog of NCBI NO: 38346722 NR Description: OSJNBa0086O06.20 [Oryza sativa (japonica
  misc_feature (82)..(345): Homolog of NCBI NO: 28558779 NR Description: helix-loop-helix-like protein [Cucumis melo]
  misc_feature (134)..(345): Homolog of NCBI NO: 15234187 NR Description: bHLH protein; protein id: At4g01460.1, supported cDNA: gi_20127053, supported by cDNA: gi_20466627 [Arabidopsis
  misc_feature (99)..(345): Homolog of NCBI NO: 34902426 NR Description: Unknown protein [Oryza sativa (japonica
  misc_feature (149)..(345): Homolog of NCBI NO: 37533680 NR Description: putative helix-loop-helix DNA-binding protein
  misc_feature (110)..(345): Homolog of NCBI NO: 18395124 NR Description: expressed protein; protein id: At1g22490.1,
  misc_feature (67)..(345): Homolog of NCBI NO: 15218391 NR Description: bHLH protein; protein id: At1g72210.1
MFNRNLQQQQKQSMPQQQQHQLSPSGFGATPFDKMNFSDVMQFADFGSKLALNQTRNQDDQETGIDPVYFLKFPVLNDKIEDHNQTQHLMPSHQTSQEGGECGGNIGNVFLEEKEDQDDDNDNNSVQLRFIGGEEEDRENKNVTKKEVKSKRKRARTSKTSEEVESQRMTHIAVERNRRKQMNEHLRVLRSLMPGSYVQRGDQASIIGGAIEFVRELEQLLQCLESQKRRRILGETGRDMTTTTTSSSSPITTVANQAQPLIITGNVTELEGGGGLREETAENKSCLADVEVKLLGFDAMIKILSRRRPGQLIKTIAALEDLHLSILHTNITTMEQTVLYSFNVKASLYVKK

SEQ ID NO: 96998 - DNA, 1032 bp, Arabidopsis thaliana
  misc_feature (1)..(1032): Ceres Seq. ID no. 12735649
  misc_feature: MA Experiment ID: 20000234 Result: Up-regulated in Transcription
  misc_feature: MA Experiment 20000234 PARAMETER Experiment Name: At_Siliques_P Parameter: Age (day) Value: 21
  misc_feature: MA Experiment 20000234 PARAMETER Experiment Name: At_Siliques_P Parameter: Organism Value: A. thaliana
  misc_feature: MA Experiment 20000234 PARAMETER Experiment Name: At_Siliques_P Parameter: Plant Line Value: WS
  misc_feature: MA Experiment 20000234 PARAMETER Experiment Name: At_Siliques_P Parameter: Tissue Value: Less Than 5mm Siliques vs. Whole Plant
  misc_feature: MA Experiment ID: 20000235 Result: Up-regulated in Transcription
  misc_feature: MA Experiment 20000235 PARAMETER Experiment Name: At_Siliques_P Parameter: Age (day) Value: 21
  misc_feature: MA Experiment 20000235 PARAMETER Experiment Name: At_Siliques_P Parameter: Organism Value: A. thaliana
  misc_feature: MA Experiment 20000235 PARAMETER Experiment Name: At_Siliques_P Parameter: Plant Line Value: WS
  misc_feature: MA Experiment 20000235 PARAMETER Experiment Name: At_Siliques_P Parameter: Tissue Value: 5-10mm Siliques vs. Whole Plant
  misc_feature: MA Experiment ID: 20000264 Result: Up-regulated in Transcription
  misc_feature: MA Experiment 20000264 PARAMETER Experiment Name: At_Open_Flower_P Parameter: Age (day) Value: 21
  misc_feature: MA Experiment 20000264 PARAMETER Experiment Name: At_Open_Flower_P Parameter: Plant Line Value: WS
  misc_feature: MA Experiment 20000264 PARAMETER Experiment Name: At_Open_Flower_P Parameter: Tissue Value: Open Flower vs. Whole Plant
  misc_feature: MA Experiment ID: 20000265 Result: Up-regulated in Transcription
  misc_feature: MA Experiment 20000265 PARAMETER Experiment Name: At_Open_Flower_P Parameter: Age (day) Value: 21
  misc_feature: MA Experiment 20000265 PARAMETER Experiment Name: At_Open_Flower_P Parameter: Plant Line Value: WS
  misc_feature: MA Experiment 20000265 PARAMETER Experiment Name: At_Open_Flower_P Parameter: Tissue Value: Closed Flower vs. Whole Plant
  misc_feature: MA Experiment ID: 20000286 Result: Up-regulated in Transcription
  misc_feature: MA Experiment 20000286 PARAMETER Experiment Name: At_Open_Flower_P Parameter: Age (day) Value: 21
  misc_feature: MA Experiment 20000286 PARAMETER Experiment Name: At_Open_Flower_P Parameter: Plant Line Value: WS
  misc_feature: MA Experiment 20000286 PARAMETER Experiment Name: At_Open_Flower_P Parameter: Tissue Value: Half Open vs. Whole Plant
  misc_feature: MA Experiment ID: 20001451 Result: Down-regulated in Transcription
  misc_feature: MA Experiment 20001451 PARAMETER Experiment Name: At_Far-red-induction_P Parameter: Age (day) Value: 7
  misc_feature: MA Experiment 20001451 PARAMETER Experiment Name: At_Far-red-induction_P Parameter: Light Value: Far-red vs. White
  misc_feature: MA Experiment 20001451 PARAMETER Experiment Name: At_Far-red-induction_P Parameter: Organism Value: A. thaliana
  misc_feature: MA Experiment 20001451 PARAMETER Experiment Name: At_Far-red-induction_P Parameter: Plant Line Value: Columbia
  misc_feature: MA Experiment 20001451 PARAMETER Experiment Name: At_Far-red-induction_P Parameter: Timepoint (hr) Value: 24
  misc_feature: MA Experiment 20001451 PARAMETER Experiment Name: At_Far-red-induction_P Parameter: Tissue Value: Whole Plant
atgccgaggccaggaccaagaccttacgagtgtgtgaaacgagcttggcatagcgatcgtcatcaacctattcgtggttcgattattcgccagattttcagactcgcaatggaagcacatagcgcagcgacgaggaagaacaaagaatggcaggagaaattgcctgtggttgtgttaaaagctgaagaaatcatgtactctaaagccaattccgaggaagagtatacagatgctgatactatgtggaatagagtaaatgatgccattgatacaattattagaagagatgagagtacagaaactggtcctcttttgcctccatgtgttgaagctgctcttaatttgggatgtattgctgtaagagcttcaagaagccaacgacatagtagcggaaggacttacctcggtcctaaaattcaggaaccggtttctgcgtcgactaatgagccgtcttaccatcatgaatatcgtcagcaagctcaacaatcatcaaccaaaccaagccagacagttcaagctgcagtccctgttgatgtacttgataacagcaacaagcgtgtagctactcctcgcggttacccgtttcttcatgaatccatgcagatgcatcaaaagccattggcaattagacaaggaactggtcctgcttctgctcctgctccagctccagtcaacttgggttcggtctatcctttgtattacgaaggtaataatcaaacgcagcaagctgacatgtcttttagagtccctgaagcgcccataatcattggcatgcctattggtataaagccctcagaagaagcaactgagagggtctgtgatttatccttgaggctcggtatatcttcagaaccgtctacaagaatagatgtcgggtctagtcgggcttacccgggaagaaaccaagaagagttatgtttattcgcagaggtaaagaagaatgataggtttgaatggttttcaaatagtgaaggtcagaattcagattcgagagttaaaaagcacagaactttgtgtggagacttcctttag

SEQ ID NO: 96999 - protein, 343 aa, Arabidopsis thaliana
  peptide (1)..(343): Ceres Seq. ID no. 12735650
  misc_feature (1)..(343): Homolog of NCBI NO: 15230072 NR Description: hypothetical protein; protein id: At3g24150.1
  misc_feature (35)..(324): Homolog of NCBI NO: 11994234 NR Description: gene_id:MUJ8.5~unknown protein [Arabidopsis
  misc_feature (1)..(135): Homolog of NCBI NO: 22329083 NR Description: unknown protein; protein id: At4g32295.1 thaliana] >gi|28392894|gb|AAO41883.1| unknown protein thaliana] >gi|28827750|gb|AAO50719.1| unknown protein
MPRPGPRPYECVKRAWHSDRHQPIRGSIIRQIFRLAMEAHSAATRKNKEWQEKLPVVVLKAEEIMYSKANSEEEYTDADTMWNRVNDAIDTIIRRDESTETGPLLPPCVEAALNLGCIAVRASRSQRHSSGRTYLGPKIQEPVSASTNEPSYHHEYRQQAQQSSTKPSQTVQAAVPVDVLDNSNKRVATPRGYPFLHESMQMHQKPLAIRQGTGPASAPAPAPVNLGSVYPLYYEGNNQTQQADMSFRVPEAPIIIGMPIGIKPSEEATERVCDLSLRLGISSEPSTRIDVGSSRAYPGRNQEELCLFAEVKKNDRFEWFSNSEGQNSDSRVKKHRTLCGDFL

SEQ ID NO: 97000 - protein, 307 aa, Arabidopsis thaliana
  peptide (1)..(307): Ceres Seq. ID no. 12735651
  misc_feature (1)..(307): Homolog of NCBI NO: 15230072 NR Description: hypothetical protein; protein id: At3g24150.1
  misc_feature (1)..(288): Homolog of NCBI NO: 11994234 NR Description: gene_id:MUJ8.5~unknown protein [Arabidopsis
  misc_feature (1)..(99): Homolog of NCBI NO: 22329083 NR Description: unknown protein; protein id: At4g32295.1 thaliana] >gi|28392894|gb|AAO41883.1| unknown protein thaliana] >gi|28827750|gb|AAO50719.1| unknown protein
MEAHSAATRKNKEWQEKLPVVVLKAEEIMYSKANSEEEYTDADTMWNRVNDAIDTIIRRDESTETGPLLPPCVEAALNLGCIAVRASRSQRHSSGRTYLGPKIQEPVSASTNEPSYHHEYRQQAQQSSTKPSQTVQAAVPVDVLDNSNKRVATPRGYPFLHESMQMHQKPLAIRQGTGPASAPAPAPVNLGSVYPLYYEGNNQTQQADMSFRVPEAPIIIGMPIGIKPSEEATERVCDLSLRLGISSEPSTRIDVGSSRAYPGRNQEELCLFAEVKKNDRFEWFSNSEGQNSDSRVKKHRTLCGDFL

SEQ ID NO: 97001 - protein, 279 aa, Arabidopsis thaliana
  peptide (1)..(279): Ceres Seq. ID no. 12735652
  misc_feature (1)..(279): Homolog of NCBI NO: 15230072 NR Description: hypothetical protein; protein id: At3g24150.1
  misc_feature (1)..(260): Homolog of NCBI NO: 11994234 NR Description: gene_id:MUJ8.5~unknown protein [Arabidopsis
  misc_feature (1)..(71): Homolog of NCBI NO: 22329083 NR Description: unknown protein; protein id: At4g32295.1 thaliana] >gi|28392894|gb|AAO41883.1| unknown protein thaliana] >gi|28827750|gb|AAO50719.1| unknown protein
MYSKANSEEEYTDADTMWNRVNDAIDTIIRRDESTETGPLLPPCVEAALNLGCIAVRASRSQRHSSGRTYLGPKIQEPVSASTNEPSYHHEYRQQAQQSSTKPSQTVQAAVPVDVLDNSNKRVATPRGYPFLHESMQMHQKPLAIRQGTGPASAPAPAPVNLGSVYPLYYEGNNQTQQADMSFRVPEAPIIIGMPIGIKPSEEATERVCDLSLRLGISSEPSTRIDVGSSRAYPGRNQEELCLFAEVKKNDRFEWFSNSEGQNSDSRVKKHRTLCGDFL

SEQ ID NO: 97002 - DNA, 1530 bp, Arabidopsis thaliana
  misc_feature (1)..(1530): Ceres Seq. ID no. 12735657
  misc_feature: MA Experiment ID: 20001451 Result: Down-regulated in Transcription
  misc_feature: MA Experiment 20001451 PARAMETER Experiment Name: At_Far-red-induction_P Parameter: Age (day) Value: 7
  misc_feature: MA Experiment 20001451 PARAMETER Experiment Name: At_Far-red-induction_P Parameter: Light Value: Far-red vs. White
  misc_feature: MA Experiment 20001451 PARAMETER Experiment Name: At_Far-red-induction_P Parameter: Organism Value: A. thaliana
  misc_feature: MA Experiment 20001451 PARAMETER Experiment Name: At_Far-red-induction_P Parameter: Plant Line Value: Columbia
  misc_feature: MA Experiment 20001451 PARAMETER Experiment Name: At_Far-red-induction_P Parameter: Timepoint (hr) Value: 24
  misc_feature: MA Experiment 20001451 PARAMETER Experiment Name: At_Far-red-induction_P Parameter: Tissue Value: Whole Plant
atgtctaaggacagggtgctcgcaaggaatcttaggacaagtgtctgtggaacaaggattttgcagaggacttgttcgactgttgtgacacatgatgtttctacttcttgttccaatgagagcaatgcattaaataattccactgacgatggtccacaacatgacattgctattgttggtggtggaatggttggaatcgctttagctgcttcattggccagcaagccattgacaaagcacttgaatgtcgctattattgacaataatcctcttttggggagaagaaatatcatagagaaagggcatcaacctgatcccagagtcagtacagtcacacctgcaacaatatccttcctcaaagatattggtgcctggaaatacattgagcaacagcgacatgcgtattttgataagatgcaggccttggatatacaagatacaatgctaatgatgtacatcaagatgttttggggtaagcatattgctatatacatctgcatccttgatgatgttaatagctgtgtactcattgttgacatgatccaggaatcagatctccagaagactgtttatcccgcgaggttaaatgcgatggatatgctacctagctcttcgttgacaggtcttggtgaagtaccatccacaacagacttgttcatgcgaggacgccttgctaagctggagctaagcgatggaaatcgcgtctacgcaaaactggtggtaggcgctgatgggtctaagtcgcgagtaagggagttggctgggatcaaaacgactggatggaactactcacagaacgctataatttgtactgttgagcatacagccgaaaactacacagcatggcaacggtttttacccaatggcccaatcgcacttcttcccattggtgacaagtttagcaacatagtatggaccatggacccaaaagaggcatcagatcgaaaattgatgaacgaggatgacttcatcaaagctgtaaatgatgctctggattctggatatggtcctaatccagagactacaagttcacgggatagtctctcttggcttacaggagatgcgaccatatctgccaaagagaggtttgaaactcctcccaaggttgtgaagctttcttcagagagaatgatgttccctttgtctttaaggcacgcaaaagactatgtgtcaaaacgtgtggctcttgttggtgactcagctcatacagttcacccgttggctggtcaaggagtaaatctaggatttgcagatgcgtgtgctctctccaaagctatagcagagggcattgctcttggtactgatataggcgaggcgaatctgctcaaacgttatgaagcagagagaaaacctgcaaatatagcaatgatggcggttttagacggaatccagaagatgtactcgttggatttcggaccgctgaatgctctaagagcagctgcattccacggggctcactacatttcgccgcttaaaaagcgtatcatatcttatgcttcaggagagcaatctttgccgctattttcttga

SEQ ID NO: 97003 - protein, 509 aa, Arabidopsis thaliana
  peptide (1)..(509): Ceres Seq. ID no. 12735658
  misc_feature (236)..(461): Pfam Name: Monooxygenase Pfam Description: Monooxygenase
  misc_feature (1)..(509): Homolog of NCBI NO: 30687388 NR Description: monooxygenase family [Arabidopsis thaliana]
  misc_feature (28)..(509): Homolog of NCBI NO: 11994239 NR Description: gb|AAD27719.1~gene_id:MUJ8.10~similar to unknown
  misc_feature (55)..(509): Homolog of NCBI NO: 28376703 NR Description: putative oxygenase [Oryza sativa (japonica
  misc_feature (54)..(500): Homolog of NCBI NO: 32967305 NR Description: CGI-10 protein isoform a; CGI-10 protein [Homo >gi|26006952|sp|Q9Y2Z9|COQ6_HUMAN Ubiquinone biosynthesis
  misc_feature (54)..(500): Homolog of NCBI NO: 15680256 NR Description: Unknown (protein for MGC:23201) [Homo sapiens]
  misc_feature (54)..(500): Homolog of NCBI NO: 18848355 NR Description: Similar to CGI-10 protein [Mus musculus]
  misc_feature (54)..(500): Homolog of NCBI NO: 26006706 NR Description: Ubiquinone biosynthesis monooxgenase COQ6
  misc_feature (54)..(500): Homolog of NCBI NO: 30047245 NR Description: Coq6 protein [Mus musculus]
  misc_feature (54)..(500): Homolog of NCBI NO: 27369832 NR Description: RIKEN cDNA 5930427M12 [Mus musculus]
  misc_feature (54)..(501): Homolog of NCBI NO: 32422583 NR Description: hypothetical protein [Neurospora crassa]
MSKDRVLARNLRTSVCGTRILQRTCSTVVTHDVSTSCSNESNALNNSTDDGPQHDIAIVGGGMVGIALAASLASKPLTKHLNVAIIDNNPLLGRRNIIEKGHQPDPRVSTVTPATISFLKDIGAWKYIEQQRHAYFDKMQALDIQDTMLMMYIKMFWGKHIAIYICILDDVNSCVLIVDMIQESDLQKTVYPARLNAMDMLPSSSLTGLGEVPSTTDLFMRGRLAKLELSDGNRVYAKLVVGADGSKSRVRELAGIKTTGWNYSQNAIICTVEHTAENYTAWQRFLPNGPIALLPIGDKFSNIVWTMDPKEASDRKLMNEDDFIKAVNDALDSGYGPNPETTSSRDSLSWLTGDATISAKERFETPPKVVKLSSERMMFPLSLRHAKDYVSKRVALVGDSAHTVHPLAGQGVNLGFADACALSKAIAEGIALGTDIGEANLLKRYEAERKPANIAMMAVLDGIQKMYSLDFGPLNALRAAAFHGAHYISPLKKRIISYASGEQSLPLFS

SEQ ID NO: 97004 - protein, 447 aa, Arabidopsis thaliana
  peptide (1)..(447): Ceres Seq. ID no. 12735659
  misc_feature (174)..(399): Pfam Name: Monooxygenase Pfam Description: Monooxygenase
  misc_feature (1)..(447): Homolog of NCBI NO: 30687388 NR Description: monooxygenase family [Arabidopsis thaliana]
  misc_feature (1)..(447): Homolog of NCBI NO: 11994239 NR Description: gb|AAD27719.1~gene_id:MUJ8.10~similar to unknown
  misc_feature (1)..(447): Homolog of NCBI NO: 28376703 NR Description: putative oxygenase [Oryza sativa (japonica
  misc_feature (1)..(438): Homolog of NCBI NO: 32967305 NR Description: CGI-10 protein isoform a; CGI-10 protein [Homo >gi|26006952|sp|Q9Y2Z9|COQ6_HUMAN Ubiquinone biosynthesis
  misc_feature (1)..(438): Homolog of NCBI NO: 15680256 NR Description: Unknown (protein for MGC:23201) [Homo sapiens]
  misc_feature (1)..(438): Homolog of NCBI NO: 26006706 NR Description: Ubiquinone biosynthesis monooxgenase COQ6
  misc_feature (1)..(438): Homolog of NCBI NO: 18848355 NR Description: Similar to CGI-10 protein [Mus musculus]
  misc_feature (1)..(438): Homolog of NCBI NO: 30047245 NR Description: Coq6 protein [Mus musculus]
  misc_feature (1)..(438): Homolog of NCBI NO: 27369832 NR Description: RIKEN cDNA 5930427M12 [Mus musculus]
  misc_feature (1)..(439): Homolog of NCBI NO: 32422583 NR Description: hypothetical protein [Neurospora crassa]
MVGIALAASLASKPLTKHLNVAIIDNNPLLGRRNIIEKGHQPDPRVSTVTPATISFLKDIGAWKYIEQQRHAYFDKMQALDIQDTMLMMYIKMFWGKHIAIYICILDDVNSCVLIVDMIQESDLQKTVYPARLNAMDMLPSSSLTGLGEVPSTTDLFMRGRLAKLELSDGNRVYAKLVVGADGSKSRVRELAGIKTTGWNYSQNAIICTVEHTAENYTAWQRFLPNGPIALLPIGDKFSNIVWTMDPKEASDRKLMNEDDFIKAVNDALDSGYGPNPETTSSRDSLSWLTGDATISAKERFETPPKVVKLSSERMMFPLSLRHAKDYVSKRVALVGDSAHTVHPLAGQGVNLGFADACALSKAIAEGIALGTDIGEANLLKRYEAERKPANIAMMAVLDGIQKMYSLDFGPLNALRAAAFHGAHYISPLKKRIISYASGEQSLPLFS

SEQ ID NO: 97005 - protein, 371 aa, Arabidopsis thaliana
  peptide (1)..(371): Ceres Seq. ID no. 12735660
  misc_feature (98)..(323): Pfam Name: Monooxygenase Pfam Description: Monooxygenase
  misc_feature (1)..(371): Homolog of NCBI NO: 30687388 NR Description: monooxygenase family [Arabidopsis thaliana]
  misc_feature (1)..(371): Homolog of NCBI NO: 11994239 NR Description: gb|AAD27719.1~gene_id:MUJ8.10~similar to unknown
  misc_feature (1)..(371): Homolog of NCBI NO: 28376703 NR Description: putative oxygenase [Oryza sativa (japonica
  misc_feature (1)..(362): Homolog of NCBI NO: 32967305 NR Description: CGI-10 protein isoform a; CGI-10 protein [Homo >gi|26006952|sp|Q9Y2Z9|COQ6_HUMAN Ubiquinone biosynthesis
  misc_feature (1)..(362): Homolog of NCBI NO: 15680256 NR Description: Unknown (protein for MGC:23201) [Homo sapiens]
  misc_feature (1)..(362): Homolog of NCBI NO: 18848355 NR Description: Similar to CGI-10 protein [Mus musculus]
  misc_feature (1)..(362): Homolog of NCBI NO: 26006706 NR Description: Ubiquinone biosynthesis monooxgenase COQ6
  misc_feature (1)..(362): Homolog of NCBI NO: 30047245 NR Description: Coq6 protein [Mus musculus]
  misc_feature (1)..(362): Homolog of NCBI NO: 27369832 NR Description: RIKEN cDNA 5930427M12 [Mus musculus]
  misc_feature (1)..(363): Homolog of NCBI NO: 32422583 NR Description: hypothetical protein [Neurospora crassa]
MQALDIQDTMLMMYIKMFWGKHIAIYICILDDVNSCVLIVDMIQESDLQKTVYPARLNAMDMLPSSSLTGLGEVPSTTDLFMRGRLAKLELSDGNRVYAKLVVGADGSKSRVRELAGIKTTGWNYSQNAIICTVEHTAENYTAWQRFLPNGPIALLPIGDKFSNIVWTMDPKEASDRKLMNEDDFIKAVNDALDSGYGPNPETTSSRDSLSWLTGDATISAKERFETPPKVVKLSSERMMFPLSLRHAKDYVSKRVALVGDSAHTVHPLAGQGVNLGFADACALSKAIAEGIALGTDIGEANLLKRYEAERKPANIAMMAVLDGIQKMYSLDFGPLNALRAAAFHGAHYISPLKKRIISYASGEQSLPLFS

SEQ ID NO: 97006 - DNA, 1134 bp, Arabidopsis thaliana
  misc_feature (1)..(1134): Ceres Seq. ID no. 12735701
  misc_feature: MA Experiment ID: 20000184 Result: Down-regulated in Transcription
  misc_feature: MA Experiment 20000184 PARAMETER Experiment Name: At_Shoots__P Parameter: Age (day) Value: 7
  misc_feature: MA Experiment 20000184 PARAMETER Experiment Name: At_Shoots__P Parameter: Tissue Value: Shoots vs. Whole Plant
  misc_feature: MA Experiment ID: 20000227 Result: Up-regulated in Transcription
  misc_feature: MA Experiment 20000227 PARAMETER Experiment Name: At_Root-Tips-vs-Tops_P Parameter: Tissue Value: Root Tips vs. Root Tops
  misc_feature: MA Experiment ID: 20001451 Result: Down-regulated in Transcription
  misc_feature: MA Experiment 20001451 PARAMETER Experiment Name: At_Far-red-induction_P Parameter: Age (day) Value: 7
  misc_feature: MA Experiment 20001451 PARAMETER Experiment Name: At_Far-red-induction_P Parameter: Light Value: Far-red vs. White
  misc_feature: MA Experiment 20001451 PARAMETER Experiment Name: At_Far-red-induction_P Parameter: Organism Value: A. thaliana
  misc_feature: MA Experiment 20001451 PARAMETER Experiment Name: At_Far-red-induction_P Parameter: Plant Line Value: Columbia
  misc_feature: MA Experiment 20001451 PARAMETER Experiment Name: At_Far-red-induction_P Parameter: Timepoint (hr) Value: 24
  misc_feature: MA Experiment 20001451 PARAMETER Experiment Name: At_Far-red-induction_P Parameter: Tissue Value: Whole Plant
atgtcggcaaggcatgggcaatcgtcgtatcgagatcggagtgacgaattcttcaaaattgtggagactctaaggagatcgattgctccggctccggcggcgaataatgtgccgtatggtaataatcggaacgatggtgcgagaagagaggatcttatcaacaaatccgagttcaacaagagagcttctcatattggtttagctattaatcaaacgtcgcagaagctatcgaagcttgcgaaacgaattagaatggtgcttagatcgagaaccgatttatttagtggtgtgaatttctcaagtgcttatcttagtactcgagaatgtgtaattgttgcaaagaggacatcagtgtttgatgatcctactcaggagatacaagagctgacggtagtcatcaagcaagagatctctgctctaaattctgctctggtcgaccttcaattgttccgcagttctcagaatgatgaagggaataactctagagacagggacaaaagtactcactcagcaactgttgttgacgatctaaagtatcgtttgatggatactaccaaagagtttaaggatgttcttaccatgagaaccgagaatatgaaggtccatgaaagtagaaggcaactcttctcttcaaatgcttcaaaagaatcaacaaacccattcgttcgccagcgtcctttggctgctaaggctgctgctagtgaatctgttcctcttccatgggcaaatgggtcttcttcatcttcatctcagttagtcccatggaagccgggagagggagaatcttcaccattgttgcagcagagtcaacaacaacagcaacagcaacagcaacaaatggtcccattgcaagacacatatatgcagggtcgagcagaagctctacacaccgttgaatcaacaatccatgagctaagcagtatcttcacacaactagcaaccatggtttctcaacaaggggaaattgcaatcaggatcgatcaaaacatggaagatacattagcaaatgtggaaggcgcacagagccaactggccaggtatctcaacagtatatcatcaaaccgatggctaatgatgaagattttcttcgtactcattgcatttctcatgattttcctcttcttcgtggcataa

SEQ ID NO: 97007 - protein, 377 aa, Arabidopsis thaliana
  peptide (1)..(377): Ceres Seq. ID no. 12735702
  misc_feature (290)..(352): Pfam Name: SNARE domain Pfam Description: SNARE domain
  misc_feature (97)..(377): Homolog of NCBI NO: 30687459 NR Description: syntaxin of plants SYP32 [Arabidopsis thaliana]
  misc_feature (112)..(377): Homolog of NCBI NO: 34906154 NR Description: putative t-SNARE SED5 [Oryza sativa (japonica
  misc_feature (4)..(94): Homolog of NCBI NO: 34906154 NR Description: putative t-SNARE SED5 [Oryza sativa (japonica
  misc_feature (112)..(377): Homolog of NCBI NO: 2981439 NR Description: syntaxin of plants 31 [Arabidopsis thaliana]
  misc_feature (112)..(377): Homolog of NCBI NO: 15239228 NR Description: syntaxin SYP31; protein id: At5g05760.1, by cDNA: gi_15809833, supported by cDNA: gi_17978872, supported cDNA: gi_2981438 [Arabidopsis thaliana]
  misc_feature (8)..(91): Homolog of NCBI NO: 2981439 NR Description: syntaxin of plants 31 [Arabidopsis thaliana]
  misc_feature (8)..(91): Homolog of NCBI NO: 15239228 NR Description: syntaxin SYP31; protein id: At5g05760.1, by cDNA: gi_15809833, supported by cDNA: gi_17978872, supported cDNA: gi_2981438 [Arabidopsis thaliana]
  misc_feature (81)..(373): Homolog of NCBI NO: 40747582 NR Description: hypothetical protein AN9526.2 [Aspergillus
  misc_feature (88)..(373): Homolog of NCBI NO: 32490453 NR Description: syntaxin homologue [Aspergillus oryzae]
  misc_feature (1)..(252): Homolog of NCBI NO: 30687459 NR Description: syntaxin of plants SYP32 [Arabidopsis thaliana]
MSARHGQSSYRDRSDEFFKIVETLRRSIAPAPAANNVPYGNNRNDGARREDLINKSEFNKRASHIGLAINQTSQKLSKLAKRIRMVLRSRTDLFSGVNFSSAYLSTRECVIVAKRTSVFDDPTQEIQELTVVIKQEISALNSALVDLQLFRSSQNDEGNNSRDRDKSTHSATVVDDLKYRLMDTTKEFKDVLTMRTENMKVHESRRQLFSSNASKESTNPFVRQRPLAAKAAASESVPLPWANGSSSSSSQLVPWKPGEGESSPLLQQSQQQQQQQQQQMVPLQDTYMQGRAEALHTVESTIHELSSIFTQLATMVSQQGEIAIRIDQNMEDTLANVEGAQSQLARYLNSISSNRWLMMKIFFVLIAFLMIFLFFVA

SEQ ID NO: 97008 - protein, 293 aa, Arabidopsis thaliana
  peptide (1)..(293): Ceres Seq. ID no. 12735703
  misc_feature (206)..(268): Pfam Name: SNARE domain Pfam Description: SNARE domain
  misc_feature (13)..(293): Homolog of NCBI NO: 30687459 NR Description: syntaxin of plants SYP32 [Arabidopsis thaliana]
  misc_feature (28)..(293): Homolog of NCBI NO: 34906154 NR Description: putative t-SNARE SED5 [Oryza sativa (japonica
  misc_feature (28)..(293): Homolog of NCBI NO: 2981439 NR Description: syntaxin of plants 31 [Arabidopsis thaliana]
  misc_feature (28)..(293): Homolog of NCBI NO: 15239228 NR Description: syntaxin SYP31; protein id: At5g05760.1, by cDNA: gi_15809833, supported by cDNA: gi_17978872, supported cDNA: gi_2981438 [Arabidopsis thaliana]
  misc_feature (1)..(289): Homolog of NCBI NO: 40747582 NR Description: hypothetical protein AN9526.2 [Aspergillus
  misc_feature (4)..(289): Homolog of NCBI NO: 32490453 NR Description: syntaxin homologue [Aspergillus oryzae]
  misc_feature (1)..(168): Homolog of NCBI NO: 30687459 NR Description: syntaxin of plants SYP32 [Arabidopsis thaliana]
  misc_feature (28)..(293): Homolog of NCBI NO: 20148780 NR Description: syntaxin 5 [Phytophthora sojae]
  misc_feature (10)..(293): Homolog of NCBI NO: 28829569 NR Description: similar to syntaxin 5 [Schizosaccharomyces pombe]
  misc_feature (16)..(289): Homolog of NCBI NO: 6323054 NR Description: Sed5p is a t-SNARE (soluble NSF attachment receptor) required in ER to Golgi transport.; Sed5p
MVLRSRTDLFSGVNFSSAYLSTRECVIVAKRTSVFDDPTQEIQELTVVIKQEISALNSALVDLQLFRSSQNDEGNNSRDRDKSTHSATVVDDLKYRLMDTTKEFKDVLTMRTENMKVHESRRQLFSSNASKESTNPFVRQRPLAAKAAASESVPLPWANGSSSSSSQLVPWKPGEGESSPLLQQSQQQQQQQQQQMVPLQDTYMQGRAEALHTVESTIHELSSIFTQLATMVSQQGEIAIRIDQNMEDTLANVEGAQSQLARYLNSISSNRWLMMKIFFVLIAFLMIFLFFVA

SEQ ID NO: 97009 - protein, 196 aa, Arabidopsis thaliana
  peptide (1)..(196): Ceres Seq. ID no. 12735704
  misc_feature (109)..(171): Pfam Name: SNARE domain Pfam Description: SNARE domain
  misc_feature (1)..(196): Homolog of NCBI NO: 30687459 NR Description: syntaxin of plants SYP32 [Arabidopsis thaliana]
  misc_feature (1)..(196): Homolog of NCBI NO: 34906154 NR Description: putative t-SNARE SED5 [Oryza sativa (japonica
  misc_feature (1)..(196): Homolog of NCBI NO: 2981439 NR Description: syntaxin of plants 31 [Arabidopsis thaliana]
  misc_feature (1)..(196): Homolog of NCBI NO: 15239228 NR Description: syntaxin SYP31; protein id: At5g05760.1, by cDNA: gi_15809833, supported by cDNA: gi_17978872, supported cDNA: gi_2981438 [Arabidopsis thaliana]
  misc_feature (1)..(192): Homolog of NCBI NO: 40747582 NR Description: hypothetical protein AN9526.2 [Aspergillus
  misc_feature (1)..(192): Homolog of NCBI NO: 32490453 NR Description: syntaxin homologue [Aspergillus oryzae]
  misc_feature (1)..(71): Homolog of NCBI NO: 30687459 NR Description: syntaxin of plants SYP32 [Arabidopsis thaliana]
  misc_feature (1)..(196): Homolog of NCBI NO: 20148780 NR Description: syntaxin 5 [Phytophthora sojae]
  misc_feature (1)..(196): Homolog of NCBI NO: 28829569 NR Description: similar to syntaxin 5 [Schizosaccharomyces pombe]
  misc_feature (1)..(192): Homolog of NCBI NO: 6323054 NR Description: Sed5p is a t-SNARE (soluble NSF attachment receptor) required in ER to Golgi transport.; Sed5p
MDTTKEFKDVLTMRTENMKVHESRRQLFSSNASKESTNPFVRQRPLAAKAAASESVPLPWANGSSSSSSQLVPWKPGEGESSPLLQQSQQQQQQQQQQMVPLQDTYMQGRAEALHTVESTIHELSSIFTQLATMVSQQGEIAIRIDQNMEDTLANVEGAQSQLARYLNSISSNRWLMMKIFFVLIAFLMIFLFFVA

SEQ ID NO: 97010 - DNA, 1485 bp, Arabidopsis thaliana
  misc_feature (1)..(1485): Ceres Seq. ID no. 12735713
  misc_feature: MA Experiment ID: 20001557 Result: Up-regulated in Transcription
  misc_feature: MA Experiment 20001557 PARAMETER Experiment Name: At_Drought_Soil_Dry_P Parameter: Age (day) Value: 27
  misc_feature: MA Experiment 20001557 PARAMETER Experiment Name: At_Drought_Soil_Dry_P Parameter: Organism Value: A. thaliana
  misc_feature: MA Experiment 20001557 PARAMETER Experiment Name: At_Drought_Soil_Dry_P Parameter: Plant Line Value: WS
  misc_feature: MA Experiment 20001557 PARAMETER Experiment Name: At_Drought_Soil_Dry_P Parameter: Post Timepoint (hr) Value: 3
  misc_feature: MA Experiment 20001557 PARAMETER Experiment Name: At_Drought_Soil_Dry_P Parameter: Post-Treatment Value: Re-Water vs. No Drought
  misc_feature: MA Experiment 20001557 PARAMETER Experiment Name: At_Drought_Soil_Dry_P Parameter: Timepoint (day) Value: 13
  misc_feature: MA Experiment 20001557 PARAMETER Experiment Name: At_Drought_Soil_Dry_P Parameter: Treatment Value: Drought vs. No Drought
  misc_feature: MA Experiment ID: 20001558 Result: Up-regulated in Transcription
  misc_feature: MA Experiment 20001558 PARAMETER Experiment Name: At_Drought_Soil_Dry_P Parameter: Age (day) Value: 27
  misc_feature: MA Experiment 20001558 PARAMETER Experiment Name: At_Drought_Soil_Dry_P Parameter: Organism Value: A. thaliana
  misc_feature: MA Experiment 20001558 PARAMETER Experiment Name: At_Drought_Soil_Dry_P Parameter: Plant Line Value: WS
  misc_feature: MA Experiment 20001558 PARAMETER Experiment Name: At_Drought_Soil_Dry_P Parameter: Post Timepoint (hr) Value: 6
  misc_feature: MA Experiment 20001558 PARAMETER Experiment Name: At_Drought_Soil_Dry_P Parameter: Post-Treatment Value: Re-Water vs. No Drought
  misc_feature: MA Experiment 20001558 PARAMETER Experiment Name: At_Drought_Soil_Dry_P Parameter: Timepoint (day) Value: 13
  misc_feature: MA Experiment 20001558 PARAMETER Experiment Name: At_Drought_Soil_Dry_P Parameter: Treatment Value: Drought vs. No Drought
atgaagaacaacaccactcaatctctccttctccttctcctcttcttcttcttcttctttgaaatctctcattctctctcaatctcatccaatgctcctctctccgacaccgaagtcagattcatccaacgccgtcaacttctctactaccgcgacgagttcggtgaccgtggtgagaatgtcacagtagatccatcactaatcttcgagaatccgcggcttcgtagtgcttacatagctcttcaagcttggaaacaagctattctctctgatcctaataatatcactgttaattggatcggatccaatgtctgtaactacaccggagttttctgttctaaagctcttgataaccggaagatccgtaccgtcgccggaatcgatctcaaccacgccgatatcgctgggtatttacctgaagagcttggtttgttaacagatctagctttgtttcatgttaattcgaatcgattctgtggtactgttcctcataagttcaagcagcttaagcttttgttcgagcttgatcttagtaacaatcggttcgccggaaagtttcccacggtggttcttcatttgccgtcgttgaagttcttagatctccggtttaatgagtttgaaggaaccgtaccgaaagagctttttagtaaaaatctagatgcgatttttataaaccataaccggttccggtttgagttaccggaaaatttcggtgattctccggtttcggttattgttcttgcgaataatcatttccatggttgtattccgacgagtttggtggagatgaagaatcttaatgagattattttcatgaacaatggtttgaattcttgtttaccggcggatatcggaaggttgaagaatgtgacggtgtttgatgttagttttaatgagcttgttggtccgttgccggagagtgttggtggtatggtggaggttgagcagttgaatgttgctcataatttgttatctgggaagattccggcgagtatttgtcagcttcctaagcttgagaatttcacttatagttataatttctttactggtgaagctcctgtgtgtttgaggttgtctgagtttgatgatcggagaaattgtttgcccggaagacctgctcagagatcttcacggcaatgttcagctttcttgtcacggccttcggtggattgtggatcttttggttgtggtcgttctgttgttaaaccgtctccacctattgtagcattaccgccgcctcctccgccatcgcctccgttacctccacctgtttactctcctccgccgtcacctcctgtcttctctcctccaccgtcaccccctgtatactctcctccaccgccaccatcaatccattacagttctcctcctccaccgccagtccatcacagttctcctccaccaccatcacctgaatttgaagggccattaccgccggtgatcggagtatcctatgcatctcccccaccaccacccttctattga

SEQ ID NO: 97011 - protein, 494 aa, Arabidopsis thaliana
  peptide (1)..(494): Ceres Seq. ID no. 12735714
  misc_feature (403)..(494): Pfam Name: Extensin-like region Pfam Description: Extensin-like region
  misc_feature (1)..(494): Homolog of NCBI NO: 15230120 NR Description: disease resistance protein, putative; protein id:
  misc_feature (12)..(492): Homolog of NCBI NO: 15235668 NR Description: extensin-like protein; protein id: At4g13340.1
  misc_feature (1)..(492): Homolog of NCBI NO: 15233976 NR Description: extensin-like protein; protein id: At4g18670.1
  misc_feature (55)..(494): Homolog of NCBI NO: 34906174 NR Description: putative extensin-like protein [Oryza sativa
  misc_feature (71)..(491): Homolog of NCBI NO: 15228861 NR Description: hypothetical protein; protein id: At3g22800.1
  misc_feature (3)..(494): Homolog of NCBI NO: 34912294 NR Description: putative extensin-like protein [Oryza sativa
  misc_feature (52)..(494): Homolog of NCBI NO: 7484956 NR Description: extensin homolog F24O1.18 - Arabidopsis thaliana T3P18.1 [Arabidopsis thaliana]
  misc_feature (52)..(494): Homolog of NCBI NO: 15220780 NR Description: hypothetical protein; protein id: At1g62440.1
  misc_feature (52)..(494): Homolog of NCBI NO: 15221178 NR Description: putative extensin; protein id: At1g12040.1, by cDNA: gi_13809917 [Arabidopsis thaliana]
  misc_feature (45)..(451): Homolog of NCBI NO: 15239465 NR Description: extensin - like protein; protein id: At5g25550.1
MKNNTTQSLLLLLLFFFFFFEISHSLSISSNAPLSDTEVRFIQRRQLLYYRDEFGDRGENVTVDPSLIFENPRLRSAYIALQAWKQAILSDPNNITVNWIGSNVCNYTGVFCSKALDNRKIRTVAGIDLNHADIAGYLPEELGLLTDLALFHVNSNRFCGTVPHKFKQLKLLFELDLSNNRFAGKFPTVVLHLPSLKFLDLRFNEFEGTVPKELFSKNLDAIFINHNRFRFELPENFGDSPVSVIVLANNHFHGCIPTSLVEMKNLNEIIFMNNGLNSCLPADIGRLKNVTVFDVSFNELVGPLPESVGGMVEVEQLNVAHNLLSGKIPASICQLPKLENFTYSYNFFTGEAPVCLRLSEFDDRRNCLPGRPAQRSSRQCSAFLSRPSVDCGSFGCGRSVVKPSPPIVALPPPPPPSPPLPPPVYSPPPSPPVFSPPPSPPVYSPPPPPSIHYSSPPPPPVHHSSPPPPSPEFEGPLPPVIGVSYASPPPPPFY

SEQ ID NO: 97012 - DNA, 1389 bp, Arabidopsis thaliana
  misc_feature (1)..(1389): Ceres Seq. ID no. 12735729
  misc_feature: MA Experiment ID: 20000166 Result: Up-regulated in Transcription
  misc_feature: MA Experiment 20000166 PARAMETER Experiment Name: At_100uM_ABA_P Parameter: Age (day) Value: 14
  misc_feature: MA Experiment 20000166 PARAMETER Experiment Name: At_100uM_ABA_P Parameter: Organism Value: A. thaliana
  misc_feature: MA Experiment 20000166 PARAMETER Experiment Name: At_100uM_ABA_P Parameter: Plant Line Value: WS
  misc_feature: MA Experiment 20000166 PARAMETER Experiment Name: At_100uM_ABA_P Parameter: Timepoint (hr) Value: 1
  misc_feature: MA Experiment 20000166 PARAMETER Experiment Name: At_100uM_ABA_P Parameter: Tissue Value: Aerial
  misc_feature: MA Experiment 20000166 PARAMETER Experiment Name: At_100uM_ABA_P Parameter: Treatment Value: 100uM ABA vs. No Treatment
  misc_feature: MA Experiment ID: 20000169 Result: Up-regulated in Transcription
  misc_feature: MA Experiment 20000169 PARAMETER Experiment Name: At_100uM_ABA_P Parameter: Age (day) Value: 14
  misc_feature: MA Experiment 20000169 PARAMETER Experiment Name: At_100uM_ABA_P Parameter: Organism Value: A. thaliana
  misc_feature: MA Experiment 20000169 PARAMETER Experiment Name: At_100uM_ABA_P Parameter: Plant Line Value: WS
  misc_feature: MA Experiment 20000169 PARAMETER Experiment Name: At_100uM_ABA_P Parameter: Timepoint (hr) Value: 6
  misc_feature: MA Experiment 20000169 PARAMETER Experiment Name: At_100uM_ABA_P Parameter: Tissue Value: Aerial
  misc_feature: MA Experiment 20000169 PARAMETER Experiment Name: At_100uM_ABA_P Parameter: Treatment Value: 100uM ABA vs. No Treatment
  misc_feature: MA Experiment ID: 20000182 Result: Up-regulated in Transcription
  misc_feature: MA Experiment 20000182 PARAMETER Experiment Name: At_2mM_SA_P Parameter: Age (day) Value: 14
  misc_feature: MA Experiment 20000182 PARAMETER Experiment Name: At_2mM_SA_P Parameter: Organism Value: A. thaliana
  misc_feature: MA Experiment 20000182 PARAMETER Experiment Name: At_2mM_SA_P Parameter: Plant Line Value: WS
  misc_feature: MA Experiment 20000182 PARAMETER Experiment Name: At_2mM_SA_P Parameter: Timepoint (hr) Value: 6
  misc_feature: MA Experiment 20000182 PARAMETER Experiment Name: At_2mM_SA_P Parameter: Tissue Value: Aerial
  misc_feature: MA Experiment 20000182 PARAMETER Experiment Name: At_2mM_SA_P Parameter: Treatment Value: 2mM SA vs. No Treatment
  misc_feature: MA Experiment ID: 20000184 Result: Down-regulated in Transcription
  misc_feature: MA Experiment 20000184 PARAMETER Experiment Name: At_Shoots__P Parameter: Age (day) Value: 7
  misc_feature: MA Experiment 20000184 PARAMETER Experiment Name: At_Shoots__P Parameter: Tissue Value: Shoots vs. Whole Plant
  misc_feature: MA Experiment ID: 20000234 Result: Down-regulated in Transcription
  misc_feature: MA Experiment 20000234 PARAMETER Experiment Name: At_Siliques_P Parameter: Age (day) Value: 21
  misc_feature: MA Experiment 20000234 PARAMETER Experiment Name: At_Siliques_P Parameter: Organism Value: A. thaliana
  misc_feature: MA Experiment 20000234 PARAMETER Experiment Name: At_Siliques_P Parameter: Plant Line Value: WS
  misc_feature: MA Experiment 20000234 PARAMETER Experiment Name: At_Siliques_P Parameter: Tissue Value: Less Than 5mm Siliques vs. Whole Plant
  misc_feature: MA Experiment ID: 20000235 Result: Down-regulated in Transcription
  misc_feature: MA Experiment 20000235 PARAMETER Experiment Name: At_Siliques_P Parameter: Age (day) Value: 21
  misc_feature: MA Experiment 20000235 PARAMETER Experiment Name: At_Siliques_P Parameter: Organism Value: A. thaliana
  misc_feature: MA Experiment 20000235 PARAMETER Experiment Name: At_Siliques_P Parameter: Plant Line Value: WS
  misc_feature: MA Experiment 20000235 PARAMETER Experiment Name: At_Siliques_P Parameter: Tissue Value: 5-10mm Siliques vs. Whole Plant
  misc_feature: MA Experiment ID: 20000264 Result: Down-regulated in Transcription
  misc_feature: MA Experiment 20000264 PARAMETER Experiment Name: At_Open_Flower_P Parameter: Age (day) Value: 21
  misc_feature: MA Experiment 20000264 PARAMETER Experiment Name: At_Open_Flower_P Parameter: Plant Line Value: WS
  misc_feature: MA Experiment 20000264 PARAMETER Experiment Name: At_Open_Flower_P Parameter: Tissue Value: Open Flower vs. Whole Plant
  misc_feature: MA Experiment ID: 20000265 Result: Down-regulated in Transcription
  misc_feature: MA Experiment 20000265 PARAMETER Experiment Name: At_Open_Flower_P Parameter: Age (day) Value: 21
  misc_feature: MA Experiment 20000265 PARAMETER Experiment Name: At_Open_Flower_P Parameter: Plant Line Value: WS
  misc_feature: MA Experiment 20000265 PARAMETER Experiment Name: At_Open_Flower_P Parameter: Tissue Value: Closed Flower vs. Whole Plant
  misc_feature: MA Experiment ID: 20000267 Result: Up-regulated in Transcription
  misc_feature: MA Experiment 20000267 PARAMETER Experiment Name: At_Drought_P Parameter: Age (day) Value: 7
  misc_feature: MA Experiment 20000267 PARAMETER Experiment Name: At_Drought_P Parameter: Organism Value: A. thaliana
  misc_feature: MA Experiment 20000267 PARAMETER Experiment Name: At_Drought_P Parameter: Plant Line Value: WS
  misc_feature: MA Experiment 20000267 PARAMETER Experiment Name: At_Drought_P Parameter: Timepoint (hr) Value: 6
  misc_feature: MA Experiment 20000267 PARAMETER Experiment Name: At_Drought_P Parameter: Tissue Value: Whole Plant
  misc_feature: MA Experiment 20000267 PARAMETER Experiment Name: At_Drought_P Parameter: Treatment Value: Drought vs. No Drought
  misc_feature: MA Experiment ID: 20000268 Result: Up-regulated in Transcription
  misc_feature: MA Experiment 20000268 PARAMETER Experiment Name: At_100mM_NaCl__P Parameter: Age (day) Value: 14
  misc_feature: MA Experiment 20000268 PARAMETER Experiment Name: At_100mM_NaCl__P Parameter: Organism Value: A. thaliana
  misc_feature: MA Experiment 20000268 PARAMETER Experiment Name: At_100mM_NaCl__P Parameter: Plant Line Value: WS
  misc_feature: MA Experiment 20000268 PARAMETER Experiment Name: At_100mM_NaCl__P Parameter: Timepoint (hr) Value: 6
  misc_feature: MA Experiment 20000268 PARAMETER Experiment Name: At_100mM_NaCl__P Parameter: Tissue Value: Whole Plant
  misc_feature: MA Experiment 20000268 PARAMETER Experiment Name: At_100mM_NaCl__P Parameter: Treatment Value: 100mM NaCl vs. No Treatment
  misc_feature: MA Experiment ID: 20000286 Result: Down-regulated in Transcription
  misc_feature: MA Experiment 20000286 PARAMETER Experiment Name: At_Open_Flower_P Parameter: Age (day) Value: 21
  misc_feature: MA Experiment 20000286 PARAMETER Experiment Name: At_Open_Flower_P Parameter: Plant Line Value: WS
  misc_feature: MA Experiment 20000286 PARAMETER Experiment Name: At_Open_Flower_P Parameter: Tissue Value: Half Open vs. Whole Plant
  misc_feature: MA Experiment ID: 20000436 Result: Up-regulated in Transcription
  misc_feature: MA Experiment 20000436 PARAMETER Experiment Name: At_Drought_P Parameter: Age (day) Value: 7
  misc_feature: MA Experiment 20000436 PARAMETER Experiment Name: At_Drought_P Parameter: Organism Value: A. thaliana
  misc_feature: MA Experiment 20000436 PARAMETER Experiment Name: At_Drought_P Parameter: Plant Line Value: WS
  misc_feature: MA Experiment 20000436 PARAMETER Experiment Name: At_Drought_P Parameter: Timepoint (hr) Value: 12
  misc_feature: MA Experiment 20000436 PARAMETER Experiment Name: At_Drought_P Parameter: Tissue Value: Whole Plant
  misc_feature: MA Experiment 20000436 PARAMETER Experiment Name: At_Drought_P Parameter: Treatment Value: Drought vs. No Drought
  misc_feature: MA Experiment ID: 20000439 Result: Up-regulated in Transcription
  misc_feature: MA Experiment 20000439 PARAMETER Experiment Name: At_Roots__P Parameter: Age (day) Value: 14 vs. 21
  misc_feature: MA Experiment 20000439 PARAMETER Experiment Name: At_Roots__P Parameter: Organism Value: A. thaliana
  misc_feature: MA Experiment 20000439 PARAMETER Experiment Name: At_Roots__P Parameter: Tissue Value: Roots vs. Whole Plant
  misc_feature: MA Experiment ID: 20000441 Result: Down-regulated in Transcription
  misc_feature: MA Experiment 20000441 PARAMETER Experiment Name: At_1uM_BR-BRZ__P Parameter: Tissue Value: Shoot Apices
  misc_feature: MA Experiment 20000441 PARAMETER Experiment Name: At_1uM_BR-BRZ__P Parameter: Treatment Value: 1uM BR vs. No Treatment
  misc_feature: MA Experiment ID: 20000443 Result: Down-regulated in Transcription
  misc_feature: MA Experiment 20000443 PARAMETER Experiment Name: At_1uM_BR-BRZ__P Parameter: Tissue Value: Shoot Apices
  misc_feature: MA Experiment 20000443 PARAMETER Experiment Name: At_1uM_BR-BRZ__P Parameter: Treatment Value: 1uM BRZ vs. No Treatment
  misc_feature: MA Experiment ID: 20000453 Result: Up-regulated in Transcription
  misc_feature: MA Experiment 20000453 PARAMETER Experiment Name: At_100uM_ABA_P Parameter: Age (day) Value: 15
  misc_feature: MA Experiment 20000453 PARAMETER Experiment Name: At_100uM_ABA_P Parameter: Organism Value: A. thaliana
  misc_feature: MA Experiment 20000453 PARAMETER Experiment Name: At_100uM_ABA_P Parameter: Plant Line Value: WS
  misc_feature: MA Experiment 20000453 PARAMETER Experiment Name: At_100uM_ABA_P Parameter: Timepoint (hr) Value: 24
  misc_feature: MA Experiment 20000453 PARAMETER Experiment Name: At_100uM_ABA_P Parameter: Tissue Value: Aerial
  misc_feature: MA Experiment 20000453 PARAMETER Experiment Name: At_100uM_ABA_P Parameter: Treatment Value: 100uM ABA vs. No Treatment
  misc_feature: MA Experiment ID: 20000455 Result: Up-regulated in Transcription
  misc_feature: MA Experiment 20000455 PARAMETER Experiment Name: At_100uM_ABA_P Parameter: Age (day) Value: 16
  misc_feature: MA Experiment 20000455 PARAMETER Experiment Name: At_100uM_ABA_P Parameter: Organism Value: A. thaliana
  misc_feature: MA Experiment 20000455 PARAMETER Experiment Name: At_100uM_ABA_P Parameter: Plant Line Value: WS
  misc_feature: MA Experiment 20000455 PARAMETER Experiment Name: At_100uM_ABA_P Parameter: Timepoint (hr) Value: 48
  misc_feature: MA Experiment 20000455 PARAMETER Experiment Name: At_100uM_ABA_P Parameter: Tissue Value: Aerial
  misc_feature: MA Experiment 20000455 PARAMETER Experiment Name: At_100uM_ABA_P Parameter: Treatment Value: 100uM ABA vs. No Treatment
  misc_feature: MA Experiment ID: 20000495 Result: Down-regulated in Transcription
  misc_feature: MA Experiment 20000495 PARAMETER Experiment Name: At_Guard_Cells_P Parameter: Harvest Date Value: 8/2/2002
  misc_feature: MA Experiment 20000495 PARAMETER Experiment Name: At_Guard_Cells_P Parameter: Organism Value: A. thaliana
  misc_feature: MA Experiment 20000495 PARAMETER Experiment Name: At_Guard_Cells_P Parameter: Tissue Value: Guard Cells vs. Leaves
  misc_feature: MA Experiment ID: 20000794 Result: Down-regulated in Transcription
  misc_feature: MA Experiment 20000794 PARAMETER Experiment Name: At_Petals_P Parameter: Age (day) Value: 23-25 days
  misc_feature: MA Experiment 20000794 PARAMETER Experiment Name: At_Petals_P Parameter: Plant Line Value: WS
  misc_feature: MA Experiment 20000794 PARAMETER Experiment Name: At_Petals_P Parameter: Tissue Value: Petals vs. Whole plant
  misc_feature: MA Experiment ID: 20001554 Result: Up-regulated in Transcription
  misc_feature: MA Experiment 20001554 PARAMETER Experiment Name: At_Drought_Soil_Dry_P Parameter: Age (day) Value: 21
  misc_feature: MA Experiment 20001554 PARAMETER Experiment Name: At_Drought_Soil_Dry_P Parameter: Organism Value: A. thaliana
  misc_feature: MA Experiment 20001554 PARAMETER Experiment Name: At_Drought_Soil_Dry_P Parameter: Plant Line Value: WS
  misc_feature: MA Experiment 20001554 PARAMETER Experiment Name: At_Drought_Soil_Dry_P Parameter: Post Timepoint (hr) Value: None
  misc_feature: MA Experiment 20001554 PARAMETER Experiment Name: At_Drought_Soil_Dry_P Parameter: Post-Treatment Value: None
  misc_feature: MA Experiment 20001554 PARAMETER Experiment Name: At_Drought_Soil_Dry_P Parameter: Timepoint (day) Value: 7
  misc_feature: MA Experiment 20001554 PARAMETER Experiment Name: At_Drought_Soil_Dry_P Parameter: Treatment Value: Drought vs. No Drought
  misc_feature: MA Experiment ID: 20001555 Result: Up-regulated in Transcription
  misc_feature: MA Experiment 20001555 PARAMETER Experiment Name: At_Drought_Soil_Dry_P Parameter: Age (day) Value: 24
  misc_feature: MA Experiment 20001555 PARAMETER Experiment Name: At_Drought_Soil_Dry_P Parameter: Organism Value: A. thaliana
  misc_feature: MA Experiment 20001555 PARAMETER Experiment Name: At_Drought_Soil_Dry_P Parameter: Plant Line Value: WS
  misc_feature: MA Experiment 20001555 PARAMETER Experiment Name: At_Drought_Soil_Dry_P Parameter: Post Timepoint (hr) Value: None
  misc_feature: MA Experiment 20001555 PARAMETER Experiment Name: At_Drought_Soil_Dry_P Parameter: Post-Treatment Value: None
  misc_feature: MA Experiment 20001555 PARAMETER Experiment Name: At_Drought_Soil_Dry_P Parameter: Timepoint (day) Value: 10
  misc_feature: MA Experiment 20001555 PARAMETER Experiment Name: At_Drought_Soil_Dry_P Parameter: Treatment Value: Drought vs. No Drought
  misc_feature: MA Experiment ID: 20001558 Result: Down-regulated in Transcription
  misc_feature: MA Experiment 20001558 PARAMETER Experiment Name: At_Drought_Soil_Dry_P Parameter: Age (day) Value: 27
  misc_feature: MA Experiment 20001558 PARAMETER Experiment Name: At_Drought_Soil_Dry_P Parameter: Organism Value: A. thaliana
  misc_feature: MA Experiment 20001558 PARAMETER Experiment Name: At_Drought_Soil_Dry_P Parameter: Plant Line Value: WS
  misc_feature: MA Experiment 20001558 PARAMETER Experiment Name: At_Drought_Soil_Dry_P Parameter: Post Timepoint (hr) Value: 6
  misc_feature: MA Experiment 20001558 PARAMETER Experiment Name: At_Drought_Soil_Dry_P Parameter: Post-Treatment Value: Re-Water vs. No Drought
  misc_feature: MA Experiment 20001558 PARAMETER Experiment Name: At_Drought_Soil_Dry_P Parameter: Timepoint (day) Value: 13
  misc_feature: MA Experiment 20001558 PARAMETER Experiment Name: At_Drought_Soil_Dry_P Parameter: Treatment Value: Drought vs. No Drought
  misc_feature: MA Experiment ID: 20001560 Result: Down-regulated in Transcription
  misc_feature: MA Experiment 20001560 PARAMETER Experiment Name: At_Drought_Soil_Dry_P Parameter: Age (day) Value: 28
  misc_feature: MA Experiment 20001560 PARAMETER Experiment Name: At_Drought_Soil_Dry_P Parameter: Organism Value: A. thaliana
  misc_feature: MA Experiment 20001560 PARAMETER Experiment Name: At_Drought_Soil_Dry_P Parameter: Plant Line Value: WS
  misc_feature: MA Experiment 20001560 PARAMETER Experiment Name: At_Drought_Soil_Dry_P Parameter: Post Timepoint (hr) Value: None
  misc_feature: MA Experiment 20001560 PARAMETER Experiment Name: At_Drought_Soil_Dry_P Parameter: Post-Treatment Value: None
  misc_feature: MA Experiment 20001560 PARAMETER Experiment Name: At_Drought_Soil_Dry_P Parameter: Timepoint (day) Value: 14
  misc_feature: MA Experiment 20001560 PARAMETER Experiment Name: At_Drought_Soil_Dry_P Parameter: Treatment Value: Drought vs. No Drought
  misc_feature: MA Experiment ID: 20001911 Result: Up-regulated in Transcription
  misc_feature: MA Experiment 20001911 PARAMETER Experiment Name: At_Drought_Reproduction_P Parameter: Age (day) Value: 40
  misc_feature: MA Experiment 20001911 PARAMETER Experiment Name: At_Drought_Reproduction_P Parameter: Organism Value: A. thaliana
  misc_feature: MA Experiment 20001911 PARAMETER Experiment Name: At_Drought_Reproduction_P Parameter: Plant Line Value: WS
  misc_feature: MA Experiment 20001911 PARAMETER Experiment Name: At_Drought_Reproduction_P Parameter: Timepoint (day) Value: 10
  misc_feature: MA Experiment 20001911 PARAMETER Experiment Name: At_Drought_Reproduction_P Parameter: Tissue Value: Flowers
  misc_feature: MA Experiment 20001911 PARAMETER Experiment Name: At_Drought_Reproduction_P Parameter: Treatment Value: Drought vs. No Drought
accaccaccaacaacaaacatataaaccataaggaaaacagagaaagagagagatggaggacgacaatagtaacaacaacaacaacaacaacgtgatcgcacctttcatcgtgaaaacatatcagatggtcaatgatccttccaccgattggctcatcacttggggacctgctcacaacagtttcatagtcgttgatccactcgacttctcgcaacgaatcttacctgcttatttcaaacacaacaatttcagcagttttgttcgtcaactcaacacctatgggtttaggaaagtggatccggaccggtgggagtttgcgaacgagcattttctaaggggacagaagcatttgttgaataacatagcgcgtaggaaacacgcgcgggggatgtacggtcaagatttggaggacggtgagattgtgagggagatcgaacggttaaaagaagagcagagggagctagaggcagagattcagaggatgaaccggaggatcgaagcgacggagaagagaccggagcagatgatggcgtttctttacaaagtcgttgaagatcctgatcttcttccaagaatgatgctcgagaaagaacggacaaagcaacaacaacaagtttccgacaagaagaagcgtcgtgtcacgatgtcgacggtgaagtcagaggaagaagaagtggaagaagatgaagggagggtctttagggttatgtcatcatcaacaccgtcgccgtcatcaacggagaatctttaccggaatcattcaccggatgggtggattgttcctatgacgcaaggacagtttggtagttacgagacgggtttggtggcgaagtcgatgctctcgaattcaacgtcgtcgacgtcatcatctttgacgtcgacgttttctttgccggagagtgttaacggaggaggaggaggaggatgtgggagtattcagggagaaagaaggtataaagaaacggcgacgtttggaggagtggtagagtcaaatccaccaacaacaccgccttatccattttctctgtttcgaggtggcttttagcgtttagcttcacatgatatatgatctttagactttattattgttatattattattattatttattttttgtgtgtttgttcttaattattttatgtataaccaaaagaaagaaagaaaataaggacagatccatagttgagtcagtagtcatcgtttgtagaaagttttgacagtatataatttctgattatatttgttaaaagttcatatgttgactttgttttccttttaaaagtactttcaggtgacttgtgtaatatattcacacttgtaataacaacaattttgatcttcttcactacttcagtgttttgatttttgaataaagtattattgtagcc

SEQ ID NO: 97013 - protein, 330 aa, Arabidopsis thaliana
  peptide (1)..(330): Ceres Seq. ID no. 12735730
  misc_feature (16)..(182): Pfam Name: HSF-type DNA-binding Pfam Description: HSF-type DNA-binding
  misc_feature (1)..(330): Homolog of NCBI NO: 15230127 NR Description: heat shock transcription factor HSF1, putative; id: At3g24520.1, supported by cDNA: gi_15810193, supported by gi_18252248 [Arabidopsis thaliana] >gi|9294046|dbj|BAB02003.1|
  misc_feature (123)..(316): Homolog of NCBI NO: 15228440 NR Description: putative heat shock transcription factor; protein At3g02990.1 [Arabidopsis thaliana] Heat shock factor protein 2 (HSF 2) (Heat shock transcription
  misc_feature (15)..(152): Homolog of NCBI NO: 15228440 NR Description: putative heat shock transcription factor; protein At3g02990.1 [Arabidopsis thaliana] Heat shock factor protein 2 (HSF 2) (Heat shock transcription
  misc_feature (15)..(200): Homolog of NCBI NO: 34910182 NR Description: putative heat shock transcription factor [Oryza
  misc_feature (123)..(316): Homolog of NCBI NO: 6624612 NR Description: heat shock factor 2 [Arabidopsis thaliana]
  misc_feature (15)..(152): Homolog of NCBI NO: 6624612 NR Description: heat shock factor 2 [Arabidopsis thaliana]
  misc_feature (16)..(115): Homolog of NCBI NO: 34912850 NR Description: putative heat shock factor protein 1 (HSF 1)
  misc_feature (119)..(188): Homolog of NCBI NO: 34912850 NR Description: putative heat shock factor protein 1 (HSF 1)
  misc_feature (17)..(108): Homolog of NCBI NO: 30017583 NR Description: putative heat shock factor [Oryza sativa
  misc_feature (123)..(195): Homolog of NCBI NO: 30017583 NR Description: putative heat shock factor [Oryza sativa
MEDDNSNNNNNNNVIAPFIVKTYQMVNDPSTDWLITWGPAHNSFIVVDPLDFSQRILPAYFKHNNFSSFVRQLNTYGFRKVDPDRWEFANEHFLRGQKHLLNNIARRKHARGMYGQDLEDGEIVREIERLKEEQRELEAEIQRMNRRIEATEKRPEQMMAFLYKVVEDPDLLPRMMLEKERTKQQQQVSDKKKRRVTMSTVKSEEEEVEEDEGRVFRVMSSSTPSPSSTENLYRNHSPDGWIVPMTQGQFGSYETGLVAKSMLSNSTSSTSSSLTSTFSLPESVNGGGGGGCGSIQGERRYKETATFGGVVESNPPTTPPYPFSLFRGGF

SEQ ID NO: 97014 - protein, 306 aa, Arabidopsis thaliana
  peptide (1)..(306): Ceres Seq. ID no. 12735731
  misc_feature (1)..(158): Pfam Name: HSF-type DNA-binding Pfam Description: HSF-type DNA-binding
  misc_feature (1)..(306): Homolog of NCBI NO: 15230127 NR Description: heat shock transcription factor HSF1, putative; id: At3g24520.1, supported by cDNA: gi_15810193, supported by gi_18252248 [Arabidopsis thaliana] >gi|9294046|dbj|BAB02003.1|
  misc_feature (99)..(292): Homolog of NCBI NO: 15228440 NR Description: putative heat shock transcription factor; protein At3g02990.1 [Arabidopsis thaliana] Heat shock factor protein 2 (HSF 2) (Heat shock transcription
  misc_feature (1)..(128): Homolog of NCBI NO: 15228440 NR Description: putative heat shock transcription factor; protein At3g02990.1 [Arabidopsis thaliana] Heat shock factor protein 2 (HSF 2) (Heat shock transcription
  misc_feature (1)..(176): Homolog of NCBI NO: 34910182 NR Description: putative heat shock transcription factor [Oryza
  misc_feature (99)..(292): Homolog of NCBI NO: 6624612 NR Description: heat shock factor 2 [Arabidopsis thaliana]
  misc_feature (1)..(128): Homolog of NCBI NO: 6624612 NR Description: heat shock factor 2 [Arabidopsis thaliana]
  misc_feature (1)..(91): Homolog of NCBI NO: 34912850 NR Description: putative heat shock factor protein 1 (HSF 1)
  misc_feature (95)..(164): Homolog of NCBI NO: 34912850 NR Description: putative heat shock factor protein 1 (HSF 1)
  misc_feature (1)..(84): Homolog of NCBI NO: 30017583 NR Description: putative heat shock factor [Oryza sativa
  misc_feature (99)..(171): Homolog of NCBI NO: 30017583 NR Description: putative heat shock factor [Oryza sativa
MVNDPSTDWLITWGPAHNSFIVVDPLDFSQRILPAYFKHNNFSSFVRQLNTYGFRKVDPDRWEFANEHFLRGQKHLLNNIARRKHARGMYGQDLEDGEIVREIERLKEEQRELEAEIQRMNRRIEATEKRPEQMMAFLYKVVEDPDLLPRMMLEKERTKQQQQVSDKKKRRVTMSTVKSEEEEVEEDEGRVFRVMSSSTPSPSSTENLYRNHSPDGWIVPMTQGQFGSYETGLVAKSMLSNSTSSTSSSLTSTFSLPESVNGGGGGGCGSIQGERRYKETATFGGVVESNPPTTPPYPFSLFRGGF

SEQ ID NO: 97015 - protein, 218 aa, Arabidopsis thaliana
  peptide (1)..(218): Ceres Seq. ID no. 12735732
  misc_feature (1)..(70): Pfam Name: HSF-type DNA-binding Pfam Description: HSF-type DNA-binding
  misc_feature (1)..(218): Homolog of NCBI NO: 15230127 NR Description: heat shock transcription factor HSF1, putative; id: At3g24520.1, supported by cDNA: gi_15810193, supported by gi_18252248 [Arabidopsis thaliana] >gi|9294046|dbj|BAB02003.1|
  misc_feature (11)..(204): Homolog of NCBI NO: 15228440 NR Description: putative heat shock transcription factor; protein At3g02990.1 [Arabidopsis thaliana] Heat shock factor protein 2 (HSF 2) (Heat shock transcription
  misc_feature (1)..(40): Homolog of NCBI NO: 15228440 NR Description: putative heat shock transcription factor; protein At3g02990.1 [Arabidopsis thaliana] Heat shock factor protein 2 (HSF 2) (Heat shock transcription
  misc_feature (1)..(88): Homolog of NCBI NO: 34910182 NR Description: putative heat shock transcription factor [Oryza
  misc_feature (11)..(204): Homolog of NCBI NO: 6624612 NR Description: heat shock factor 2 [Arabidopsis thaliana]
  misc_feature (1)..(40): Homolog of NCBI NO: 6624612 NR Description: heat shock factor 2 [Arabidopsis thaliana]
  misc_feature (7)..(76): Homolog of NCBI NO: 34912850 NR Description: putative heat shock factor protein 1 (HSF 1)
  misc_feature (11)..(83): Homolog of NCBI NO: 30017583 NR Description: putative heat shock factor [Oryza sativa
  misc_feature (1)..(167): Homolog of NCBI NO: 16580739 NR Description: heat stress transcription factor Spl7 [Oryza
  misc_feature (1)..(177): Homolog of NCBI NO: 729775 NR Description: HEAT SHOCK FACTOR PROTEIN HSF8 (HEAT SHOCK FACTOR 8) (HSTF 8) (HEAT STRESS TRANSCRIPTION FACTOR)
MYGQDLEDGEIVREIERLKEEQRELEAEIQRMNRRIEATEKRPEQMMAFLYKVVEDPDLLPRMMLEKERTKQQQQVSDKKKRRVTMSTVKSEEEEVEEDEGRVFRVMSSSTPSPSSTENLYRNHSPDGWIVPMTQGQFGSYETGLVAKSMLSNSTSSTSSSLTSTFSLPESVNGGGGGGCGSIQGERRYKETATFGGVVESNPPTTPPYPFSLFRGGF

SEQ ID NO: 97016 - DNA, 2329 bp, Arabidopsis thaliana
  misc_feature (1)..(2329): Ceres Seq. ID no. 12735735
  misc_feature: MA Experiment ID: 108434 Result: Down-regulated in Transcription
  misc_feature: MA Experiment 108434 PARAMETER Experiment Name: At_Root_Tips_cDNA_P Parameter: Tissue Value: Root Tips
  misc_feature: MA Experiment ID: 108488 Result: Down-regulated in Transcription
  misc_feature: MA Experiment ID: 20000495 Result: Down-regulated in Transcription
  misc_feature: MA Experiment 20000495 PARAMETER Experiment Name: At_Guard_Cells_P Parameter: Harvest Date Value: 8/2/2002
  misc_feature: MA Experiment 20000495 PARAMETER Experiment Name: At_Guard_Cells_P Parameter: Organism Value: A. thaliana
  misc_feature: MA Experiment 20000495 PARAMETER Experiment Name: At_Guard_Cells_P Parameter: Tissue Value: Guard Cells vs. Leaves
cagatcactcctcctctctcttctcctacctttttcacattctcttcttcttcttctcgtgagaaaaagaaagagagattctttattcattagatcgaagcaaaaatgtccacagcgccgtctccaggcactactccatcaccatctccaccgtctcctcccacaaactcgacaaccaccactcctcctccagcagcctcttctcctcctcccaccacaactccttcttctcctcctccgtcgccgtcaactaattcaacctctcctcctccttcttctcctttacctccttctcttcctcctccatctcctcctggatctttaactcctcctcttcctcaaccttccccctccgctcccatcactccttctccaccgtctcccaccacaccctcaaaccctcgaagccctccatctcctaaccaaggaccaccaaacactccctcaggatctactcctagaactccatcaaacactaaaccgtcgccgccgtctgattcttccgatggattgtctaccggagttgtggtaggaatcgccattggaggagtcgctattcttgttatactgactctgatttgtcttctctgtaagaagaaacgaagaagaagacacgacgatgaagctgcttactatgttcctcctcctcctccatctggtcccaaagctggaggaccttacggtggtcaacaacagtattggcaacaacaaaacgcgtcacggccgtcagataatcatgtagtgacgtcattgccaccacctaagcctccatctccaccacgaaaacctcctccgccacctccaccaccagcattcatgagtagcagtggtggttctgactattcggatcttccggttcttcctccaccatctccagggcttgtgttaggcttttctaaaagcactttcacttatgaggagttgtcgagagctactaatggcttctctgaggctaatttgttaggacaaggagggtttggttatgtgcataaaggtatattgcctagtgggaaagaagttgctgtgaaacagttgaaagctggtagtggtcagggagagagagagtttcaggctgaggttgagatcattagcagagttcatcacaggcatttggtttctcttattggttattgtatggccggtgttcaaagattacttgtctatgagtttgttccaaacaacaatcttgagtttcacctccatggtaagggacggcctacgatggaatggagtactagattgaagattgctcttggatctgctaaaggactttcatatcttcatgaagattgcaatccgaaaatcattcaccgtgatattaaggcgtcaaacatattgattgatttcaaatttgaagctaaggttgctgactttggtcttgccaagattgcttctgatacaaacactcatgtatctacacgcgtgatgggaacctttgggtatttggctccggaatatgctgcaagtggaaagctcacagaaaagtctgacgttttctcatttggcgttgtacttttggaacttattactgggaggcgccctgttgatgcgaacaatgtctatgtagatgacagcttagttgactgggcacgaccattgcttaaccgagcatctgaggaaggagattttgagggtttggctgattcaaagatgggtaatgagtatgacagagaggagatggctcgcatggttgcttgcgctgcggcttgtgttcgccattcagctcgccgcagacctcgcatgagccagatagtacgggcgttagaaggaaatgtatcgctgtctgatcttaacgaagggatgagaccgggtcacagcaacgtatacagctcatatggaggaagcacagactatgacacgagccaatacaacgacgacatgataaagtttaggaaaatggctcttggaactcaagaatacggcacaaccggcgagtacagtaatccaaccagtgactacggactgtacccgtctggttcaagcagtgaaggtcaagccacacgagaaatggagatgggaaagattaagaaaaccggtcaaggttatagtggaccctctctttaaaccataagagtggagaaattgcaggttttttttggattctttttcttattaactgtaaagatttgaggaaattgccttactctctaattgatttactacgatatatgatacgtttaaaattgttttgctttggtttcttctttagatgttgtgatgttgattgattctggtttgaatattattctttcattcttttttctatttttcttctgaagaatttgtttgttatgtcttttgagcttttggcctagtttggttaagttcc

SEQ ID NO: 97017 - protein, 652 aa, Arabidopsis thaliana; identical to SEQ ID NO: 30482
  peptide (1)..(652): Ceres Seq. ID no. 12735736
  misc_feature (280)..(479): Pfam Name: Protein kinase domain Pfam Description: Protein kinase domain
  misc_feature (1)..(652): Homolog of NCBI NO: 13447449 NR Description: receptor protein kinase PERK1 [Brassica napus]
  misc_feature (218)..(647): Homolog of NCBI NO: 15230108 NR Description: protein kinase, putative; protein id: At3g24400.1
  misc_feature (3)..(221): Homolog of NCBI NO: 15230108 NR Description: protein kinase, putative; protein id: At3g24400.1
  misc_feature (1)..(132): Homolog of NCBI NO: 15230108 NR Description: protein kinase, putative; protein id: At3g24400.1
  misc_feature (4)..(137): Homolog of NCBI NO: 15230108 NR Description: protein kinase, putative; protein id: At3g24400.1
  misc_feature (5)..(133): Homolog of NCBI NO: 15230108 NR Description: protein kinase, putative; protein id: At3g24400.1
  misc_feature (5)..(129): Homolog of NCBI NO: 15230108 NR Description: protein kinase, putative; protein id: At3g24400.1
  misc_feature (17)..(133): Homolog of NCBI NO: 15230108 NR Description: protein kinase, putative; protein id: At3g24400.1
  misc_feature (5)..(147): Homolog of NCBI NO: 15230108 NR Description: protein kinase, putative; protein id: At3g24400.1
  misc_feature (179)..(259): Homolog of NCBI NO: 15230108 NR Description: protein kinase, putative; protein id: At3g24400.1

SEQ ID NO: 97018 - protein, 415 aa, Arabidopsis thaliana; identical to SEQ ID NO: 30483
  peptide (1)..(415): Ceres Seq. ID no. 12735737
  misc_feature (43)..(242): Pfam Name: Protein kinase domain Pfam Description: Protein kinase domain
  misc_feature (1)..(415): Homolog of NCBI NO: 13447449 NR Description: receptor protein kinase PERK1 [Brassica napus]
  misc_feature (1)..(410): Homolog of NCBI NO: 15230108 NR Description: protein kinase, putative; protein id: At3g24400.1
  misc_feature (1)..(22): Homolog of NCBI NO: 15230108 NR Description: protein kinase, putative; protein id: At3g24400.1
  misc_feature (1)..(22): Homolog of NCBI NO: 15230108 NR Description: protein kinase, putative; protein id: At3g24400.1
  misc_feature (1)..(410): Homolog of NCBI NO: 11994703 NR Description: somatic embryogenesis receptor kinase-like
  misc_feature (1)..(391): Homolog of NCBI NO: 15230209 NR Description: protein kinase, putative; protein id: At3g18810.1
  misc_feature (1)..(382): Homolog of NCBI NO: 15224182 NR Description: putative protein kinase; protein id: At2g18470.1
  misc_feature (1)..(391): Homolog of NCBI NO: 15222081 NR Description: hypothetical protein; protein id: At1g49270.1
  misc_feature (1)..(391): Homolog of NCBI NO: 9293906 NR Description: somatic embryogenesis receptor kinase-like
  misc_feature (1)..(408): Homolog of NCBI NO: 30690042 NR Description: serine threonine protein kinase -related thaliana] >gi|26452004|dbj|BAC43092.1| putative serine/threonine kinase [Arabidopsis thaliana] >gi|29029022|gb|AAO64890.1|

SEQ ID NO: 97019 - DNA, 450 bp, Arabidopsis thaliana
  misc_feature (1)..(450): Ceres Seq. ID no. 12735757
  misc_feature: MA Experiment ID: 20000182 Result: Down-regulated in Transcription
  misc_feature: MA Experiment 20000182 PARAMETER Experiment Name: At_2mM_SA_P Parameter: Age (day) Value: 14
  misc_feature: MA Experiment 20000182 PARAMETER Experiment Name: At_2mM_SA_P Parameter: Organism Value: A. thaliana
  misc_feature: MA Experiment 20000182 PARAMETER Experiment Name: At_2mM_SA_P Parameter: Plant Line Value: WS
  misc_feature: MA Experiment 20000182 PARAMETER Experiment Name: At_2mM_SA_P Parameter: Timepoint (hr) Value: 6
  misc_feature: MA Experiment 20000182 PARAMETER Experiment Name: At_2mM_SA_P Parameter: Tissue Value: Aerial
  misc_feature: MA Experiment 20000182 PARAMETER Experiment Name: At_2mM_SA_P Parameter: Treatment Value: 2mM SA vs. No Treatment
  misc_feature: MA Experiment ID: 20000495 Result: Down-regulated in Transcription
  misc_feature: MA Experiment 20000495 PARAMETER Experiment Name: At_Guard_Cells_P Parameter: Harvest Date Value: 8/2/2002
  misc_feature: MA Experiment 20000495 PARAMETER Experiment Name: At_Guard_Cells_P Parameter: Organism Value: A. thaliana
  misc_feature: MA Experiment 20000495 PARAMETER Experiment Name: At_Guard_Cells_P Parameter: Tissue Value: Guard Cells vs. Leaves
  misc_feature: MA Experiment ID: 20001248 Result: Down-regulated in Transcription
  misc_feature: MA Experiment 20001248 PARAMETER Experiment Name: At_Far-red-induction_P Parameter: Age (day) Value: 7
  misc_feature: MA Experiment 20001248 PARAMETER Experiment Name: At_Far-red-induction_P Parameter: Light Value: Far-red vs. White
  misc_feature: MA Experiment 20001248 PARAMETER Experiment Name: At_Far-red-induction_P Parameter: Organism Value: A. thaliana
  misc_feature: MA Experiment 20001248 PARAMETER Experiment Name: At_Far-red-induction_P Parameter: Plant Line Value: Columbia
  misc_feature: MA Experiment 20001248 PARAMETER Experiment Name: At_Far-red-induction_P Parameter: Timepoint (hr) Value: 4
  misc_feature: MA Experiment 20001248 PARAMETER Experiment Name: At_Far-red-induction_P Parameter: Tissue Value: Whole Plant
  misc_feature: MA Experiment ID: 20001450 Result: Down-regulated in Transcription
  misc_feature: MA Experiment 20001450 PARAMETER Experiment Name: At_Far-red-induction_P Parameter: Age (day) Value: 7
  misc_feature: MA Experiment 20001450 PARAMETER Experiment Name: At_Far-red-induction_P Parameter: Light Value: Far-red vs. White
  misc_feature: MA Experiment 20001450 PARAMETER Experiment Name: At_Far-red-induction_P Parameter: Organism Value: A. thaliana
  misc_feature: MA Experiment 20001450 PARAMETER Experiment Name: At_Far-red-induction_P Parameter: Plant Line Value: Columbia
  misc_feature: MA Experiment 20001450 PARAMETER Experiment Name: At_Far-red-induction_P Parameter: Timepoint (hr) Value: 8
  misc_feature: MA Experiment 20001450 PARAMETER Experiment Name: At_Far-red-induction_P Parameter: Tissue Value: Whole Plant
  misc_feature: MA Experiment ID: 20001451 Result: Down-regulated in Transcription
  misc_feature: MA Experiment 20001451 PARAMETER Experiment Name: At_Far-red-induction_P Parameter: Age (day) Value: 7
  misc_feature: MA Experiment 20001451 PARAMETER Experiment Name: At_Far-red-induction_P Parameter: Light Value: Far-red vs. White
  misc_feature: MA Experiment 20001451 PARAMETER Experiment Name: At_Far-red-induction_P Parameter: Organism Value: A. thaliana
  misc_feature: MA Experiment 20001451 PARAMETER Experiment Name: At_Far-red-induction_P Parameter: Plant Line Value: Columbia
  misc_feature: MA Experiment 20001451 PARAMETER Experiment Name: At_Far-red-induction_P Parameter: Timepoint (hr) Value: 24
  misc_feature: MA Experiment 20001451 PARAMETER Experiment Name: At_Far-red-induction_P Parameter: Tissue Value: Whole Plant
atgtatcctacttttgatgttggagacagattagttgcagagaaggtgagttattatttcaggaagccttgtgcaaatgatattgtcatctttaaaagtccaccagttcttcaggaagttgggtatactgatgccgatgtatttattaaacggattgttgccaaagaaggtgaccttgtggaggtacataatgggaaactgatggttaatggtgttgctaggaatgaaaaattcatcttagagcctcctggttatgaaatgacaccaattagggtaccggaaaattcagtctttgtgatgggtgataaccggaataacagttatgattcgcacgtatggggtcctctgcctttgaagaatattattggacggtcggtttttcggtattggccaccaaacagagtaagcgggacagtgctagaaggtggctgtgctgtggataagcaatag

SEQ ID NO: 97020 - protein, 149 aa, Arabidopsis thaliana
  peptide (1)..(149): Ceres Seq. ID no. 12735758
  misc_feature (1)..(123): Pfam Name: Signal peptidase I Pfam Description: Signal peptidase I
  misc_feature (1)..(149): Homolog of NCBI NO: 9294054 NR Description: contains similarity to signal peptidase (leader
  misc_feature (1)..(149): Homolog of NCBI NO: 30687572 NR Description: chloroplast thylakoidal processing peptidase
  misc_feature (1)..(149): Homolog of NCBI NO: 25082936 NR Description: chloroplast thylakoidal processing peptidase,
  misc_feature (1)..(139): Homolog of NCBI NO: 15222236 NR Description: chloroplast thylakoidal processing peptidase, protein id: At1g06870.1, supported by cDNA: 15392. [Arabidopsis
  misc_feature (1)..(139): Homolog of NCBI NO: 21553622 NR Description: chloroplast thylakoidal processing peptidase,
  misc_feature (1)..(139): Homolog of NCBI NO: 25408074 NR Description: probable signal peptidase I [imported] - thaliana >gi|1946373|gb|AAB63091.1| putative signal peptidase I
  misc_feature (1)..(139): Homolog of NCBI NO: 30684587 NR Description: signal peptidase I -related [Arabidopsis >gi|2769566|emb|CAA71502.1| chloroplast thylakoidal processing [Arabidopsis thaliana] >gi|22135950|gb|AAM91557.1| putative
  misc_feature (1)..(139): Homolog of NCBI NO: 23042815 NR Description: hypothetical protein [Trichodesmium erythraeum
  misc_feature (1)..(135): Homolog of NCBI NO: 17230467 NR Description: signal peptidase I [Nostoc sp. PCC 7120]
  misc_feature (1)..(133): Homolog of NCBI NO: 22297948 NR Description: signal peptidase I [Thermosynechococcus elongatus >gi|22294126|dbj|BAC07957.1| signal peptidase I
MYPTFDVGDRLVAEKVSYYFRKPCANDIVIFKSPPVLQEVGYTDADVFIKRIVAKEGDLVEVHNGKLMVNGVARNEKFILEPPGYEMTPIRVPENSVFVMGDNRNNSYDSHVWGPLPLKNIIGRSVFRYWPPNRVSGTVLEGGCAVDKQ

SEQ ID NO: 97021 - protein, 82 aa, Arabidopsis thaliana
  peptide (1)..(82): Ceres Seq. ID no. 12735759
  misc_feature (1)..(56): Pfam Name: Signal peptidase I Pfam Description: Signal peptidase I
  misc_feature (1)..(82): Homolog of NCBI NO: 9294054 NR Description: contains similarity to signal peptidase (leader
  misc_feature (1)..(82): Homolog of NCBI NO: 30687572 NR Description: chloroplast thylakoidal processing peptidase
  misc_feature (1)..(82): Homolog of NCBI NO: 25082936 NR Description: chloroplast thylakoidal processing peptidase,
  misc_feature (1)..(72): Homolog of NCBI NO: 15222236 NR Description: chloroplast thylakoidal processing peptidase, protein id: At1g06870.1, supported by cDNA: 15392. [Arabidopsis
  misc_feature (1)..(72): Homolog of NCBI NO: 21553622 NR Description: chloroplast thylakoidal processing peptidase,
  misc_feature (1)..(72): Homolog of NCBI NO: 25408074 NR Description: probable signal peptidase I [imported] - thaliana >gi|1946373|gb|AAB63091.1| putative signal peptidase I
  misc_feature (1)..(72): Homolog of NCBI NO: 30684587 NR Description: signal peptidase I -related [Arabidopsis >gi|2769566|emb|CAA71502.1| chloroplast thylakoidal processing [Arabidopsis thaliana] >gi|22135950|gb|AAM91557.1| putative
  misc_feature (1)..(72): Homolog of NCBI NO: 23042815 NR Description: hypothetical protein [Trichodesmium erythraeum
  misc_feature (1)..(68): Homolog of NCBI NO: 17230467 NR Description: signal peptidase I [Nostoc sp. PCC 7120]
  misc_feature (1)..(66): Homolog of NCBI NO: 22297948 NR Description: signal peptidase I [Thermosynechococcus elongatus >gi|22294126|dbj|BAC07957.1| signal peptidase I
MVNGVARNEKFILEPPGYEMTPIRVPENSVFVMGDNRNNSYDSHVWGPLPLKNIIGRSVFRYWPPNRVSGTVLEGGCAVDKQ

SEQ ID NO: 97022 - DNA, 894 bp, Arabidopsis thaliana
  misc_feature (1)..(894): Ceres Seq. ID no. 12735784
  misc_feature: MA Experiment ID: 20000180 Result: Up-regulated in Transcription
  misc_feature: MA Experiment 20000180 PARAMETER Experiment Name: At_Germinating_Seeds_P Parameter: Age (hr) Value: 24 vs. 0
  misc_feature: MA Experiment 20000180 PARAMETER Experiment Name: At_Germinating_Seeds_P Parameter: Tissue Value: Germinating Seeds
  misc_feature: MA Experiment ID: 20000185 Result: Up-regulated in Transcription
  misc_feature: MA Experiment 20000185 PARAMETER Experiment Name: At_Roots__P Parameter: Age (day) Value: 7 vs. 21
  misc_feature: MA Experiment 20000185 PARAMETER Experiment Name: At_Roots__P Parameter: Organism Value: A. thaliana
  misc_feature: MA Experiment 20000185 PARAMETER Experiment Name: At_Roots__P Parameter: Tissue Value: Roots vs. Whole Plant
  misc_feature: MA Experiment ID: 20000227 Result: Up-regulated in Transcription
  misc_feature: MA Experiment 20000227 PARAMETER Experiment Name: At_Root-Tips-vs-Tops_P Parameter: Tissue Value: Root Tips vs. Root Tops
  misc_feature: MA Experiment ID: 20000234 Result: Up-regulated in Transcription
  misc_feature: MA Experiment 20000234 PARAMETER Experiment Name: At_Siliques_P Parameter: Age (day) Value: 21
  misc_feature: MA Experiment 20000234 PARAMETER Experiment Name: At_Siliques_P Parameter: Organism Value: A. thaliana
  misc_feature: MA Experiment 20000234 PARAMETER Experiment Name: At_Siliques_P Parameter: Plant Line Value: WS
  misc_feature: MA Experiment 20000234 PARAMETER Experiment Name: At_Siliques_P Parameter: Tissue Value: Less Than 5mm Siliques vs. Whole Plant
  misc_feature: MA Experiment ID: 20000264 Result: Up-regulated in Transcription
  misc_feature: MA Experiment 20000264 PARAMETER Experiment Name: At_Open_Flower_P Parameter: Age (day) Value: 21
  misc_feature: MA Experiment 20000264 PARAMETER Experiment Name: At_Open_Flower_P Parameter: Plant Line Value: WS
  misc_feature: MA Experiment 20000264 PARAMETER Experiment Name: At_Open_Flower_P Parameter: Tissue Value: Open Flower vs. Whole Plant
  misc_feature: MA Experiment ID: 20000286 Result: Up-regulated in Transcription
  misc_feature: MA Experiment 20000286 PARAMETER Experiment Name: At_Open_Flower_P Parameter: Age (day) Value: 21
  misc_feature: MA Experiment 20000286 PARAMETER Experiment Name: At_Open_Flower_P Parameter: Plant Line Value: WS
  misc_feature: MA Experiment 20000286 PARAMETER Experiment Name: At_Open_Flower_P Parameter: Tissue Value: Half Open vs. Whole Plant
  misc_feature: MA Experiment ID: 20000438 Result: Up-regulated in Transcription
  misc_feature: MA Experiment 20000438 PARAMETER Experiment Name: At_Shoots__P Parameter: Age (day) Value: 14
  misc_feature: MA Experiment 20000438 PARAMETER Experiment Name: At_Shoots__P Parameter: Tissue Value: Shoots vs. Whole Plant
  misc_feature: MA Experiment ID: 20000439 Result: Up-regulated in Transcription
  misc_feature: MA Experiment 20000439 PARAMETER Experiment Name: At_Roots__P Parameter: Age (day) Value: 14 vs. 21
  misc_feature: MA Experiment 20000439 PARAMETER Experiment Name: At_Roots__P Parameter: Organism Value: A. thaliana
  misc_feature: MA Experiment 20000439 PARAMETER Experiment Name: At_Roots__P Parameter: Tissue Value: Roots vs. Whole Plant
  misc_feature: MA Experiment ID: 20000794 Result: Up-regulated in Transcription
  misc_feature: MA Experiment 20000794 PARAMETER Experiment Name: At_Petals_P Parameter: Age (day) Value: 23-25 days
  misc_feature: MA Experiment 20000794 PARAMETER Experiment Name: At_Petals_P Parameter: Plant Line Value: WS
  misc_feature: MA Experiment 20000794 PARAMETER Experiment Name: At_Petals_P Parameter: Tissue Value: Petals vs. Whole plant
  misc_feature: MA Experiment ID: 20001451 Result: Up-regulated in Transcription
  misc_feature: MA Experiment 20001451 PARAMETER Experiment Name: At_Far-red-induction_P Parameter: Age (day) Value: 7
  misc_feature: MA Experiment 20001451 PARAMETER Experiment Name: At_Far-red-induction_P Parameter: Light Value: Far-red vs. White
  misc_feature: MA Experiment 20001451 PARAMETER Experiment Name: At_Far-red-induction_P Parameter: Organism Value: A. thaliana
  misc_feature: MA Experiment 20001451 PARAMETER Experiment Name: At_Far-red-induction_P Parameter: Plant Line Value: Columbia
  misc_feature: MA Experiment 20001451 PARAMETER Experiment Name: At_Far-red-induction_P Parameter: Timepoint (hr) Value: 24
  misc_feature: MA Experiment 20001451 PARAMETER Experiment Name: At_Far-red-induction_P Parameter: Tissue Value: Whole Plant
  misc_feature: MA Experiment ID: 20001910 Result: Up-regulated in Transcription
  misc_feature: MA Experiment 20001910 PARAMETER Experiment Name: At_Drought_Reproduction_P Parameter: Age (day) Value: 37
  misc_feature: MA Experiment 20001910 PARAMETER Experiment Name: At_Drought_Reproduction_P Parameter: Organism Value: A. thaliana
  misc_feature: MA Experiment 20001910 PARAMETER Experiment Name: At_Drought_Reproduction_P Parameter: Plant Line Value: WS
  misc_feature: MA Experiment 20001910 PARAMETER Experiment Name: At_Drought_Reproduction_P Parameter: Timepoint (day) Value: 7
  misc_feature: MA Experiment 20001910 PARAMETER Experiment Name: At_Drought_Reproduction_P Parameter: Tissue Value: Flowers
  misc_feature: MA Experiment 20001910 PARAMETER Experiment Name: At_Drought_Reproduction_P Parameter: Treatment Value: Drought vs. No Drought
atggaagccagtgtttatggcttgcagataataaagaacgctgatcttgaagacctgacagaactgggatccgggacatatggaactgtctatcatggaacatggcggggaacggatgttgctataaagagaatacggaacagttgctttgcagggagatcatctgaacaagaacgcttgacgaaagatttctggagggaagcacaaatactctcaaatcttcatcacccaaacgttgttgcattctacggtatagtgcctgatggaactggaggaaccttggcaactgttacagagttcatggtgaatgggtcactcaggcatgctcttctcaaaaaggacagattgcttgacactcggaaaaagataataattgcaatggatgctgcttttggcatggagtatttgcactcgaagaacatcgtccactttgatctcaaatgcgaaaacttacttgtcaatttaagggatccacaacggcctatatgcaaggtgggagatcttggcttatctagaatcaaacgtaacactttagtatctgggggagtgagaggaactcttccatggatggccccagaactcttgaacggaagcagcacccgagtttctgagaaagttgatgttttttcatatggaatctcgctgtgggagattctaaccggagaggaaccctatgcagatatgcattgtggagcaatcattggcgggatcgtgaagaacacacttcgacctcctataccaaaaagctgttctccggaatggaaaaagctgatggaacaatgctggtctgtcgacccggattctcgtcctccattcaccgaaataacatgccgacttcggtccatgtcaatggaagtcgtcactaaaagcaaaagaagagaaaataaaccctga

SEQ ID NO: 97023 - protein, 297 aa, Arabidopsis thaliana
  peptide (1)..(297): Ceres Seq. ID no. 12735785
  misc_feature (16)..(279): Pfam Name: Protein kinase domain Pfam Description: Protein kinase domain
  misc_feature (1)..(297): Homolog of NCBI NO: 15230168 NR Description: protein kinase, putative; protein id: At3g24720.1
  misc_feature (1)..(293): Homolog of NCBI NO: 15219796 NR Description: putative Ser/Thr protein kinase; protein id:
  misc_feature (1)..(293): Homolog of NCBI NO: 25406805 NR Description: hypothetical protein [imported] - Arabidopsis >gi|2494111|gb|AAB80620.1| Contains similarity to Glycine protein
  misc_feature (7)..(291): Homolog of NCBI NO: 15219417 NR Description: hypothetical protein; protein id: At1g79570.1
  misc_feature (7)..(297): Homolog of NCBI NO: 15219183 NR Description: putative Ser/Thr protein kinase; protein id:
  misc_feature (2)..(289): Homolog of NCBI NO: 15226883 NR Description: putative protein kinase; protein id: At2g35050.1
  misc_feature (2)..(283): Homolog of NCBI NO: 15242791 NR Description: putative protein; protein id: At5g57610.1 thaliana] >gi|9758322|dbj|BAB08796.1| contains similarity to
  misc_feature (8)..(283): Homolog of NCBI NO: 24414006 NR Description: contains EST D23238(C2469)~kinase-like protein
  misc_feature (8)..(297): Homolog of NCBI NO: 15232679 NR Description: protein kinase - like protein; protein id:
  misc_feature (5)..(235): Homolog of NCBI NO: 34896316 NR Description: putative protein kinase [Oryza sativa]
MEASVYGLQIIKNADLEDLTELGSGTYGTVYHGTWRGTDVAIKRIRNSCFAGRSSEQERLTKDFWREAQILSNLHHPNVVAFYGIVPDGTGGTLATVTEFMVNGSLRHALLKKDRLLDTRKKIIIAMDAAFGMEYLHSKNIVHFDLKCENLLVNLRDPQRPICKVGDLGLSRIKRNTLVSGGVRGTLPWMAPELLNGSSTRVSEKVDVFSYGISLWEILTGEEPYADMHCGAIIGGIVKNTLRPPIPKSCSPEWKKLMEQCWSVDPDSRPPFTEITCRLRSMSMEVVTKSKRRENKP

SEQ ID NO: 97024 - protein, 197 aa, Arabidopsis thaliana
  peptide (1)..(197): Ceres Seq. ID no. 12735786
  misc_feature (1)..(179): Pfam Name: Protein kinase domain Pfam Description: Protein kinase domain
  misc_feature (1)..(197): Homolog of NCBI NO: 15230168 NR Description: protein kinase, putative; protein id: At3g24720.1
  misc_feature (1)..(193): Homolog of NCBI NO: 15219796 NR Description: putative Ser/Thr protein kinase; protein id:
  misc_feature (1)..(193): Homolog of NCBI NO: 25406805 NR Description: hypothetical protein [imported] - Arabidopsis >gi|2494111|gb|AAB80620.1| Contains similarity to Glycine protein
  misc_feature (1)..(191): Homolog of NCBI NO: 15219417 NR Description: hypothetical protein; protein id: At1g79570.1
  misc_feature (1)..(197): Homolog of NCBI NO: 15219183 NR Description: putative Ser/Thr protein kinase; protein id:
  misc_feature (1)..(189): Homolog of NCBI NO: 15226883 NR Description: putative protein kinase; protein id: At2g35050.1
  misc_feature (1)..(183): Homolog of NCBI NO: 15242791 NR Description: putative protein; protein id: At5g57610.1 thaliana] >gi|9758322|dbj|BAB08796.1| contains similarity to
  misc_feature (1)..(183): Homolog of NCBI NO: 24414006 NR Description: contains EST D23238(C2469)~kinase-like protein
  misc_feature (1)..(197): Homolog of NCBI NO: 15232679 NR Description: protein kinase - like protein; protein id:
  misc_feature (1)..(135): Homolog of NCBI NO: 34896316 NR Description: putative protein kinase [Oryza sativa]
MVNGSLRHALLKKDRLLDTRKKIIIAMDAAFGMEYLHSKNIVHFDLKCENLLVNLRDPQRPICKVGDLGLSRIKRNTLVSGGVRGTLPWMAPELLNGSSTRVSEKVDVFSYGISLWEILTGEEPYADMHCGAIIGGIVKNTLRPPIPKSCSPEWKKLMEQCWSVDPDSRPPFTEITCRLRSMSMEVVTKSKRRENKP

SEQ ID NO: 97025 - protein, 171 aa, Arabidopsis thaliana
  peptide (1)..(171): Ceres Seq. ID no. 12735787
  misc_feature (1)..(153): Pfam Name: Protein kinase domain Pfam Description: Protein kinase domain
  misc_feature (1)..(171): Homolog of NCBI NO: 15230168 NR Description: protein kinase, putative; protein id: At3g24720.1
  misc_feature (1)..(167): Homolog of NCBI NO: 15219796 NR Description: putative Ser/Thr protein kinase; protein id:
  misc_feature (1)..(167): Homolog of NCBI NO: 25406805 NR Description: hypothetical protein [imported] - Arabidopsis >gi|2494111|gb|AAB80620.1| Contains similarity to Glycine protein
  misc_feature (1)..(165): Homolog of NCBI NO: 15219417 NR Description: hypothetical protein; protein id: At1g79570.1
  misc_feature (1)..(171): Homolog of NCBI NO: 15219183 NR Description: putative Ser/Thr protein kinase; protein id:
  misc_feature (1)..(163): Homolog of NCBI NO: 15226883 NR Description: putative protein kinase; protein id: At2g35050.1
  misc_feature (1)..(157): Homolog of NCBI NO: 15242791 NR Description: putative protein; protein id: At5g57610.1 thaliana] >gi|9758322|dbj|BAB08796.1| contains similarity to
  misc_feature (1)..(157): Homolog of NCBI NO: 24414006 NR Description: contains EST D23238(C2469)~kinase-like protein
  misc_feature (1)..(171): Homolog of NCBI NO: 15232679 NR Description: protein kinase - like protein; protein id:
  misc_feature (1)..(109): Homolog of NCBI NO: 34896316 NR Description: putative protein kinase [Oryza sativa]
MDAAFGMEYLHSKNIVHFDLKCENLLVNLRDPQRPICKVGDLGLSRIKRNTLVSGGVRGTLPWMAPELLNGSSTRVSEKVDVFSYGISLWEILTGEEPYADMHCGAIIGGIVKNTLRPPIPKSCSPEWKKLMEQCWSVDPDSRPPFTEITCRLRSMSMEVVTKSKRRENKP

SEQ ID NO: 97026 - DNA, 1548 bp, Arabidopsis thaliana
  misc_feature (1)..(1548): Ceres Seq. ID no. 12735822
  misc_feature: MA Experiment ID: 20000166 Result: Up-regulated in Transcription
  misc_feature: MA Experiment 20000166 PARAMETER Experiment Name: At_100uM_ABA_P Parameter: Age (day) Value: 14
  misc_feature: MA Experiment 20000166 PARAMETER Experiment Name: At_100uM_ABA_P Parameter: Organism Value: A. thaliana
  misc_feature: MA Experiment 20000166 PARAMETER Experiment Name: At_100uM_ABA_P Parameter: Plant Line Value: WS
  misc_feature: MA Experiment 20000166 PARAMETER Experiment Name: At_100uM_ABA_P Parameter: Timepoint (hr) Value: 1
  misc_feature: MA Experiment 20000166 PARAMETER Experiment Name: At_100uM_ABA_P Parameter: Tissue Value: Aerial
  misc_feature: MA Experiment 20000166 PARAMETER Experiment Name: At_100uM_ABA_P Parameter: Treatment Value: 100uM ABA vs. No Treatment
  misc_feature: MA Experiment ID: 20000182 Result: Up-regulated in Transcription
  misc_feature: MA Experiment 20000182 PARAMETER Experiment Name: At_2mM_SA_P Parameter: Age (day) Value: 14
  misc_feature: MA Experiment 20000182 PARAMETER Experiment Name: At_2mM_SA_P Parameter: Organism Value: A. thaliana
  misc_feature: MA Experiment 20000182 PARAMETER Experiment Name: At_2mM_SA_P Parameter: Plant Line Value: WS
  misc_feature: MA Experiment 20000182 PARAMETER Experiment Name: At_2mM_SA_P Parameter: Timepoint (hr) Value: 6
  misc_feature: MA Experiment 20000182 PARAMETER Experiment Name: At_2mM_SA_P Parameter: Tissue Value: Aerial
  misc_feature: MA Experiment 20000182 PARAMETER Experiment Name: At_2mM_SA_P Parameter: Treatment Value: 2mM SA vs. No Treatment
  misc_feature: MA Experiment ID: 20000184 Result: Down-regulated in Transcription
  misc_feature: MA Experiment 20000184 PARAMETER Experiment Name: At_Shoots__P Parameter: Age (day) Value: 7
  misc_feature: MA Experiment 20000184 PARAMETER Experiment Name: At_Shoots__P Parameter: Tissue Value: Shoots vs. Whole Plant
  misc_feature: MA Experiment ID: 20000211 Result: Up-regulated in Transcription
  misc_feature: MA Experiment 20000211 PARAMETER Experiment Name: At_0.001percent_MeJA__P Parameter: Age (day) Value: 14
  misc_feature: MA Experiment 20000211 PARAMETER Experiment Name: At_0.001percent_MeJA__P Parameter: Organism Value: A. thaliana
  misc_feature: MA Experiment 20000211 PARAMETER Experiment Name: At_0.001percent_MeJA__P Parameter: Plant Line Value: WS
  misc_feature: MA Experiment 20000211 PARAMETER Experiment Name: At_0.001percent_MeJA__P Parameter: Timepoint (hr) Value: 1
  misc_feature: MA Experiment 20000211 PARAMETER Experiment Name: At_0.001percent_MeJA__P Parameter: Tissue Value: Aerial
  misc_feature: MA Experiment 20000211 PARAMETER Experiment Name: At_0.001percent_MeJA__P Parameter: Treatment Value: 0.001percent MeJA vs. No Treatment
  misc_feature: MA Experiment ID: 20000234 Result: Up-regulated in Transcription
  misc_feature: MA Experiment 20000234 PARAMETER Experiment Name: At_Siliques_P Parameter: Age (day) Value: 21
  misc_feature: MA Experiment 20000234 PARAMETER Experiment Name: At_Siliques_P Parameter: Organism Value: A. thaliana
  misc_feature: MA Experiment 20000234 PARAMETER Experiment Name: At_Siliques_P Parameter: Plant Line Value: WS
  misc_feature: MA Experiment 20000234 PARAMETER Experiment Name: At_Siliques_P Parameter: Tissue Value: Less Than 5mm Siliques vs. Whole Plant
  misc_feature: MA Experiment ID: 20000235 Result: Up-regulated in Transcription
  misc_feature: MA Experiment 20000235 PARAMETER Experiment Name: At_Siliques_P Parameter: Age (day) Value: 21
  misc_feature: MA Experiment 20000235 PARAMETER Experiment Name: At_Siliques_P Parameter: Organism Value: A. thaliana
  misc_feature: MA Experiment 20000235 PARAMETER Experiment Name: At_Siliques_P Parameter: Plant Line Value: WS
  misc_feature: MA Experiment 20000235 PARAMETER Experiment Name: At_Siliques_P Parameter: Tissue Value: 5-10mm Siliques vs. Whole Plant
  misc_feature: MA Experiment ID: 20000264 Result: Up-regulated in Transcription
  misc_feature: MA Experiment 20000264 PARAMETER Experiment Name: At_Open_Flower_P Parameter: Age (day) Value: 21
  misc_feature: MA Experiment 20000264 PARAMETER Experiment Name: At_Open_Flower_P Parameter: Plant Line Value: WS
  misc_feature: MA Experiment 20000264 PARAMETER Experiment Name: At_Open_Flower_P Parameter: Tissue Value: Open Flower vs. Whole Plant
  misc_feature: MA Experiment ID: 20000265 Result: Up-regulated in Transcription
  misc_feature: MA Experiment 20000265 PARAMETER Experiment Name: At_Open_Flower_P Parameter: Age (day) Value: 21
  misc_feature: MA Experiment 20000265 PARAMETER Experiment Name: At_Open_Flower_P Parameter: Plant Line Value: WS
  misc_feature: MA Experiment 20000265 PARAMETER Experiment Name: At_Open_Flower_P Parameter: Tissue Value: Closed Flower vs. Whole Plant
  misc_feature: MA Experiment ID: 20000286 Result: Up-regulated in Transcription
  misc_feature: MA Experiment 20000286 PARAMETER Experiment Name: At_Open_Flower_P Parameter: Age (day) Value: 21
  misc_feature: MA Experiment 20000286 PARAMETER Experiment Name: At_Open_Flower_P Parameter: Plant Line Value: WS
  misc_feature: MA Experiment 20000286 PARAMETER Experiment Name: At_Open_Flower_P Parameter: Tissue Value: Half Open vs. Whole Plant
  misc_feature: MA Experiment ID: 20000438 Result: Down-regulated in Transcription
  misc_feature: MA Experiment 20000438 PARAMETER Experiment Name: At_Shoots__P Parameter: Age (day) Value: 14
  misc_feature: MA Experiment 20000438 PARAMETER Experiment Name: At_Shoots__P Parameter: Tissue Value: Shoots vs. Whole Plant
  misc_feature: MA Experiment ID: 20000794 Result: Down-regulated in Transcription
  misc_feature: MA Experiment 20000794 PARAMETER Experiment Name: At_Petals_P Parameter: Age (day) Value: 23-25 days
  misc_feature: MA Experiment 20000794 PARAMETER Experiment Name: At_Petals_P Parameter: Plant Line Value: WS
  misc_feature: MA Experiment 20000794 PARAMETER Experiment Name: At_Petals_P Parameter: Tissue Value: Petals vs. Whole plant
  misc_feature: MA Experiment ID: 20001451 Result: Up-regulated in Transcription
  misc_feature: MA Experiment 20001451 PARAMETER Experiment Name: At_Far-red-induction_P Parameter: Age (day) Value: 7
  misc_feature: MA Experiment 20001451 PARAMETER Experiment Name: At_Far-red-induction_P Parameter: Light Value: Far-red vs. White
  misc_feature: MA Experiment 20001451 PARAMETER Experiment Name: At_Far-red-induction_P Parameter: Organism Value: A. thaliana
  misc_feature: MA Experiment 20001451 PARAMETER Experiment Name: At_Far-red-induction_P Parameter: Plant Line Value: Columbia
  misc_feature: MA Experiment 20001451 PARAMETER Experiment Name: At_Far-red-induction_P Parameter: Timepoint (hr) Value: 24
  misc_feature: MA Experiment 20001451 PARAMETER Experiment Name: At_Far-red-induction_P Parameter: Tissue Value: Whole Plant
  misc_feature: MA Experiment ID: 20001907 Result: Down-regulated in Transcription
  misc_feature: MA Experiment 20001907 PARAMETER Experiment Name: At_Drought_Reproduction_P Parameter: Age (day) Value: 37
  misc_feature: MA Experiment 20001907 PARAMETER Experiment Name: At_Drought_Reproduction_P Parameter: Organism Value: A. thaliana
  misc_feature: MA Experiment 20001907 PARAMETER Experiment Name: At_Drought_Reproduction_P Parameter: Plant Line Value: WS
  misc_feature: MA Experiment 20001907 PARAMETER Experiment Name: At_Drought_Reproduction_P Parameter: Timepoint (day) Value: 7
  misc_feature: MA Experiment 20001907 PARAMETER Experiment Name: At_Drought_Reproduction_P Parameter: Tissue Value: Siliques
  misc_feature: MA Experiment 20001907 PARAMETER Experiment Name: At_Drought_Reproduction_P Parameter: Treatment Value: Drought vs. No Drought
atgacttttctctttagtactctccagttgtctctcttctctttggcccttgtaatctttggttacattttcctcagaaaacaattgagtagatgtgaagttgatagctccacgattcctgagccattgggagctttgcctctattcggacacctccatcttttgcgtggcaaaaaactcctttgcaagaaattagctgccatgtcccaaaaacatggtcctatcttctccctcaagttagggttttataggctggttgtagccagcgacccaaaaacggtgaaagattgtttcaccaccaacgacttggctacagcaaccagacccaatatagcctttggtcggtacgtaggctacaacaatgcaagtctgactctggctccctatggagactattggcgtgagttacgtaagattgtcaccgtccatctattctcaaaccacagtatagagatgcttggtcacattcgttcttcagaagtaaacacgttgatcaaacacctatacaaagggaatggtggaacttctatagtgaagattgacatgttatttgagtttttgaccttcaatataatccttaggaagatggtggggaagaggattggtttcggtgaagtgaatagcgatgaatggcgttataaggaggccctgaagcattgcgagtacttggctgtgattcctatgataggcgacgttattccatggttgggatggttggattttgcaaaaaattctcaaatgaagagactatttaaggagcttgactcagtcaacaccaagtggctccacgaacatctcaagaagagatcaagaaatgagaaggatcaagaaagaacaatcatggatctactgctagacatcttaccagaggatattgtgataagtggacacgtacgcgatgtcattgtgaaggcaacaattttggctctcacattaacaggatcagacagcacatccatcactttgacatgggcggtatcgctgctactcaacaatccagctgctttagaagcagcacaagaagagattgataatagtgtcggcaaaggtagatggattgaagaatccgatatacaaaacctcaagtacctacaagctattgttaaggaaacgcaccgactttacccgccggctcctctaacaggaatccgcgaagcacgtgaagattgtttcgtgggaggataccgtgttgagaaaggcacacgcttgctcgtaaacatatggaaacttcatagggatcccaagatctggcctgaccccaaaacctttaagcctgagaggttcatggaggataaatcacaatgtgaaaagagcaactttgaatacattcctttcggttcgggaaggaggtcgtgtccgggagtcaatcttggtctaagagttgtacactttgtattggctagattgcttcaagggtttgagttacacaaagtgtctgatgaaccactggatatggctgaagggcctggtttagccttgccaaagattaacccggtcgaagtagttgtaatgcctcggctcgacccgaagttgtatagtttactctaa

SEQ ID NO: 97027 - protein, 515 aa, Arabidopsis thaliana
  peptide (1)..(515): Ceres Seq. ID no. 12735823
  misc_feature (1)..(515): Homolog of NCBI NO: 15230811 NR Description: cytochrome p450 family; protein id: At3g25180.1 thaliana] >gi|9294175|dbj|BAB02077.1| cytochrome p450
MTFLFSTLQLSLFSLALVIFGYIFLRKQLSRCEVDSSTIPEPLGALPLFGHLHLLRGKKLLCKKLAAMSQKHGPIFSLKLGFYRLVVASDPKTVKDCFTTNDLATATRPNIAFGRYVGYNNASLTLAPYGDYWRELRKIVTVHLFSNHSIEMLGHIRSSEVNTLIKHLYKGNGGTSIVKIDMLFEFLTFNIILRKMVGKRIGFGEVNSDEWRYKEALKHCEYLAVIPMIGDVIPWLGWLDFAKNSQMKRLFKELDSVNTKWLHEHLKKRSRNEKDQERTIMDLLLDILPEDIVISGHVRDVIVKATILALTLTGSDSTSITLTWAVSLLLNNPAALEAAQEEIDNSVGKGRWIEESDIQNLKYLQAIVKETHRLYPPAPLTGIREAREDCFVGGYRVEKGTRLLVNIWKLHRDPKIWPDPKTFKPERFMEDKSQCEKSNFEYIPFGSGRRSCPGVNLGLRVVHFVLARLLQGFELHKVSDEPLDMAEGPGLALPKINPVEVVVMPRLDPKLYSLL

SEQ ID NO: 97028 - protein, 448 aa, Arabidopsis thaliana
  peptide (1)..(448): Ceres Seq. ID no. 12735824
  misc_feature (1)..(448): Homolog of NCBI NO: 15230811 NR Description: cytochrome p450 family; protein id: At3g25180.1 thaliana] >gi|9294175|dbj|BAB02077.1| cytochrome p450
MSQKHGPIFSLKLGFYRLVVASDPKTVKDCFTTNDLATATRPNIAFGRYVGYNNASLTLAPYGDYWRELRKIVTVHLFSNHSIEMLGHIRSSEVNTLIKHLYKGNGGTSIVKIDMLFEFLTFNIILRKMVGKRIGFGEVNSDEWRYKEALKHCEYLAVIPMIGDVIPWLGWLDFAKNSQMKRLFKELDSVNTKWLHEHLKKRSRNEKDQERTIMDLLLDILPEDIVISGHVRDVIVKATILALTLTGSDSTSITLTWAVSLLLNNPAALEAAQEEIDNSVGKGRWIEESDIQNLKYLQAIVKETHRLYPPAPLTGIREAREDCFVGGYRVEKGTRLLVNIWKLHRDPKIWPDPKTFKPERFMEDKSQCEKSNFEYIPFGSGRRSCPGVNLGLRVVHFVLARLLQGFELHKVSDEPLDMAEGPGLALPKINPVEVVVMPRLDPKLYSLL

SEQ ID NO: 97029 - protein, 364 aa, Arabidopsis thaliana
  peptide (1)..(364): Ceres Seq. ID no. 12735825
  misc_feature (1)..(364): Homolog of NCBI NO: 15230811 NR Description: cytochrome p450 family; protein id: At3g25180.1 thaliana] >gi|9294175|dbj|BAB02077.1| cytochrome p450
MLGHIRSSEVNTLIKHLYKGNGGTSIVKIDMLFEFLTFNIILRKMVGKRIGFGEVNSDEWRYKEALKHCEYLAVIPMIGDVIPWLGWLDFAKNSQMKRLFKELDSVNTKWLHEHLKKRSRNEKDQERTIMDLLLDILPEDIVISGHVRDVIVKATILALTLTGSDSTSITLTWAVSLLLNNPAALEAAQEEIDNSVGKGRWIEESDIQNLKYLQAIVKETHRLYPPAPLTGIREAREDCFVGGYRVEKGTRLLVNIWKLHRDPKIWPDPKTFKPERFMEDKSQCEKSNFEYIPFGSGRRSCPGVNLGLRVVHFVLARLLQGFELHKVSDEPLDMAEGPGLALPKINPVEVVVMPRLDPKLYSLL

SEQ ID NO: 97030 - DNA, 846 bp, Arabidopsis thaliana
  misc_feature (1)..(846): Ceres Seq. ID no. 12735838
  misc_feature: MA Experiment ID: 20000527 Result: Down-regulated in Transcription
  misc_feature: MA Experiment 20000527 PARAMETER Experiment Name: At_10percent_PEG_P Parameter: Age (day) Value: 20
  misc_feature: MA Experiment 20000527 PARAMETER Experiment Name: At_10percent_PEG_P Parameter: Organism Value: A. thaliana
  misc_feature: MA Experiment 20000527 PARAMETER Experiment Name: At_10percent_PEG_P Parameter: Plant Line Value: WS
  misc_feature: MA Experiment 20000527 PARAMETER Experiment Name: At_10percent_PEG_P Parameter: Timepoint (day) Value: 20
  misc_feature: MA Experiment 20000527 PARAMETER Experiment Name: At_10percent_PEG_P Parameter: Tissue Value: Whole Plant
  misc_feature: MA Experiment 20000527 PARAMETER Experiment Name: At_10percent_PEG_P Parameter: Treatment Value: 10percent PEG vs. No Treatment
  misc_feature: MA Experiment ID: 20001557 Result: Up-regulated in Transcription
  misc_feature: MA Experiment 20001557 PARAMETER Experiment Name: At_Drought_Soil_Dry_P Parameter: Age (day) Value: 27
  misc_feature: MA Experiment 20001557 PARAMETER Experiment Name: At_Drought_Soil_Dry_P Parameter: Organism Value: A. thaliana
  misc_feature: MA Experiment 20001557 PARAMETER Experiment Name: At_Drought_Soil_Dry_P Parameter: Plant Line Value: WS
  misc_feature: MA Experiment 20001557 PARAMETER Experiment Name: At_Drought_Soil_Dry_P Parameter: Post Timepoint (hr) Value: 3
  misc_feature: MA Experiment 20001557 PARAMETER Experiment Name: At_Drought_Soil_Dry_P Parameter: Post-Treatment Value: Re-Water vs. No Drought
  misc_feature: MA Experiment 20001557 PARAMETER Experiment Name: At_Drought_Soil_Dry_P Parameter: Timepoint (day) Value: 13
  misc_feature: MA Experiment 20001557 PARAMETER Experiment Name: At_Drought_Soil_Dry_P Parameter: Treatment Value: Drought vs. No Drought
  misc_feature: MA Experiment ID: 20001905 Result: Up-regulated in Transcription
  misc_feature: MA Experiment 20001905 PARAMETER Experiment Name: At_Drought_Reproduction_P Parameter: Age (day) Value: 40
  misc_feature: MA Experiment 20001905 PARAMETER Experiment Name: At_Drought_Reproduction_P Parameter: Organism Value: A. thaliana
  misc_feature: MA Experiment 20001905 PARAMETER Experiment Name: At_Drought_Reproduction_P Parameter: Plant Line Value: WS
  misc_feature: MA Experiment 20001905 PARAMETER Experiment Name: At_Drought_Reproduction_P Parameter: Timepoint (day) Value: 10
  misc_feature: MA Experiment 20001905 PARAMETER Experiment Name: At_Drought_Reproduction_P Parameter: Tissue Value: Rosettes
  misc_feature: MA Experiment 20001905 PARAMETER Experiment Name: At_Drought_Reproduction_P Parameter: Treatment Value: Drought vs. No Drought
atggcgattttctccagaaccaaacgtgtcactgatccacttgacgacgacgcgaaggctcggatcttgagcagccacagttacatcctagaccaagattctcctcgactctgcgagctcgtacacgggtttcttgaggatggtcctgaagagtcattctacgactctgaccccgacctgtctgagacttcttcagctgaacattctggtgaagctagtgtggagatcgtgagaatggcggtgagcttctccgattccgatccttaccggaatctattgctagctcacgttttgagagccgtggaggtatattccggttttaggtcaaggaacaaaactgttttccgggataaggtagcttcgtttctgcgagagcttggtcacgacgccgcggtttgtgtatcaaaatggacctcttcatccaaactcatcgctgggagttaccatttcattgacgtcgttcacaagccgtcagataatgatcagaaggccgtccgttacttggttgatctagactttgcttcggagttcgagatcgcaaggccaacgcgcgaatacacgcgtgggctgcagctgctgcctaacgttttcgtaggaaatgaagagaatctaaggacgatcgtgagagagtcatgcgacgcggcgaagcgatcaatgaagagccgtggcttgtctcttccaccgtggcggagaagctcttacttacagcataagtggtttggtccgtacaaaagaaaggtgggatctagtttgggagtgaagccgttgaatagtgacgccgttagttgccgatctttagggtttgatgacggcgccgtcaatactcgtttgttcatcagggcatga

SEQ ID NO: 97031 - protein, 281 aa, Arabidopsis thaliana
  peptide (1)..(281): Ceres Seq. ID no. 12735839
  misc_feature (37)..(245): Pfam Name: Protein of unknown function (DUF506) Pfam Description: Protein of unknown function (DUF506)
  misc_feature (1)..(281): Homolog of NCBI NO: 15230824 NR Description: hypothetical protein; protein id: At3g25240.1 thaliana] >gi|9294181|dbj|BAB02083.1|
  misc_feature (31)..(280): Homolog of NCBI NO: 18397919 NR Description: expressed protein; protein id: At3g07350.1, by cDNA: 251012., supported by cDNA: gi_15028230, supported by gi_21280936 [Arabidopsis thaliana]
  misc_feature (31)..(280): Homolog of NCBI NO: 21554332 NR Description: unknown [Arabidopsis thaliana]
  misc_feature (36)..(249): Homolog of NCBI NO: 34902608 NR Description: Unknown protein [Oryza sativa (japonica
  misc_feature (54)..(268): Homolog of NCBI NO: 34906942 NR Description: similar to Arabidopsis thaliana chromosome 3,
  misc_feature (56)..(246): Homolog of NCBI NO: 20042978 NR Description: Hypothetical protein [Oryza sativa]
  misc_feature (56)..(246): Homolog of NCBI NO: 37534384 NR Description: unknown protein [Oryza sativa (japonica
  misc_feature (8)..(262): Homolog of NCBI NO: 25408622 NR Description: hypothetical protein At2g38820 [imported] -
  misc_feature (38)..(245): Homolog of NCBI NO: 34897230 NR Description: unknown protein [Oryza sativa (japonica
  misc_feature (3)..(245): Homolog of NCBI NO: 7486102 NR Description: hypothetical protein F24O1.16 - Arabidopsis >gi|7940287|gb|AAF70846.1|AC003113_13 F2401.16 [Arabidopsis >gi|26450592|dbj|BAC42408.1| unknown protein [Arabidopsis
MAIFSRTKRVTDPLDDDAKARILSSHSYILDQDSPRLCELVHGFLEDGPEESFYDSDPDLSETSSAEHSGEASVEIVRMAVSFSDSDPYRNLLLAHVLRAVEVYSGFRSRNKTVFRDKVASFLRELGHDAAVCVSKWTSSSKLIAGSYHFIDVVHKPSDNDQKAVRYLVDLDFASEFEIARPTREYTRGLQLLPNVFVGNEENLRTIVRESCDAAKRSMKSRGLSLPPWRRSSYLQHKWFGPYKRKVGSSLGVKPLNSDAVSCRSLGFDDGAVNTRLFIRA

SEQ ID NO: 97032 - protein, 203 aa, Arabidopsis thaliana
  peptide (1)..(203): Ceres Seq. ID no. 12735840
  misc_feature (1)..(167): Pfam Name: Protein of unknown function (DUF506) Pfam Description: Protein of unknown function (DUF506)
  misc_feature (1)..(203): Homolog of NCBI NO: 15230824 NR Description: hypothetical protein; protein id: At3g25240.1 thaliana] >gi|9294181|dbj|BAB02083.1|
  misc_feature (1)..(202): Homolog of NCBI NO: 18397919 NR Description: expressed protein; protein id: At3g07350.1, by cDNA: 251012., supported by cDNA: gi_15028230, supported by gi_21280936 [Arabidopsis thaliana]
  misc_feature (1)..(202): Homolog of NCBI NO: 21554332 NR Description: unknown [Arabidopsis thaliana]
  misc_feature (1)..(171): Homolog of NCBI NO: 34902608 NR Description: Unknown protein [Oryza sativa (japonica
  misc_feature (1)..(190): Homolog of NCBI NO: 34906942 NR Description: similar to Arabidopsis thaliana chromosome 3,
  misc_feature (1)..(168): Homolog of NCBI NO: 20042978 NR Description: Hypothetical protein [Oryza sativa]
  misc_feature (1)..(168): Homolog of NCBI NO: 37534384 NR Description: unknown protein [Oryza sativa (japonica
  misc_feature (1)..(184): Homolog of NCBI NO: 25408622 NR Description: hypothetical protein At2g38820 [imported] -
  misc_feature (1)..(167): Homolog of NCBI NO: 34897230 NR Description: unknown protein [Oryza sativa (japonica
  misc_feature (1)..(167): Homolog of NCBI NO: 7486102 NR Description: hypothetical protein F24O1.16 - Arabidopsis >gi|7940287|gb|AAF70846.1|AC003113_13 F2401.16 [Arabidopsis >gi|26450592|dbj|BAC42408.1| unknown protein [Arabidopsis
MAVSFSDSDPYRNLLLAHVLRAVEVYSGFRSRNKTVFRDKVASFLRELGHDAAVCVSKWTSSSKLIAGSYHFIDVVHKPSDNDQKAVRYLVDLDFASEFEIARPTREYTRGLQLLPNVFVGNEENLRTIVRESCDAAKRSMKSRGLSLPPWRRSSYLQHKWFGPYKRKVGSSLGVKPLNSDAVSCRSLGFDDGAVNTRLFIRA

SEQ ID NO: 97033 - DNA, 1566 bp, Arabidopsis thaliana
  misc_feature (1)..(1566): Ceres Seq. ID no. 12735849
atggagaatgatatggaagagaagtttgaagattggaaaggtaaagaggcaatcccagggaaacatggtgggatcagagctgcatctattgtttgtgttgtggtgatgatggagaacatagtgttcatagctaatggattcaatttcgtgaaatatttcatgggatcaatgcattatacaccagccacagcagcaaacatggtcactaatttcatgggaacatcgtttttactcactctttttggtggttttatcgctgactctttcgtcactcatttcacaactttcatcgtcttctgttgcattgaactcatgggattgatcttgttgacgttccaagctcataaccctaagttactgcctgaaaaagataaaacaccttcaactcttcaatcagcgattcttttcacaggactctacgcaatggctattggtacgggcggtttaaaggcatcgttgcctagtcatggaggcgatcaaattgatagaagaaatccaagactgatctcaagattcttcgattggttatacttctctatatgctctggatgcctcttggccgtaaccgttgtgttgtggatcgaggaaaagaaagggtggatatggagcttcaatatatccgttggaattctagcgacggcgctgtgtatttttactgtagggctaccgttttatcggttcaagcgtcctaatggaagtccgttgaaaaagattgcaattgtgattatttctgccgcaagaaaccgaaataaatctgatttggatgaagagatgatgcgaggtcttatctctatctacaagaacaatagtcacaacaagttaaagtggatagataaagcaacgttgaacaaaaacatctcagaaacagaagttgaagaaacaagaacgtttttgggtcttctaccaatctttggtagcacaattgtcatgagctgctgcgtggcacaactctctaccttctccgcacaacaaggaatgctcatgaacaagaaactctttcactctttcgagatccccgtaccttctctcaccgccattcctctcatcttcatgctcttatctatacctttatacgaattctttggaaaaaagatctcatcaggcaacaacaatagatcatccagtttcaatttgaaacgcattggactcggcctagctctctcttcggtttcaatggcggtttctgccatcgtagaggccaagaggaaacatgaagtggttcataacaacttcagaatctctgttttgtggctagtgtttcagtatctgatgctaagtgtctctgatatgttgactttaggagggatgctagagttcttttatagagaagctccgtcgaacatgaagagcataagcacggctttgggatggtgttcaaccgcattaggtttctttcttagcacaactcttgtagaggttacaaatgccgtcacgggaaggcttggccatcaatggcttggtggggaagatctcaacaagacaaggcttgaacttttttatgtgctcttgtgtgttcttaatactcttaatcttctgaactatattttttgggcaaagagatattaa

SEQ ID NO: 97034 - protein, 521 aa, Arabidopsis thaliana
  peptide (1)..(521): Ceres Seq. ID no. 12735850
  misc_feature (93)..(460): Pfam Name: POT family Pfam Description: POT family
  misc_feature (1)..(521): Homolog of NCBI NO: 15230829 NR Description: nitrate transporter, putative; protein id:
  misc_feature (1)..(521): Homolog of NCBI NO: 15230826 NR Description: nitrate transporter, putative; protein id: [Arabidopsis thaliana] >gi|9294183|dbj|BAB02085.1| nitrate
  misc_feature (1)..(246): Homolog of NCBI NO: 22329803 NR Description: nitrate transporter, putative; protein id: supported by cDNA: gi_18175947, supported by cDNA: gi_20465362 thaliana] >gi|18175948|gb|AAL59956.1| putative nitrate
  misc_feature (1)..(246): Homolog of NCBI NO: 25403281 NR Description: protein T7N9.10 [imported] - Arabidopsis thaliana
  misc_feature (290)..(521): Homolog of NCBI NO: 22329803 NR Description: nitrate transporter, putative; protein id: supported by cDNA: gi_18175947, supported by cDNA: gi_20465362 thaliana] >gi|18175948|gb|AAL59956.1| putative nitrate
  misc_feature (290)..(521): Homolog of NCBI NO: 25403281 NR Description: protein T7N9.10 [imported] - Arabidopsis thaliana
  misc_feature (7)..(246): Homolog of NCBI NO: 17064754 NR Description: nitrate transporter (NTL1) [Arabidopsis thaliana]
  misc_feature (290)..(521): Homolog of NCBI NO: 17064754 NR Description: nitrate transporter (NTL1) [Arabidopsis thaliana]
  misc_feature (7)..(246): Homolog of NCBI NO: 18409382 NR Description: nitrate transporter (NTL1); protein id: supported by cDNA: gi_17064753, supported by cDNA: gi_3377516 thaliana] >gi|23397158|gb|AAN31862.1| putative nitrate
  misc_feature (7)..(246): Homolog of NCBI NO: 25404844 NR Description: nitrate transporter (NTL1), 53025-56402 - Arabidopsis thaliana >gi|12325224|gb|AAG52554.1|AC010675_2
MENDMEEKFEDWKGKEAIPGKHGGIRAASIVCVVVMMENIVFIANGFNFVKYFMGSMHYTPATAANMVTNFMGTSFLLTLFGGFIADSFVTHFTTFIVFCCIELMGLILLTFQAHNPKLLPEKDKTPSTLQSAILFTGLYAMAIGTGGLKASLPSHGGDQIDRRNPRLISRFFDWLYFSICSGCLLAVTVVLWIEEKKGWIWSFNISVGILATALCIFTVGLPFYRFKRPNGSPLKKIAIVIISAARNRNKSDLDEEMMRGLISIYKNNSHNKLKWIDKATLNKNISETEVEETRTFLGLLPIFGSTIVMSCCVAQLSTFSAQQGMLMNKKLFHSFEIPVPSLTAIPLIFMLLSIPLYEFFGKKISSGNNNRSSSFNLKRIGLGLALSSVSMAVSAIVEAKRKHEVVHNNFRISVLWLVFQYLMLSVSDMLTLGGMLEFFYREAPSNMKSISTALGWCSTALGFFLSTTLVEVTNAVTGRLGHQWLGGEDLNKTRLELFYVLLCVLNTLNLLNYIFWAKRY

SEQ ID NO: 97035 - protein, 517 aa, Arabidopsis thaliana
  peptide (1)..(517): Ceres Seq. ID no. 12735851
  misc_feature (89)..(456): Pfam Name: POT family Pfam Description: POT family
  misc_feature (1)..(517): Homolog of NCBI NO: 15230829 NR Description: nitrate transporter, putative; protein id:
  misc_feature (1)..(517): Homolog of NCBI NO: 15230826 NR Description: nitrate transporter, putative; protein id: [Arabidopsis thaliana] >gi|9294183|dbj|BAB02085.1| nitrate
  misc_feature (1)..(242): Homolog of NCBI NO: 22329803 NR Description: nitrate transporter, putative; protein id: supported by cDNA: gi_18175947, supported by cDNA: gi_20465362 thaliana] >gi|18175948|gb|AAL59956.1| putative nitrate
  misc_feature (1)..(242): Homolog of NCBI NO: 25403281 NR Description: protein T7N9.10 [imported] - Arabidopsis thaliana
  misc_feature (286)..(517): Homolog of NCBI NO: 22329803 NR Description: nitrate transporter, putative; protein id: supported by cDNA: gi_18175947, supported by cDNA: gi_20465362 thaliana] >gi|18175948|gb|AAL59956.1| putative nitrate
  misc_feature (286)..(517): Homolog of NCBI NO: 25403281 NR Description: protein T7N9.10 [imported] - Arabidopsis thaliana
  misc_feature (3)..(242): Homolog of NCBI NO: 17064754 NR Description: nitrate transporter (NTL1) [Arabidopsis thaliana]
  misc_feature (286)..(517): Homolog of NCBI NO: 17064754 NR Description: nitrate transporter (NTL1) [Arabidopsis thaliana]
  misc_feature (3)..(242): Homolog of NCBI NO: 18409382 NR Description: nitrate transporter (NTL1); protein id: supported by cDNA: gi_17064753, supported by cDNA: gi_3377516 thaliana] >gi|23397158|gb|AAN31862.1| putative nitrate
  misc_feature (3)..(242): Homolog of NCBI NO: 25404844 NR Description: nitrate transporter (NTL1), 53025-56402 - Arabidopsis thaliana >gi|12325224|gb|AAG52554.1|AC010675_2
MEEKFEDWKGKEAIPGKHGGIRAASIVCVVVMMENIVFIANGFNFVKYFMGSMHYTPATAANMVTNFMGTSFLLTLFGGFIADSFVTHFTTFIVFCCIELMGLILLTFQAHNPKLLPEKDKTPSTLQSAILFTGLYAMAIGTGGLKASLPSHGGDQIDRRNPRLISRFFDWLYFSICSGCLLAVTVVLWIEEKKGWIWSFNISVGILATALCIFTVGLPFYRFKRPNGSPLKKIAIVIISAARNRNKSDLDEEMMRGLISIYKNNSHNKLKWIDKATLNKNISETEVEETRTFLGLLPIFGSTIVMSCCVAQLSTFSAQQGMLMNKKLFHSFEIPVPSLTAIPLIFMLLSIPLYEFFGKKISSGNNNRSSSFNLKRIGLGLALSSVSMAVSAIVEAKRKHEVVHNNFRISVLWLVFQYLMLSVSDMLTLGGMLEFFYREAPSNMKSISTALGWCSTALGFFLSTTLVEVTNAVTGRLGHQWLGGEDLNKTRLELFYVLLCVLNTLNLLNYIFWAKRY

SEQ ID NO: 97036 - protein, 486 aa, Arabidopsis thaliana
  peptide (1)..(486): Ceres Seq. ID no. 12735852
  misc_feature (58)..(425): Pfam Name: POT family Pfam Description: POT family
  misc_feature (1)..(486): Homolog of NCBI NO: 15230829 NR Description: nitrate transporter, putative; protein id:
  misc_feature (1)..(486): Homolog of NCBI NO: 15230826 NR Description: nitrate transporter, putative; protein id: [Arabidopsis thaliana] >gi|9294183|dbj|BAB02085.1| nitrate
  misc_feature (1)..(211): Homolog of NCBI NO: 22329803 NR Description: nitrate transporter, putative; protein id: supported by cDNA: gi_18175947, supported by cDNA: gi_20465362 thaliana] >gi|18175948|gb|AAL59956.1| putative nitrate
  misc_feature (1)..(211): Homolog of NCBI NO: 25403281 NR Description: protein T7N9.10 [imported] - Arabidopsis thaliana
  misc_feature (255)..(486): Homolog of NCBI NO: 22329803 NR Description: nitrate transporter, putative; protein id: supported by cDNA: gi_18175947, supported by cDNA: gi_20465362 thaliana] >gi|18175948|gb|AAL59956.1| putative nitrate
  misc_feature (255)..(486): Homolog of NCBI NO: 25403281 NR Description: protein T7N9.10 [imported] - Arabidopsis thaliana
  misc_feature (1)..(211): Homolog of NCBI NO: 17064754 NR Description: nitrate transporter (NTL1) [Arabidopsis thaliana]
  misc_feature (255)..(486): Homolog of NCBI NO: 17064754 NR Description: nitrate transporter (NTL1) [Arabidopsis thaliana]
  misc_feature (1)..(211): Homolog of NCBI NO: 18409382 NR Description: nitrate transporter (NTL1); protein id: supported by cDNA: gi_17064753, supported by cDNA: gi_3377516 thaliana] >gi|23397158|gb|AAN31862.1| putative nitrate
  misc_feature (1)..(211): Homolog of NCBI NO: 25404844 NR Description: nitrate transporter (NTL1), 53025-56402 - Arabidopsis thaliana >gi|12325224|gb|AAG52554.1|AC010675_2
MMENIVFIANGFNFVKYFMGSMHYTPATAANMVTNFMGTSFLLTLFGGFIADSFVTHFTTFIVFCCIELMGLILLTFQAHNPKLLPEKDKTPSTLQSAILFTGLYAMAIGTGGLKASLPSHGGDQIDRRNPRLISRFFDWLYFSICSGCLLAVTVVLWIEEKKGWIWSFNISVGILATALCIFTVGLPFYRFKRPNGSPLKKIAIVIISAARNRNKSDLDEEMMRGLISIYKNNSHNKLKWIDKATLNKNISETEVEETRTFLGLLPIFGSTIVMSCCVAQLSTFSAQQGMLMNKKLFHSFEIPVPSLTAIPLIFMLLSIPLYEFFGKKISSGNNNRSSSFNLKRIGLGLALSSVSMAVSAIVEAKRKHEVVHNNFRISVLWLVFQYLMLSVSDMLTLGGMLEFFYREAPSNMKSISTALGWCSTALGFFLSTTLVEVTNAVTGRLGHQWLGGEDLNKTRLELFYVLLCVLNTLNLLNYIFWAKRY

SEQ ID NO: 97037 - DNA, 2154 bp, Arabidopsis thaliana
  misc_feature (1)..(2154): Ceres Seq. ID no. 12735865
  misc_feature: MA Experiment ID: 20000185 Result: Up-regulated in Transcription
  misc_feature: MA Experiment 20000185 PARAMETER Experiment Name: At_Roots__P Parameter: Age (day) Value: 7 vs. 21
  misc_feature: MA Experiment 20000185 PARAMETER Experiment Name: At_Roots__P Parameter: Organism Value: A. thaliana
  misc_feature: MA Experiment 20000185 PARAMETER Experiment Name: At_Roots__P Parameter: Tissue Value: Roots vs. Whole Plant
  misc_feature: MA Experiment ID: 20000227 Result: Down-regulated in Transcription
  misc_feature: MA Experiment 20000227 PARAMETER Experiment Name: At_Root-Tips-vs-Tops_P Parameter: Tissue Value: Root Tips vs. Root Tops
  misc_feature: MA Experiment ID: 20000439 Result: Up-regulated in Transcription
  misc_feature: MA Experiment 20000439 PARAMETER Experiment Name: At_Roots__P Parameter: Age (day) Value: 14 vs. 21
  misc_feature: MA Experiment 20000439 PARAMETER Experiment Name: At_Roots__P Parameter: Organism Value: A. thaliana
  misc_feature: MA Experiment 20000439 PARAMETER Experiment Name: At_Roots__P Parameter: Tissue Value: Roots vs. Whole Plant
  misc_feature: MA Experiment ID: 20000495 Result: Up-regulated in Transcription
  misc_feature: MA Experiment 20000495 PARAMETER Experiment Name: At_Guard_Cells_P Parameter: Harvest Date Value: 8/2/2002
  misc_feature: MA Experiment 20000495 PARAMETER Experiment Name: At_Guard_Cells_P Parameter: Organism Value: A. thaliana
  misc_feature: MA Experiment 20000495 PARAMETER Experiment Name: At_Guard_Cells_P Parameter: Tissue Value: Guard Cells vs. Leaves
  misc_feature: MA Experiment ID: 20001248 Result: Down-regulated in Transcription
  misc_feature: MA Experiment 20001248 PARAMETER Experiment Name: At_Far-red-induction_P Parameter: Age (day) Value: 7
  misc_feature: MA Experiment 20001248 PARAMETER Experiment Name: At_Far-red-induction_P Parameter: Light Value: Far-red vs. White
  misc_feature: MA Experiment 20001248 PARAMETER Experiment Name: At_Far-red-induction_P Parameter: Organism Value: A. thaliana
  misc_feature: MA Experiment 20001248 PARAMETER Experiment Name: At_Far-red-induction_P Parameter: Plant Line Value: Columbia
  misc_feature: MA Experiment 20001248 PARAMETER Experiment Name: At_Far-red-induction_P Parameter: Timepoint (hr) Value: 4
  misc_feature: MA Experiment 20001248 PARAMETER Experiment Name: At_Far-red-induction_P Parameter: Tissue Value: Whole Plant
atacaaaagaaataaacctcaaactctgcaccttagagattaatactctcaagaaaaacaagttttgattcggacaaagatgttgcaaggaagaagagaagcaaaaaagagttatgctttgttctcttcaactttcttcttcttctttatctgttttctttcttcttcttctgcagaactcacagacaaaggtgttaactttgaagttgttgccttaataggaatcaaaagctcactgactgatcctcatggagttctaatgaattgggatgacacagcagttgatccatgtagctggaacatgatcacttgttctgatggttttgtcataaggctagaagctccaagccaaaacttatcaggaactctttcatcaagtattggaaatttaacaaatcttcaaactgtgttattgcagaacaattacataacaggaaacatccctcatgagattgggaaattgatgaaactcaaaacacttgatctctctaccaataacttcactggtcaaatcccattcactctttcttactccaaaaatcttcagtacttgagggttaataataacagcctgacaggaacaattcctagctcattggcaaacatgacccaactcacttttttggatttgtcgtataataacttgagtggaccagttccaagatcacttgccaaaacattcaatgttatgggcaattctcagatttgtccaacaggaactgagaaagactgtaatgggactcagcctaagccaatgtcaatcaccttgaacagttctcaaaataaatcatctgatggaggaactaaaaaccggaaaatcgcggtagtcttcggtgtaagcttgacatgtgtttgcttgttgatcattggctttggttttcttctttggtggagaagaagacataacaaacaagtattattctttgacattaatgagcaaaacaaggaagaaatgtgtctagggaatctaaggaggtttaatttcaaagaacttcaatccgcaactagtaacttcagcagcaagaatctggtcggaaaaggagggtttggaaatgtgtataaaggttgtcttcatgatggaagtatcatcgcggtgaagagattaaaggatataaacaatggtggtggagaggttcagtttcagacagagcttgaaatgataagccttgccgtccaccggaatctcctccgcttatacggtttctgtactacttcctctgaacggcttctcgtttatccttacatgtccaatggcagtgtcgcttctcgtctcaaagctaaaccggtattggattggggcacaagaaagcgaatagcattaggagcaggaagagggttgctgtatttgcatgagcaatgtgatccaaagatcattcaccgtgatgtcaaagctgcgaacatacttcttgacgattactttgaagctgttgtcggagatttcgggttggctaagcttttggatcatgaggagtcgcatgtgacaaccgccgtgagaggaacagtgggtcacattgcacctgagtatctctcaacaggacaatcttctgagaagacagatgtgttcggtttcgggattcttcttctcgaattgattactggattgagagctcttgaattcggaaaagcagcaaaccaaagaggagcgatacttgattgggtaaagaaactacaacaagagaagaagctagaacagatagtagacaaggatttgaagagcaactacgatagaatagaagtggaagaaatggttcaagtggctttgctttgtacacagtatcttcccattcaccgtcctaagatgtctgaagttgtgagaatgcttgaaggcgatggtcttgttgagaaatgggaagcttcttctcagagagcagaaaccaatagaagttacagtaaacctaacgagttttcttcctctgaacgttattcggatcttacagatgattcctcggtgctggttcaagccatggagttatcaggtccaagatgacaagagaaactatatgaatggctttgggtttgtaaaaaacatatataagattgtgtattttgttgtatgctgtgatcttgtacaggttttggtatcagaaagacatattctcatgctttatcccatgattaggaggaggtggaatcaccgcctccatttcgtagaaa

SEQ ID NO: 97038 - protein, 635 aa, Arabidopsis thaliana
  peptide (1)..(635): Ceres Seq. ID no. 12735866
  misc_feature (312)..(507): Pfam Name: Protein kinase domain Pfam Description: Protein kinase domain
  misc_feature (14)..(635): Homolog of NCBI NO: 21593619 NR Description: receptor protein kinase-like protein [Arabidopsis
  misc_feature (14)..(635): Homolog of NCBI NO: 15237242 NR Description: receptor protein kinase-like protein; protein id:
  misc_feature (19)..(635): Homolog of NCBI NO: 11862956 NR Description: putative protein kinase [Oryza sativa (japonica
  misc_feature (20)..(635): Homolog of NCBI NO: 15219817 NR Description: receptor-like kinase, putative; protein id: [Arabidopsis thaliana] >gi|15810511|gb|AAL07143.1| putative kinase [Arabidopsis thaliana] >gi|23297726|gb|AAN12912.1|
  misc_feature (19)..(593): Homolog of NCBI NO: 22329033 NR Description: receptor-like kinase homolog; protein id: supported by cDNA: gi_17979064, supported by cDNA: gi_20465456 thaliana] >gi|17979065|gb|AAL49800.1| putative receptor kinase
  misc_feature (88)..(635): Homolog of NCBI NO: 15224077 NR Description: putative LRR receptor protein kinase; protein id:
  misc_feature (294)..(593): Homolog of NCBI NO: 25407653 NR Description: receptor-like kinase homolog [imported] -
  misc_feature (19)..(170): Homolog of NCBI NO: 25407653 NR Description: receptor-like kinase homolog [imported] -
  misc_feature (40)..(635): Homolog of NCBI NO: 13897308 NR Description: SERK1 protein [Zea mays]
  misc_feature (117)..(240): Homolog of NCBI NO: 25407653 NR Description: receptor-like kinase homolog [imported] -
MLQGRREAKKSYALFSSTFFFFFICFLSSSSAELTDKGVNFEVVALIGIKSSLTDPHGVLMNWDDTAVDPCSWNMITCSDGFVIRLEAPSQNLSGTLSSSIGNLTNLQTVLLQNNYITGNIPHEIGKLMKLKTLDLSTNNFTGQIPFTLSYSKNLQYLRVNNNSLTGTIPSSLANMTQLTFLDLSYNNLSGPVPRSLAKTFNVMGNSQICPTGTEKDCNGTQPKPMSITLNSSQNKSSDGGTKNRKIAVVFGVSLTCVCLLIIGFGFLLWWRRRHNKQVLFFDINEQNKEEMCLGNLRRFNFKELQSATSNFSSKNLVGKGGFGNVYKGCLHDGSIIAVKRLKDINNGGGEVQFQTELEMISLAVHRNLLRLYGFCTTSSERLLVYPYMSNGSVASRLKAKPVLDWGTRKRIALGAGRGLLYLHEQCDPKIIHRDVKAANILLDDYFEAVVGDFGLAKLLDHEESHVTTAVRGTVGHIAPEYLSTGQSSEKTDVFGFGILLLELITGLRALEFGKAANQRGAILDWVKKLQQEKKLEQIVDKDLKSNYDRIEVEEMVQVALLCTQYLPIHRPKMSEVVRMLEGDGLVEKWEASSQRAETNRSYSKPNEFSSSERYSDLTDDSSVLVQAMELSGPR

SEQ ID NO: 97039 - protein, 575 aa, Arabidopsis thaliana
  peptide (1)..(575): Ceres Seq. ID no. 12735867
  misc_feature (252)..(447): Pfam Name: Protein kinase domain Pfam Description: Protein kinase domain
  misc_feature (1)..(575): Homolog of NCBI NO: 21593619 NR Description: receptor protein kinase-like protein [Arabidopsis
  misc_feature (1)..(575): Homolog of NCBI NO: 15237242 NR Description: receptor protein kinase-like protein; protein id:
  misc_feature (1)..(575): Homolog of NCBI NO: 11862956 NR Description: putative protein kinase [Oryza sativa (japonica
  misc_feature (1)..(575): Homolog of NCBI NO: 15219817 NR Description: receptor-like kinase, putative; protein id: [Arabidopsis thaliana] >gi|15810511|gb|AAL07143.1| putative kinase [Arabidopsis thaliana] >gi|23297726|gb|AAN12912.1|
  misc_feature (1)..(533): Homolog of NCBI NO: 22329033 NR Description: receptor-like kinase homolog; protein id: supported by cDNA: gi_17979064, supported by cDNA: gi_20465456 thaliana] >gi|17979065|gb|AAL49800.1| putative receptor kinase
  misc_feature (28)..(575): Homolog of NCBI NO: 15224077 NR Description: putative LRR receptor protein kinase; protein id:
  misc_feature (234)..(533): Homolog of NCBI NO: 25407653 NR Description: receptor-like kinase homolog [imported] -
  misc_feature (1)..(110): Homolog of NCBI NO: 25407653 NR Description: receptor-like kinase homolog [imported] -
  misc_feature (1)..(575): Homolog of NCBI NO: 13897308 NR Description: SERK1 protein [Zea mays]
  misc_feature (57)..(180): Homolog of NCBI NO: 25407653 NR Description: receptor-like kinase homolog [imported] -
MNWDDTAVDPCSWNMITCSDGFVIRLEAPSQNLSGTLSSSIGNLTNLQTVLLQNNYITGNIPHEIGKLMKLKTLDLSTNNFTGQIPFTLSYSKNLQYLRVNNNSLTGTIPSSLANMTQLTFLDLSYNNLSGPVPRSLAKTFNVMGNSQICPTGTEKDCNGTQPKPMSITLNSSQNKSSDGGTKNRKIAVVFGVSLTCVCLLIIGFGFLLWWRRRHNKQVLFFDINEQNKEEMCLGNLRRFNFKELQSATSNFSSKNLVGKGGFGNVYKGCLHDGSIIAVKRLKDINNGGGEVQFQTELEMISLAVHRNLLRLYGFCTTSSERLLVYPYMSNGSVASRLKAKPVLDWGTRKRIALGAGRGLLYLHEQCDPKIIHRDVKAANILLDDYFEAVVGDFGLAKLLDHEESHVTTAVRGTVGHIAPEYLSTGQSSEKTDVFGFGILLLELITGLRALEFGKAANQRGAILDWVKKLQQEKKLEQIVDKDLKSNYDRIEVEEMVQVALLCTQYLPIHRPKMSEVVRMLEGDGLVEKWEASSQRAETNRSYSKPNEFSSSERYSDLTDDSSVLVQAMELSGPR

SEQ ID NO: 97040 - protein, 561 aa, Arabidopsis thaliana
  peptide (1)..(561): Ceres Seq. ID no. 12735868
  misc_feature (238)..(433): Pfam Name: Protein kinase domain Pfam Description: Protein kinase domain
  misc_feature (1)..(561): Homolog of NCBI NO: 21593619 NR Description: receptor protein kinase-like protein [Arabidopsis
  misc_feature (1)..(561): Homolog of NCBI NO: 15237242 NR Description: receptor protein kinase-like protein; protein id:
  misc_feature (1)..(561): Homolog of NCBI NO: 11862956 NR Description: putative protein kinase [Oryza sativa (japonica
  misc_feature (1)..(561): Homolog of NCBI NO: 15219817 NR Description: receptor-like kinase, putative; protein id: [Arabidopsis thaliana] >gi|15810511|gb|AAL07143.1| putative kinase [Arabidopsis thaliana] >gi|23297726|gb|AAN12912.1|
  misc_feature (1)..(519): Homolog of NCBI NO: 22329033 NR Description: receptor-like kinase homolog; protein id: supported by cDNA: gi_17979064, supported by cDNA: gi_20465456 thaliana] >gi|17979065|gb|AAL49800.1| putative receptor kinase
  misc_feature (14)..(561): Homolog of NCBI NO: 15224077 NR Description: putative LRR receptor protein kinase; protein id:
  misc_feature (220)..(519): Homolog of NCBI NO: 25407653 NR Description: receptor-like kinase homolog [imported] -
  misc_feature (1)..(96): Homolog of NCBI NO: 25407653 NR Description: receptor-like kinase homolog [imported] -
  misc_feature (1)..(561): Homolog of NCBI NO: 13897308 NR Description: SERK1 protein [Zea mays]
  misc_feature (43)..(166): Homolog of NCBI NO: 25407653 NR Description: receptor-like kinase homolog [imported] -
MITCSDGFVIRLEAPSQNLSGTLSSSIGNLTNLQTVLLQNNYITGNIPHEIGKLMKLKTLDLSTNNFTGQIPFTLSYSKNLQYLRVNNNSLTGTIPSSLANMTQLTFLDLSYNNLSGPVPRSLAKTFNVMGNSQICPTGTEKDCNGTQPKPMSITLNSSQNKSSDGGTKNRKIAVVFGVSLTCVCLLIIGFGFLLWWRRRHNKQVLFFDINEQNKEEMCLGNLRRFNFKELQSATSNFSSKNLVGKGGFGNVYKGCLHDGSIIAVKRLKDINNGGGEVQFQTELEMISLAVHRNLLRLYGFCTTSSERLLVYPYMSNGSVASRLKAKPVLDWGTRKRIALGAGRGLLYLHEQCDPKIIHRDVKAANILLDDYFEAVVGDFGLAKLLDHEESHVTTAVRGTVGHIAPEYLSTGQSSEKTDVFGFGILLLELITGLRALEFGKAANQRGAILDWVKKLQQEKKLEQIVDKDLKSNYDRIEVEEMVQVALLCTQYLPIHRPKMSEVVRMLEGDGLVEKWEASSQRAETNRSYSKPNEFSSSERYSDLTDDSSVLVQAMELSGPR

SEQ ID NO: 97041 - DNA, 1050 bp, Arabidopsis thaliana
  misc_feature (1)..(1050): Ceres Seq. ID no. 12735869
  misc_feature: MA Experiment ID: 20000227 Result: Down-regulated in Transcription
  misc_feature: MA Experiment 20000227 PARAMETER Experiment Name: At_Root-Tips-vs-Tops_P Parameter: Tissue Value: Root Tips vs. Root Tops
  misc_feature: MA Experiment ID: 20000264 Result: Up-regulated in Transcription
  misc_feature: MA Experiment 20000264 PARAMETER Experiment Name: At_Open_Flower_P Parameter: Age (day) Value: 21
  misc_feature: MA Experiment 20000264 PARAMETER Experiment Name: At_Open_Flower_P Parameter: Plant Line Value: WS
  misc_feature: MA Experiment 20000264 PARAMETER Experiment Name: At_Open_Flower_P Parameter: Tissue Value: Open Flower vs. Whole Plant
  misc_feature: MA Experiment ID: 20000794 Result: Up-regulated in Transcription
  misc_feature: MA Experiment 20000794 PARAMETER Experiment Name: At_Petals_P Parameter: Age (day) Value: 23-25 days
  misc_feature: MA Experiment 20000794 PARAMETER Experiment Name: At_Petals_P Parameter: Plant Line Value: WS
  misc_feature: MA Experiment 20000794 PARAMETER Experiment Name: At_Petals_P Parameter: Tissue Value: Petals vs. Whole plant
  misc_feature: MA Experiment ID: 20001248 Result: Down-regulated in Transcription
  misc_feature: MA Experiment 20001248 PARAMETER Experiment Name: At_Far-red-induction_P Parameter: Age (day) Value: 7
  misc_feature: MA Experiment 20001248 PARAMETER Experiment Name: At_Far-red-induction_P Parameter: Light Value: Far-red vs. White
  misc_feature: MA Experiment 20001248 PARAMETER Experiment Name: At_Far-red-induction_P Parameter: Organism Value: A. thaliana
  misc_feature: MA Experiment 20001248 PARAMETER Experiment Name: At_Far-red-induction_P Parameter: Plant Line Value: Columbia
  misc_feature: MA Experiment 20001248 PARAMETER Experiment Name: At_Far-red-induction_P Parameter: Timepoint (hr) Value: 4
  misc_feature: MA Experiment 20001248 PARAMETER Experiment Name: At_Far-red-induction_P Parameter: Tissue Value: Whole Plant
  misc_feature: MA Experiment ID: 20001450 Result: Down-regulated in Transcription
  misc_feature: MA Experiment 20001450 PARAMETER Experiment Name: At_Far-red-induction_P Parameter: Age (day) Value: 7
  misc_feature: MA Experiment 20001450 PARAMETER Experiment Name: At_Far-red-induction_P Parameter: Light Value: Far-red vs. White
  misc_feature: MA Experiment 20001450 PARAMETER Experiment Name: At_Far-red-induction_P Parameter: Organism Value: A. thaliana
  misc_feature: MA Experiment 20001450 PARAMETER Experiment Name: At_Far-red-induction_P Parameter: Plant Line Value: Columbia
  misc_feature: MA Experiment 20001450 PARAMETER Experiment Name: At_Far-red-induction_P Parameter: Timepoint (hr) Value: 8
  misc_feature: MA Experiment 20001450 PARAMETER Experiment Name: At_Far-red-induction_P Parameter: Tissue Value: Whole Plant
  misc_feature: MA Experiment ID: 20001905 Result: Up-regulated in Transcription
  misc_feature: MA Experiment 20001905 PARAMETER Experiment Name: At_Drought_Reproduction_P Parameter: Age (day) Value: 40
  misc_feature: MA Experiment 20001905 PARAMETER Experiment Name: At_Drought_Reproduction_P Parameter: Organism Value: A. thaliana
  misc_feature: MA Experiment 20001905 PARAMETER Experiment Name: At_Drought_Reproduction_P Parameter: Plant Line Value: WS
  misc_feature: MA Experiment 20001905 PARAMETER Experiment Name: At_Drought_Reproduction_P Parameter: Timepoint (day) Value: 10
  misc_feature: MA Experiment 20001905 PARAMETER Experiment Name: At_Drought_Reproduction_P Parameter: Tissue Value: Rosettes
  misc_feature: MA Experiment 20001905 PARAMETER Experiment Name: At_Drought_Reproduction_P Parameter: Treatment Value: Drought vs. No Drought
atggcggtctctgctacaggtttcgaaggatttgagaaaaggctcgaaatctcattctttgagactactgactttcttgatccccaaggaaagagtcttcgttctcttaccaaatcccagttagatgagatcttgactccagcagagtgcacaattgtttcctctctcacaaactctttcgttgactcttacgtgctctctgaatctagtctctttgtttatccttacaagatcatcatcaaaacatgcgggactactaagcttctcttgtcgatcccgcatatccttaggctggctgattcactttgcctcactgtcaaatctgttcgctacactcgtggtagctttatttttccgggagctcaatcttaccctcaccgtagcttctcagaggaagttgctttacttgatgactattttggtaagctcaatgcaggaagcaaagcttttgtgatgggaggttcagataataaccctcagagatggcatgtttactctgcttcttctactgaagaatctgcggtttgcgataaacccgtgtacacattggagatgtgtatgactggtctagacaatataaaagcttcggtgttctttaaaaccaactctgtttcagcttctgagatgactattagctctgggatcagaaacatccttccaggctctgaaatctgtgattttaactttgaaccgtgcggttactcgatgaattcgattgaaggggatgcggtttctaccatccatgtgaccccggaagatggttttagctatgcaagctttgaaacagttggttatgatctaaaggctttgaactttaaggagttggtggatagggttctggtttgttttggaccggaagaattttctgtagcggtgcatgctaatcttggaaccgaggtattggcgtctgattgtgtagctgatgtgaacggatactttagccaagagagagaactagaggagcttggacttggaggttcggttctataccagagatttgtcaagactgttgaatgttgctcaccaaaatctactcttgggttctgttag

SEQ ID NO: 97042 - protein, 349 aa, Arabidopsis thaliana
  peptide (1)..(349): Ceres Seq. ID no. 12735870
  misc_feature (3)..(337): Pfam Name: Adenosylmethionine decarboxylase Pfam Description: Adenosylmethionine decarboxylase
  misc_feature (1)..(349): Homolog of NCBI NO: 15230853 NR Description: S-adenosylmethionine decarboxylase, putative;
  misc_feature (1)..(346): Homolog of NCBI NO: 15213963 NR Description: S-adenosylmethionine decarboxylase proenzyme
  misc_feature (1)..(349): Homolog of NCBI NO: 27597158 NR Description: S-adenosylmethionine decarboxylase [Malus x
  misc_feature (1)..(346): Homolog of NCBI NO: 3913420 NR Description: S-adenosylmethionine decarboxylase proenzyme
MAVSATGFEGFEKRLEISFFETTDFLDPQGKSLRSLTKSQLDEILTPAECTIVSSLTNSFVDSYVLSESSLFVYPYKIIIKTCGTTKLLLSIPHILRLADSLCLTVKSVRYTRGSFIFPGAQSYPHRSFSEEVALLDDYFGKLNAGSKAFVMGGSDNNPQRWHVYSASSTEESAVCDKPVYTLEMCMTGLDNIKASVFFKTNSVSASEMTISSGIRNILPGSEICDFNFEPCGYSMNSIEGDAVSTIHVTPEDGFSYASFETVGYDLKALNFKELVDRVLVCFGPEEFSVAVHANLGTEVLASDCVADVNGYFSQERELEELGLGGSVLYQRFVKTVECCSPKSTLGFC

SEQ ID NO: 97043 - protein, 198 aa, Arabidopsis thaliana
  peptide (1)..(198): Ceres Seq. ID no. 12735871
  misc_feature (1)..(186): Pfam Name: Adenosylmethionine decarboxylase Pfam Description: Adenosylmethionine decarboxylase
  misc_feature (1)..(198): Homolog of NCBI NO: 15230853 NR Description: S-adenosylmethionine decarboxylase, putative;
  misc_feature (1)..(195): Homolog of NCBI NO: 15213963 NR Description: S-adenosylmethionine decarboxylase proenzyme
  misc_feature (1)..(198): Homolog of NCBI NO: 27597158 NR Description: S-adenosylmethionine decarboxylase [Malus x
  misc_feature (1)..(195): Homolog of NCBI NO: 3913420 NR Description: S-adenosylmethionine decarboxylase proenzyme
MGGSDNNPQRWHVYSASSTEESAVCDKPVYTLEMCMTGLDNIKASVFFKTNSVSASEMTISSGIRNILPGSEICDFNFEPCGYSMNSIEGDAVSTIHVTPEDGFSYASFETVGYDLKALNFKELVDRVLVCFGPEEFSVAVHANLGTEVLASDCVADVNGYFSQERELEELGLGGSVLYQRFVKTVECCSPKSTLGFC

SEQ ID NO: 97044 - DNA, 1428 bp, Arabidopsis thaliana
  misc_feature (1)..(1428): Ceres Seq. ID no. 12735878
  misc_feature: MA Experiment ID: 20000184 Result: Up-regulated in Transcription
  misc_feature: MA Experiment 20000184 PARAMETER Experiment Name: At_Shoots__P Parameter: Age (day) Value: 7
  misc_feature: MA Experiment 20000184 PARAMETER Experiment Name: At_Shoots__P Parameter: Tissue Value: Shoots vs. Whole Plant
atgtcttggattcatttggttttattcctttgtctaactctcctgtgttgcgttactggagaattatcaccggaaggcactgatgatggagctccgatggagaaaacagaacaagaagctctttactcagctattcaagggtttgttggtgattcttggaatggttctgatctttatcctgatccttgtggttggactcctattcagggtgtttcttgtgatctttatggtgacttgtggtatgtcacggatctaaccctaggtcttgttcatgaaaactcactttcttgcgccacaagtttggagataaagccacagttattcaagctcaagcacttgaaatcactcacgttcttcaactgcttcacgtcgccgataagaatacctaaagaggattggataaacttggcaagtaacttagaatcactcgagtttagatccaatcctggtttgattggtgaacttcctgaaacaattggaagtctcacaaagctgaagtctttggtggttcttgaaaacgggtttaacgggaagttaccgacgagaatctgcaatttaactaggttaaagcggttggttctggcgggaaacttgttcactgggacgattccggattgtttcaacgggtttaaggatctactgatcttggatatgagtcggaactcattctcagggatattgcctttgtctgttggagagatggtttcattgcttaagcttgacctaagcaataaccaattagaagggaggttgcctcaagaaatcgggtttttgaagaatctgacacttttggatctaaggaacaacagaatctctggagggttgttcgaaaacatcgaaaagattccatctctaacggatcttgttttatcagggaacccaatgggcagtgatgacatgatgggaataaagtgggagaatatgggcaatttggtcattttggatctgtcaaagatgggtttaagaggtgaggttcctttaggtttaacaagtttgagaagattgaggtttcttggtctcaacgacaacaacttgaccggcactgtcccatcaaaagagctcgagacattgccttgtcttggtgctctatacatcaatggaaacaatctatcaggagagctaagattctcaagaaagttctatgagaagatgggaacaaggtttaaggcttcaaagaatccaaatctttgtcaggatgttgtgtcagaatctcggcaatatgttgttggattgaagtcttgcatgatggagaaggcagaggatagtttggtaattaaacaaacttggagcaaccttaagaaggaggatgagtcaagttcatcaatgggtgtgatggttactagacatgtgttgttgtcaaatgggttcatgtgggatttgcttttggagctttctcttatattattattgaatttgttagtttgttaa

SEQ ID NO: 97045 - protein, 475 aa, Arabidopsis thaliana
  peptide (1)..(475): Ceres Seq. ID no. 12735879
  misc_feature (1)..(475): Homolog of NCBI NO: 15230865 NR Description: leucine rich repeat protein family; protein id:
  misc_feature (33)..(475): Homolog of NCBI NO: 11994758 NR Description: contains similarity to elicitor-inducible
  misc_feature (33)..(414): Homolog of NCBI NO: 15222215 NR Description: leucine rich repeat protein family; protein id:
  misc_feature (5)..(420): Homolog of NCBI NO: 18409119 NR Description: leucine rich repeat protein family; protein id: supported by cDNA: gi_13605580 [Arabidopsis thaliana]
  misc_feature (16)..(397): Homolog of NCBI NO: 34894182 NR Description: P0439B06.12 [Oryza sativa (japonica
  misc_feature (6)..(396): Homolog of NCBI NO: 7487680 NR Description: hypothetical protein T5F17.10 - Arabidopsis
  misc_feature (6)..(396): Homolog of NCBI NO: 15236148 NR Description: leucine rich repeat protein family (fragment);
  misc_feature (27)..(397): Homolog of NCBI NO: 15220050 NR Description: leucine rich repeat protein family; protein id: [Arabidopsis thaliana] >gi|22096215|sp|Q9SSD1|TMM_ARATH TOO MANY protein precursor (TMM) >gi|25406630|pir||C96832
  misc_feature (27)..(397): Homolog of NCBI NO: 26452151 NR Description: GPI-anchored protein [Arabidopsis thaliana]
  misc_feature (31)..(414): Homolog of NCBI NO: 34910824 NR Description: putative Hcr2-0B [Oryza sativa (japonica
MSWIHLVLFLCLTLLCCVTGELSPEGTDDGAPMEKTEQEALYSAIQGFVGDSWNGSDLYPDPCGWTPIQGVSCDLYGDLWYVTDLTLGLVHENSLSCATSLEIKPQLFKLKHLKSLTFFNCFTSPIRIPKEDWINLASNLESLEFRSNPGLIGELPETIGSLTKLKSLVVLENGFNGKLPTRICNLTRLKRLVLAGNLFTGTIPDCFNGFKDLLILDMSRNSFSGILPLSVGEMVSLLKLDLSNNQLEGRLPQEIGFLKNLTLLDLRNNRISGGLFENIEKIPSLTDLVLSGNPMGSDDMMGIKWENMGNLVILDLSKMGLRGEVPLGLTSLRRLRFLGLNDNNLTGTVPSKELETLPCLGALYINGNNLSGELRFSRKFYEKMGTRFKASKNPNLCQDVVSESRQYVVGLKSCMMEKAEDSLVIKQTWSNLKKEDESSSSMGVMVTRHVLLSNGFMWDLLLELSLILLLNLLVC

SEQ ID NO: 97046 - protein, 443 aa, Arabidopsis thaliana
  peptide (1)..(443): Ceres Seq. ID no. 12735880
  misc_feature (1)..(443): Homolog of NCBI NO: 15230865 NR Description: leucine rich repeat protein family; protein id:
  misc_feature (1)..(443): Homolog of NCBI NO: 11994758 NR Description: contains similarity to elicitor-inducible
  misc_feature (1)..(382): Homolog of NCBI NO: 15222215 NR Description: leucine rich repeat protein family; protein id:
  misc_feature (1)..(388): Homolog of NCBI NO: 18409119 NR Description: leucine rich repeat protein family; protein id: supported by cDNA: gi_13605580 [Arabidopsis thaliana]
  misc_feature (1)..(365): Homolog of NCBI NO: 34894182 NR Description: P0439B06.12 [Oryza sativa (japonica
  misc_feature (1)..(364): Homolog of NCBI NO: 7487680 NR Description: hypothetical protein T5F17.10 - Arabidopsis
  misc_feature (1)..(364): Homolog of NCBI NO: 15236148 NR Description: leucine rich repeat protein family (fragment);
  misc_feature (1)..(365): Homolog of NCBI NO: 15220050 NR Description: leucine rich repeat protein family; protein id: [Arabidopsis thaliana] >gi|22096215|sp|Q9SSD1|TMM_ARATH TOO MANY protein precursor (TMM) >gi|25406630|pir||C96832
  misc_feature (1)..(365): Homolog of NCBI NO: 26452151 NR Description: GPI-anchored protein [Arabidopsis thaliana]
  misc_feature (1)..(382): Homolog of NCBI NO: 34910824 NR Description: putative Hcr2-0B [Oryza sativa (japonica
MEKTEQEALYSAIQGFVGDSWNGSDLYPDPCGWTPIQGVSCDLYGDLWYVTDLTLGLVHENSLSCATSLEIKPQLFKLKHLKSLTFFNCFTSPIRIPKEDWINLASNLESLEFRSNPGLIGELPETIGSLTKLKSLVVLENGFNGKLPTRICNLTRLKRLVLAGNLFTGTIPDCFNGFKDLLILDMSRNSFSGILPLSVGEMVSLLKLDLSNNQLEGRLPQEIGFLKNLTLLDLRNNRISGGLFENIEKIPSLTDLVLSGNPMGSDDMMGIKWENMGNLVILDLSKMGLRGEVPLGLTSLRRLRFLGLNDNNLTGTVPSKELETLPCLGALYINGNNLSGELRFSRKFYEKMGTRFKASKNPNLCQDVVSESRQYVVGLKSCMMEKAEDSLVIKQTWSNLKKEDESSSSMGVMVTRHVLLSNGFMWDLLLELSLILLLNLLVC

SEQ ID NO: 97047 - protein, 258 aa, Arabidopsis thaliana
  peptide (1)..(258): Ceres Seq. ID no. 12735881
  misc_feature (1)..(258): Homolog of NCBI NO: 15230865 NR Description: leucine rich repeat protein family; protein id:
  misc_feature (1)..(258): Homolog of NCBI NO: 11994758 NR Description: contains similarity to elicitor-inducible
  misc_feature (1)..(197): Homolog of NCBI NO: 15222215 NR Description: leucine rich repeat protein family; protein id:
  misc_feature (1)..(203): Homolog of NCBI NO: 18409119 NR Description: leucine rich repeat protein family; protein id: supported by cDNA: gi_13605580 [Arabidopsis thaliana]
  misc_feature (1)..(180): Homolog of NCBI NO: 34894182 NR Description: P0439B06.12 [Oryza sativa (japonica
  misc_feature (1)..(179): Homolog of NCBI NO: 7487680 NR Description: hypothetical protein T5F17.10 - Arabidopsis
  misc_feature (1)..(179): Homolog of NCBI NO: 15236148 NR Description: leucine rich repeat protein family (fragment);
  misc_feature (1)..(180): Homolog of NCBI NO: 15220050 NR Description: leucine rich repeat protein family; protein id: [Arabidopsis thaliana] >gi|22096215|sp|Q9SSD1|TMM_ARATH TOO MANY protein precursor (TMM) >gi|25406630|pir||C96832
  misc_feature (1)..(180): Homolog of NCBI NO: 26452151 NR Description: GPI-anchored protein [Arabidopsis thaliana]
  misc_feature (1)..(197): Homolog of NCBI NO: 34910824 NR Description: putative Hcr2-0B [Oryza sativa (japonica
MSRNSFSGILPLSVGEMVSLLKLDLSNNQLEGRLPQEIGFLKNLTLLDLRNNRISGGLFENIEKIPSLTDLVLSGNPMGSDDMMGIKWENMGNLVILDLSKMGLRGEVPLGLTSLRRLRFLGLNDNNLTGTVPSKELETLPCLGALYINGNNLSGELRFSRKFYEKMGTRFKASKNPNLCQDVVSESRQYVVGLKSCMMEKAEDSLVIKQTWSNLKKEDESSSSMGVMVTRHVLLSNGFMWDLLLELSLILLLNLLVC

SEQ ID NO: 97048 - DNA, 903 bp, Arabidopsis thaliana
  misc_feature (1)..(903): Ceres Seq. ID no. 12735888
  misc_feature: MA Experiment ID: 20000173 Result: Down-regulated in Transcription
  misc_feature: MA Experiment 20000173 PARAMETER Experiment Name: At_42deg_Heat_P Parameter: Age (day) Value: 14
  misc_feature: MA Experiment 20000173 PARAMETER Experiment Name: At_42deg_Heat_P Parameter: Organism Value: A. thaliana
  misc_feature: MA Experiment 20000173 PARAMETER Experiment Name: At_42deg_Heat_P Parameter: Plant Line Value: WS
  misc_feature: MA Experiment 20000173 PARAMETER Experiment Name: At_42deg_Heat_P Parameter: Temperature (deg C) Value: 42 vs. 22
  misc_feature: MA Experiment 20000173 PARAMETER Experiment Name: At_42deg_Heat_P Parameter: Timepoint (hr) Value: 6
  misc_feature: MA Experiment 20000173 PARAMETER Experiment Name: At_42deg_Heat_P Parameter: Tissue Value: Aerial
  misc_feature: MA Experiment ID: 20000182 Result: Up-regulated in Transcription
  misc_feature: MA Experiment 20000182 PARAMETER Experiment Name: At_2mM_SA_P Parameter: Age (day) Value: 14
  misc_feature: MA Experiment 20000182 PARAMETER Experiment Name: At_2mM_SA_P Parameter: Organism Value: A. thaliana
  misc_feature: MA Experiment 20000182 PARAMETER Experiment Name: At_2mM_SA_P Parameter: Plant Line Value: WS
  misc_feature: MA Experiment 20000182 PARAMETER Experiment Name: At_2mM_SA_P Parameter: Timepoint (hr) Value: 6
  misc_feature: MA Experiment 20000182 PARAMETER Experiment Name: At_2mM_SA_P Parameter: Tissue Value: Aerial
  misc_feature: MA Experiment 20000182 PARAMETER Experiment Name: At_2mM_SA_P Parameter: Treatment Value: 2mM SA vs. No Treatment
  misc_feature: MA Experiment ID: 20000211 Result: Up-regulated in Transcription
  misc_feature: MA Experiment 20000211 PARAMETER Experiment Name: At_0.001percent_MeJA__P Parameter: Age (day) Value: 14
  misc_feature: MA Experiment 20000211 PARAMETER Experiment Name: At_0.001percent_MeJA__P Parameter: Organism Value: A. thaliana
  misc_feature: MA Experiment 20000211 PARAMETER Experiment Name: At_0.001percent_MeJA__P Parameter: Plant Line Value: WS
  misc_feature: MA Experiment 20000211 PARAMETER Experiment Name: At_0.001percent_MeJA__P Parameter: Timepoint (hr) Value: 1
  misc_feature: MA Experiment 20000211 PARAMETER Experiment Name: At_0.001percent_MeJA__P Parameter: Tissue Value: Aerial
  misc_feature: MA Experiment 20000211 PARAMETER Experiment Name: At_0.001percent_MeJA__P Parameter: Treatment Value: 0.001percent MeJA vs. No Treatment
  misc_feature: MA Experiment ID: 20000213 Result: Up-regulated in Transcription
  misc_feature: MA Experiment 20000213 PARAMETER Experiment Name: At_4deg_Cold_P Parameter: Timepoint (hr) Value: 2
  misc_feature: MA Experiment ID: 20000264 Result: Down-regulated in Transcription
  misc_feature: MA Experiment 20000264 PARAMETER Experiment Name: At_Open_Flower_P Parameter: Age (day) Value: 21
  misc_feature: MA Experiment 20000264 PARAMETER Experiment Name: At_Open_Flower_P Parameter: Plant Line Value: WS
  misc_feature: MA Experiment 20000264 PARAMETER Experiment Name: At_Open_Flower_P Parameter: Tissue Value: Open Flower vs. Whole Plant
  misc_feature: MA Experiment ID: 20000265 Result: Down-regulated in Transcription
  misc_feature: MA Experiment 20000265 PARAMETER Experiment Name: At_Open_Flower_P Parameter: Age (day) Value: 21
  misc_feature: MA Experiment 20000265 PARAMETER Experiment Name: At_Open_Flower_P Parameter: Plant Line Value: WS
  misc_feature: MA Experiment 20000265 PARAMETER Experiment Name: At_Open_Flower_P Parameter: Tissue Value: Closed Flower vs. Whole Plant
  misc_feature: MA Experiment ID: 20000267 Result: Up-regulated in Transcription
  misc_feature: MA Experiment 20000267 PARAMETER Experiment Name: At_Drought_P Parameter: Age (day) Value: 7
  misc_feature: MA Experiment 20000267 PARAMETER Experiment Name: At_Drought_P Parameter: Organism Value: A. thaliana
  misc_feature: MA Experiment 20000267 PARAMETER Experiment Name: At_Drought_P Parameter: Plant Line Value: WS
  misc_feature: MA Experiment 20000267 PARAMETER Experiment Name: At_Drought_P Parameter: Timepoint (hr) Value: 6
  misc_feature: MA Experiment 20000267 PARAMETER Experiment Name: At_Drought_P Parameter: Tissue Value: Whole Plant
  misc_feature: MA Experiment 20000267 PARAMETER Experiment Name: At_Drought_P Parameter: Treatment Value: Drought vs. No Drought
  misc_feature: MA Experiment ID: 20000286 Result: Down-regulated in Transcription
  misc_feature: MA Experiment 20000286 PARAMETER Experiment Name: At_Open_Flower_P Parameter: Age (day) Value: 21
  misc_feature: MA Experiment 20000286 PARAMETER Experiment Name: At_Open_Flower_P Parameter: Plant Line Value: WS
  misc_feature: MA Experiment 20000286 PARAMETER Experiment Name: At_Open_Flower_P Parameter: Tissue Value: Half Open vs. Whole Plant
  misc_feature: MA Experiment ID: 20000439 Result: Down-regulated in Transcription
  misc_feature: MA Experiment 20000439 PARAMETER Experiment Name: At_Roots__P Parameter: Age (day) Value: 14 vs. 21
  misc_feature: MA Experiment 20000439 PARAMETER Experiment Name: At_Roots__P Parameter: Organism Value: A. thaliana
  misc_feature: MA Experiment 20000439 PARAMETER Experiment Name: At_Roots__P Parameter: Tissue Value: Roots vs. Whole Plant
  misc_feature: MA Experiment ID: 20000452 Result: Up-regulated in Transcription
  misc_feature: MA Experiment 20000452 PARAMETER Experiment Name: At_CS6879_Shoots-Roots_P Parameter: Age (day) Value: 14
  misc_feature: MA Experiment 20000452 PARAMETER Experiment Name: At_CS6879_Shoots-Roots_P Parameter: Organism Value: A. thaliana
  misc_feature: MA Experiment 20000452 PARAMETER Experiment Name: At_CS6879_Shoots-Roots_P Parameter: Plant Line Value: CS6879 vs. WS
  misc_feature: MA Experiment 20000452 PARAMETER Experiment Name: At_CS6879_Shoots-Roots_P Parameter: Tissue Value: Shoots
  misc_feature: MA Experiment ID: 20000495 Result: Down-regulated in Transcription
  misc_feature: MA Experiment 20000495 PARAMETER Experiment Name: At_Guard_Cells_P Parameter: Harvest Date Value: 8/2/2002
  misc_feature: MA Experiment 20000495 PARAMETER Experiment Name: At_Guard_Cells_P Parameter: Organism Value: A. thaliana
  misc_feature: MA Experiment 20000495 PARAMETER Experiment Name: At_Guard_Cells_P Parameter: Tissue Value: Guard Cells vs. Leaves
  misc_feature: MA Experiment ID: 20000527 Result: Down-regulated in Transcription
  misc_feature: MA Experiment 20000527 PARAMETER Experiment Name: At_10percent_PEG_P Parameter: Age (day) Value: 20
  misc_feature: MA Experiment 20000527 PARAMETER Experiment Name: At_10percent_PEG_P Parameter: Organism Value: A. thaliana
  misc_feature: MA Experiment 20000527 PARAMETER Experiment Name: At_10percent_PEG_P Parameter: Plant Line Value: WS
  misc_feature: MA Experiment 20000527 PARAMETER Experiment Name: At_10percent_PEG_P Parameter: Timepoint (day) Value: 20
  misc_feature: MA Experiment 20000527 PARAMETER Experiment Name: At_10percent_PEG_P Parameter: Tissue Value: Whole Plant
  misc_feature: MA Experiment 20000527 PARAMETER Experiment Name: At_10percent_PEG_P Parameter: Treatment Value: 10percent PEG vs. No Treatment
  misc_feature: MA Experiment ID: 20000573 Result: Up-regulated in Transcription
  misc_feature: MA Experiment 20000573 PARAMETER Experiment Name: At_100uM_ABA_Mutants__P Parameter: Organism Value: A. thaliana
  misc_feature: MA Experiment 20000573 PARAMETER Experiment Name: At_100uM_ABA_Mutants__P Parameter: Plant Line Value: CS22 vs. Ler wt
  misc_feature: MA Experiment 20000573 PARAMETER Experiment Name: At_100uM_ABA_Mutants__P Parameter: Timepoint (hr) Value: N/A
  misc_feature: MA Experiment 20000573 PARAMETER Experiment Name: At_100uM_ABA_Mutants__P Parameter: Tissue Value: Whole Plant
  misc_feature: MA Experiment 20000573 PARAMETER Experiment Name: At_100uM_ABA_Mutants__P Parameter: Treatment Value: None
  misc_feature: MA Experiment ID: 20000574 Result: Up-regulated in Transcription
  misc_feature: MA Experiment 20000574 PARAMETER Experiment Name: At_100uM_ABA_Mutants__P Parameter: Organism Value: A. thaliana
  misc_feature: MA Experiment 20000574 PARAMETER Experiment Name: At_100uM_ABA_Mutants__P Parameter: Plant Line Value: CS23 vs. Ler wt
  misc_feature: MA Experiment 20000574 PARAMETER Experiment Name: At_100uM_ABA_Mutants__P Parameter: Timepoint (hr) Value: N/A
  misc_feature: MA Experiment 20000574 PARAMETER Experiment Name: At_100uM_ABA_Mutants__P Parameter: Tissue Value: Whole Plant
  misc_feature: MA Experiment 20000574 PARAMETER Experiment Name: At_100uM_ABA_Mutants__P Parameter: Treatment Value: None
  misc_feature: MA Experiment ID: 20000575 Result: Down-regulated in Transcription
  misc_feature: MA Experiment 20000575 PARAMETER Experiment Name: At_100uM_ABA_Mutants__P Parameter: Organism Value: A. thaliana
  misc_feature: MA Experiment 20000575 PARAMETER Experiment Name: At_100uM_ABA_Mutants__P Parameter: Plant Line Value: CS22
  misc_feature: MA Experiment 20000575 PARAMETER Experiment Name: At_100uM_ABA_Mutants__P Parameter: Timepoint (hr) Value: 6
  misc_feature: MA Experiment 20000575 PARAMETER Experiment Name: At_100uM_ABA_Mutants__P Parameter: Tissue Value: Whole Plant
  misc_feature: MA Experiment 20000575 PARAMETER Experiment Name: At_100uM_ABA_Mutants__P Parameter: Treatment Value: 1uM ABA vs. No Treatment
  misc_feature: MA Experiment ID: 20000576 Result: Down-regulated in Transcription
  misc_feature: MA Experiment 20000576 PARAMETER Experiment Name: At_100uM_ABA_Mutants__P Parameter: Organism Value: A. thaliana
  misc_feature: MA Experiment 20000576 PARAMETER Experiment Name: At_100uM_ABA_Mutants__P Parameter: Plant Line Value: CS23
  misc_feature: MA Experiment 20000576 PARAMETER Experiment Name: At_100uM_ABA_Mutants__P Parameter: Timepoint (hr) Value: 6
  misc_feature: MA Experiment 20000576 PARAMETER Experiment Name: At_100uM_ABA_Mutants__P Parameter: Tissue Value: Whole Plant
  misc_feature: MA Experiment 20000576 PARAMETER Experiment Name: At_100uM_ABA_Mutants__P Parameter: Treatment Value: 1uM ABA vs. No Treatment
  misc_feature: MA Experiment ID: 20000794 Result: Down-regulated in Transcription
  misc_feature: MA Experiment 20000794 PARAMETER Experiment Name: At_Petals_P Parameter: Age (day) Value: 23-25 days
  misc_feature: MA Experiment 20000794 PARAMETER Experiment Name: At_Petals_P Parameter: Plant Line Value: WS
  misc_feature: MA Experiment 20000794 PARAMETER Experiment Name: At_Petals_P Parameter: Tissue Value: Petals vs. Whole plant
  misc_feature: MA Experiment ID: 20001248 Result: Down-regulated in Transcription
  misc_feature: MA Experiment 20001248 PARAMETER Experiment Name: At_Far-red-induction_P Parameter: Age (day) Value: 7
  misc_feature: MA Experiment 20001248 PARAMETER Experiment Name: At_Far-red-induction_P Parameter: Light Value: Far-red vs. White
  misc_feature: MA Experiment 20001248 PARAMETER Experiment Name: At_Far-red-induction_P Parameter: Organism Value: A. thaliana
  misc_feature: MA Experiment 20001248 PARAMETER Experiment Name: At_Far-red-induction_P Parameter: Plant Line Value: Columbia
  misc_feature: MA Experiment 20001248 PARAMETER Experiment Name: At_Far-red-induction_P Parameter: Timepoint (hr) Value: 4
  misc_feature: MA Experiment 20001248 PARAMETER Experiment Name: At_Far-red-induction_P Parameter: Tissue Value: Whole Plant
  misc_feature: MA Experiment ID: 20001450 Result: Down-regulated in Transcription
  misc_feature: MA Experiment 20001450 PARAMETER Experiment Name: At_Far-red-induction_P Parameter: Age (day) Value: 7
  misc_feature: MA Experiment 20001450 PARAMETER Experiment Name: At_Far-red-induction_P Parameter: Light Value: Far-red vs. White
  misc_feature: MA Experiment 20001450 PARAMETER Experiment Name: At_Far-red-induction_P Parameter: Organism Value: A. thaliana
  misc_feature: MA Experiment 20001450 PARAMETER Experiment Name: At_Far-red-induction_P Parameter: Plant Line Value: Columbia
  misc_feature: MA Experiment 20001450 PARAMETER Experiment Name: At_Far-red-induction_P Parameter: Timepoint (hr) Value: 8
  misc_feature: MA Experiment 20001450 PARAMETER Experiment Name: At_Far-red-induction_P Parameter: Tissue Value: Whole Plant
  misc_feature: MA Experiment ID: 20001451 Result: Down-regulated in Transcription
  misc_feature: MA Experiment 20001451 PARAMETER Experiment Name: At_Far-red-induction_P Parameter: Age (day) Value: 7
  misc_feature: MA Experiment 20001451 PARAMETER Experiment Name: At_Far-red-induction_P Parameter: Light Value: Far-red vs. White
  misc_feature: MA Experiment 20001451 PARAMETER Experiment Name: At_Far-red-induction_P Parameter: Organism Value: A. thaliana
  misc_feature: MA Experiment 20001451 PARAMETER Experiment Name: At_Far-red-induction_P Parameter: Plant Line Value: Columbia
  misc_feature: MA Experiment 20001451 PARAMETER Experiment Name: At_Far-red-induction_P Parameter: Timepoint (hr) Value: 24
  misc_feature: MA Experiment 20001451 PARAMETER Experiment Name: At_Far-red-induction_P Parameter: Tissue Value: Whole Plant
  misc_feature: MA Experiment ID: 20001557 Result: Down-regulated in Transcription
  misc_feature: MA Experiment 20001557 PARAMETER Experiment Name: At_Drought_Soil_Dry_P Parameter: Age (day) Value: 27
  misc_feature: MA Experiment 20001557 PARAMETER Experiment Name: At_Drought_Soil_Dry_P Parameter: Organism Value: A. thaliana
  misc_feature: MA Experiment 20001557 PARAMETER Experiment Name: At_Drought_Soil_Dry_P Parameter: Plant Line Value: WS
  misc_feature: MA Experiment 20001557 PARAMETER Experiment Name: At_Drought_Soil_Dry_P Parameter: Post Timepoint (hr) Value: 3
  misc_feature: MA Experiment 20001557 PARAMETER Experiment Name: At_Drought_Soil_Dry_P Parameter: Post-Treatment Value: Re-Water vs. No Drought
  misc_feature: MA Experiment 20001557 PARAMETER Experiment Name: At_Drought_Soil_Dry_P Parameter: Timepoint (day) Value: 13
  misc_feature: MA Experiment 20001557 PARAMETER Experiment Name: At_Drought_Soil_Dry_P Parameter: Treatment Value: Drought vs. No Drought
  misc_feature: MA Experiment ID: 20001560 Result: Down-regulated in Transcription
  misc_feature: MA Experiment 20001560 PARAMETER Experiment Name: At_Drought_Soil_Dry_P Parameter: Age (day) Value: 28
  misc_feature: MA Experiment 20001560 PARAMETER Experiment Name: At_Drought_Soil_Dry_P Parameter: Organism Value: A. thaliana
  misc_feature: MA Experiment 20001560 PARAMETER Experiment Name: At_Drought_Soil_Dry_P Parameter: Plant Line Value: WS
  misc_feature: MA Experiment 20001560 PARAMETER Experiment Name: At_Drought_Soil_Dry_P Parameter: Post Timepoint (hr) Value: None
  misc_feature: MA Experiment 20001560 PARAMETER Experiment Name: At_Drought_Soil_Dry_P Parameter: Post-Treatment Value: None
  misc_feature: MA Experiment 20001560 PARAMETER Experiment Name: At_Drought_Soil_Dry_P Parameter: Timepoint (day) Value: 14
  misc_feature: MA Experiment 20001560 PARAMETER Experiment Name: At_Drought_Soil_Dry_P Parameter: Treatment Value: Drought vs. No Drought
  misc_feature: MA Experiment ID: 20001770 Result: Up-regulated in Transcription
  misc_feature: MA Experiment 20001770 PARAMETER Experiment Name: At_Far-red-enriched-adult_P Parameter: Age (day) Value: 28
  misc_feature: MA Experiment 20001770 PARAMETER Experiment Name: At_Far-red-enriched-adult_P Parameter: Light Value: Far-red enriched vs. White
  misc_feature: MA Experiment 20001770 PARAMETER Experiment Name: At_Far-red-enriched-adult_P Parameter: Organism Value: A. thaliana
  misc_feature: MA Experiment 20001770 PARAMETER Experiment Name: At_Far-red-enriched-adult_P Parameter: Plant Line Value: Columbia
  misc_feature: MA Experiment 20001770 PARAMETER Experiment Name: At_Far-red-enriched-adult_P Parameter: Timepoint (hr) Value: 8
  misc_feature: MA Experiment 20001770 PARAMETER Experiment Name: At_Far-red-enriched-adult_P Parameter: Tissue Value: Aerial
  misc_feature: MA Experiment ID: 20001905 Result: Down-regulated in Transcription
  misc_feature: MA Experiment 20001905 PARAMETER Experiment Name: At_Drought_Reproduction_P Parameter: Age (day) Value: 40
  misc_feature: MA Experiment 20001905 PARAMETER Experiment Name: At_Drought_Reproduction_P Parameter: Organism Value: A. thaliana
  misc_feature: MA Experiment 20001905 PARAMETER Experiment Name: At_Drought_Reproduction_P Parameter: Plant Line Value: WS
  misc_feature: MA Experiment 20001905 PARAMETER Experiment Name: At_Drought_Reproduction_P Parameter: Timepoint (day) Value: 10
  misc_feature: MA Experiment 20001905 PARAMETER Experiment Name: At_Drought_Reproduction_P Parameter: Tissue Value: Rosettes
  misc_feature: MA Experiment 20001905 PARAMETER Experiment Name: At_Drought_Reproduction_P Parameter: Treatment Value: Drought vs. No Drought
atggcttcttctacaatctctctccaatctatctccatgacaactctcaacaatctctcatatagtaaacaatttcatcgaagctctcttcttggtttctctaaatccttccaaaattttggtatctcatctaacggtccaggttcctcctctccgacaagtttcacgcccaagaagaaactcactcctactcgagctctctctcagaacttgggaaataccgaaaaccccagaccaagcaaagttcaagaactgagcgtgtacgaaatcaatgatttagatcgacacagcccaaaaattcttaaaaacgcattcagctttaggtttggtctcggagatctcgtcccattcacaaacaaactctacaccggcgatctcaagaaacgcgtgggaatcacggctggtctctgcgttgtgatcgaacacgtccctgagaagaacggtgatagattcgaagctacgtacagcttctacttcggagactatggccacttgtccgtacaaggaccatacttgacttacgaggattcgttccttgccatcactggtggcgctggaatctttgaaggtgcctacggacaggttaagcttcaacagcttgtgtatccgacaaaactgttctacactttttatcttaaaggattggctaatgatttgccactggagctcataggaactccggtaccaccgtctaaggacgtggagccagcaccggaagctaaggcgcttaagcccagtggagttgtaagcaactttacaaattagtgaataaaattagtcttatctttctcgtgtcctgtatatataataatctttttcatagagaattttatattcttatacttgtaatcaaataatttgtatggatcttagtatccttgtgaatgcagtatgtttgagttg

SEQ ID NO: 97049 - protein, 254 aa, Arabidopsis thaliana
  peptide (1)..(254): Ceres Seq. ID no. 12735889
  misc_feature (75)..(254): Pfam Name: Allene oxide cyclase Pfam Description: Allene oxide cyclase
  misc_feature (1)..(254): Homolog of NCBI NO: 15230874 NR Description: hypothetical protein; protein id: At3g25760.1 thaliana] >gi|7939562|dbj|BAA95763.1|
  misc_feature (3)..(254): Homolog of NCBI NO: 15320414 NR Description: ERD12 protein [Arabidopsis thaliana]
  misc_feature (1)..(254): Homolog of NCBI NO: 18404656 NR Description: expressed protein; protein id: At3g25770.1, by cDNA: gi_14190460, supported by cDNA: gi_15809727 [Arabidopsis >gi|7939563|dbj|BAA95764.1| gene_id:K13N2.11~pir||S57813~similar
  misc_feature (1)..(254): Homolog of NCBI NO: 18404658 NR Description: expressed protein; protein id: At3g25780.1, by cDNA: 3457. [Arabidopsis thaliana] >gi|7939564|dbj|BAA95765.1| to unknown protein [Arabidopsis thaliana]
  misc_feature (1)..(254): Homolog of NCBI NO: 15222241 NR Description: allene oxide cyclase, putative; protein id: supported by cDNA: gi_16323064 [Arabidopsis thaliana] At1g13280/T6J4_23 [Arabidopsis thaliana]
  misc_feature (79)..(254): Homolog of NCBI NO: 25518012 NR Description: T6J4.4 protein - Arabidopsis thaliana
  misc_feature (7)..(254): Homolog of NCBI NO: 40644132 NR Description: allene oxide cyclase [Medicago truncatula]
  misc_feature (75)..(254): Homolog of NCBI NO: 21727906 NR Description: allene oxide cyclase [Oryza sativa (japonica
  misc_feature (78)..(254): Homolog of NCBI NO: 40643247 NR Description: allene oxide cyclase [Hordeum vulgare]
  misc_feature (75)..(254): Homolog of NCBI NO: 39980760 NR Description: allene oxide cyclase [Zea mays]
MASSTISLQSISMTTLNNLSYSKQFHRSSLLGFSKSFQNFGISSNGPGSSSPTSFTPKKKLTPTRALSQNLGNTENPRPSKVQELSVYEINDLDRHSPKILKNAFSFRFGLGDLVPFTNKLYTGDLKKRVGITAGLCVVIEHVPEKNGDRFEATYSFYFGDYGHLSVQGPYLTYEDSFLAITGGAGIFEGAYGQVKLQQLVYPTKLFYTFYLKGLANDLPLELIGTPVPPSKDVEPAPEAKALKPSGVVSNFTN

SEQ ID NO: 97050 - protein, 242 aa, Arabidopsis thaliana
  peptide (1)..(242): Ceres Seq. ID no. 12735890
  misc_feature (63)..(242): Pfam Name: Allene oxide cyclase Pfam Description: Allene oxide cyclase
  misc_feature (1)..(242): Homolog of NCBI NO: 15230874 NR Description: hypothetical protein; protein id: At3g25760.1 thaliana] >gi|7939562|dbj|BAA95763.1|
  misc_feature (1)..(242): Homolog of NCBI NO: 15320414 NR Description: ERD12 protein [Arabidopsis thaliana]
  misc_feature (1)..(242): Homolog of NCBI NO: 18404656 NR Description: expressed protein; protein id: At3g25770.1, by cDNA: gi_14190460, supported by cDNA: gi_15809727 [Arabidopsis >gi|7939563|dbj|BAA95764.1| gene_id:K13N2.11~pir||S57813~similar
  misc_feature (1)..(242): Homolog of NCBI NO: 18404658 NR Description: expressed protein; protein id: At3g25780.1, by cDNA: 3457. [Arabidopsis thaliana] >gi|7939564|dbj|BAA95765.1| to unknown protein [Arabidopsis thaliana]
  misc_feature (1)..(242): Homolog of NCBI NO: 15222241 NR Description: allene oxide cyclase, putative; protein id: supported by cDNA: gi_16323064 [Arabidopsis thaliana] At1g13280/T6J4_23 [Arabidopsis thaliana]
  misc_feature (67)..(242): Homolog of NCBI NO: 25518012 NR Description: T6J4.4 protein - Arabidopsis thaliana
  misc_feature (1)..(242): Homolog of NCBI NO: 40644132 NR Description: allene oxide cyclase [Medicago truncatula]
  misc_feature (63)..(242): Homolog of NCBI NO: 21727906 NR Description: allene oxide cyclase [Oryza sativa (japonica
  misc_feature (66)..(242): Homolog of NCBI NO: 40643247 NR Description: allene oxide cyclase [Hordeum vulgare]
  misc_feature (63)..(242): Homolog of NCBI NO: 39980760 NR Description: allene oxide cyclase [Zea mays]
MTTLNNLSYSKQFHRSSLLGFSKSFQNFGISSNGPGSSSPTSFTPKKKLTPTRALSQNLGNTENPRPSKVQELSVYEINDLDRHSPKILKNAFSFRFGLGDLVPFTNKLYTGDLKKRVGITAGLCVVIEHVPEKNGDRFEATYSFYFGDYGHLSVQGPYLTYEDSFLAITGGAGIFEGAYGQVKLQQLVYPTKLFYTFYLKGLANDLPLELIGTPVPPSKDVEPAPEAKALKPSGVVSNFTN

SEQ ID NO: 97051 - DNA, 973 bp, Arabidopsis thaliana
  misc_feature (1)..(973): Ceres Seq. ID no. 12735891
  misc_feature: MA Experiment ID: 20000328 Result: Down-regulated in Transcription
  misc_feature: MA Experiment 20000328 PARAMETER Experiment Name: At_42deg_Heat_Sub_P Parameter: Age (day) Value: 14
  misc_feature: MA Experiment 20000328 PARAMETER Experiment Name: At_42deg_Heat_Sub_P Parameter: Organism Value: A. thaliana
  misc_feature: MA Experiment 20000328 PARAMETER Experiment Name: At_42deg_Heat_Sub_P Parameter: Plant Line Value: WS
  misc_feature: MA Experiment 20000328 PARAMETER Experiment Name: At_42deg_Heat_Sub_P Parameter: Temperature (deg C) Value: 42 vs. 22
  misc_feature: MA Experiment 20000328 PARAMETER Experiment Name: At_42deg_Heat_Sub_P Parameter: Timepoint (hr) Value: 6
  misc_feature: MA Experiment 20000328 PARAMETER Experiment Name: At_42deg_Heat_Sub_P Parameter: Tissue Value: Aerial
  misc_feature: MA Experiment ID: 20000347 Result: Up-regulated in Transcription
  misc_feature: MA Experiment 20000347 PARAMETER Experiment Name: At_2mM_SA_Sub_P Parameter: Age (day) Value: 14
  misc_feature: MA Experiment 20000347 PARAMETER Experiment Name: At_2mM_SA_Sub_P Parameter: Organism Value: A. thaliana
  misc_feature: MA Experiment 20000347 PARAMETER Experiment Name: At_2mM_SA_Sub_P Parameter: Plant Line Value: WS
  misc_feature: MA Experiment 20000347 PARAMETER Experiment Name: At_2mM_SA_Sub_P Parameter: Timepoint (hr) Value: 6
  misc_feature: MA Experiment 20000347 PARAMETER Experiment Name: At_2mM_SA_Sub_P Parameter: Tissue Value: Aerial
  misc_feature: MA Experiment 20000347 PARAMETER Experiment Name: At_2mM_SA_Sub_P Parameter: Treatment Value: 2mM SA vs. No Treatment
  misc_feature: MA Experiment ID: 20000355 Result: Down-regulated in Transcription
  misc_feature: MA Experiment 20000355 PARAMETER Experiment Name: At_Siliques_Sub_P Parameter: Age (day) Value: 21
  misc_feature: MA Experiment 20000355 PARAMETER Experiment Name: At_Siliques_Sub_P Parameter: Organism Value: A. thaliana
  misc_feature: MA Experiment 20000355 PARAMETER Experiment Name: At_Siliques_Sub_P Parameter: Plant Line Value: WS
  misc_feature: MA Experiment 20000355 PARAMETER Experiment Name: At_Siliques_Sub_P Parameter: Tissue Value: Less Than 5mm Siliques vs. Whole Plant
  misc_feature: MA Experiment ID: 20000440 Result: Down-regulated in Transcription
  misc_feature: MA Experiment 20000440 PARAMETER Experiment Name: At_Closed-Flower__Sub_P Parameter: Tissue Value: Closed Flower vs. Whole Plant
actcaccacataaagtaaaagtctcatctcttcataaaatagctttaaaccaatcaagtagagtttcttctcaagtctttttattttatttttatcaatggcttcttcagcagtgtctctccaatccatctctatgacaactctcaacaatctttcatgtaatcaacaatttcatcgaagctctcttcttggttcctctaaatccttccaaaatcttggtatctcatctaacggttcagatttctcctatccatcaagtttcactgccaagaagaacctcactgcttctcgagctctctcccaaaacgggaatatcgaaaaccctagaccaagcaaagttcaagaactgagtgtgtacgaaatcaacgaattagatcgacacagccccaagattcttaaaaacgcattcagcttaatgttcggtctcggagatctcgtaccattcacaaacaaactctacacaggcgatctcaagaaacgcgtgggcatcacggcaggtctctgcgtcgtcatcgaacacgtcccagagaagaaaggtgaaagattcgaagctacttatagcttctacttcggagactatggccacttgtccgttcaaggaccatacttgacttacgaggattcgttcctcgccatcactggtggtgctggaatctttgaaggtgcctacggacaggtcaagcttcaacagcttgtgtatccgacaaaactgttctacactttttaccttaaagggttggctaatgatttgccgttggagctcaccggaacaccggtaccgccgtctaaggacatagagccggcgccggaagctaaggcactggagcctagcggagttataagtaactataccaactaattcatgaaattaaaatgtttctcgtatcgctgtgtaatgatataaagatttgtagttttgtgctcttatctgtaataaaatcattgaggaataatatctcgagtatgttttaag

SEQ ID NO: 97052 - protein, 253 aa, Arabidopsis thaliana
  peptide (1)..(253): Ceres Seq. ID no. 12735892
  misc_feature (74)..(253): Pfam Name: Allene oxide cyclase Pfam Description: Allene oxide cyclase
  misc_feature (1)..(253): Homolog of NCBI NO: 18404656 NR Description: expressed protein; protein id: At3g25770.1, by cDNA: gi_14190460, supported by cDNA: gi_15809727 [Arabidopsis >gi|7939563|dbj|BAA95764.1| gene_id:K13N2.11~pir||S57813~similar
  misc_feature (1)..(253): Homolog of NCBI NO: 15230874 NR Description: hypothetical protein; protein id: At3g25760.1 thaliana] >gi|7939562|dbj|BAA95763.1|
  misc_feature (3)..(253): Homolog of NCBI NO: 15320414 NR Description: ERD12 protein [Arabidopsis thaliana]
  misc_feature (1)..(253): Homolog of NCBI NO: 18404658 NR Description: expressed protein; protein id: At3g25780.1, by cDNA: 3457. [Arabidopsis thaliana] >gi|7939564|dbj|BAA95765.1| to unknown protein [Arabidopsis thaliana]
  misc_feature (1)..(253): Homolog of NCBI NO: 15222241 NR Description: allene oxide cyclase, putative; protein id: supported by cDNA: gi_16323064 [Arabidopsis thaliana] At1g13280/T6J4_23 [Arabidopsis thaliana]
  misc_feature (78)..(253): Homolog of NCBI NO: 25518012 NR Description: T6J4.4 protein - Arabidopsis thaliana
  misc_feature (7)..(253): Homolog of NCBI NO: 40644132 NR Description: allene oxide cyclase [Medicago truncatula]
  misc_feature (74)..(253): Homolog of NCBI NO: 21727906 NR Description: allene oxide cyclase [Oryza sativa (japonica
  misc_feature (24)..(253): Homolog of NCBI NO: 16416376 NR Description: mangrin [Bruguiera sexangula]
  misc_feature (28)..(253): Homolog of NCBI NO: 40644130 NR Description: allene oxide cyclase [Nicotiana tabacum]
MASSAVSLQSISMTTLNNLSCNQQFHRSSLLGSSKSFQNLGISSNGSDFSYPSSFTAKKNLTASRALSQNGNIENPRPSKVQELSVYEINELDRHSPKILKNAFSLMFGLGDLVPFTNKLYTGDLKKRVGITAGLCVVIEHVPEKKGERFEATYSFYFGDYGHLSVQGPYLTYEDSFLAITGGAGIFEGAYGQVKLQQLVYPTKLFYTFYLKGLANDLPLELTGTPVPPSKDIEPAPEAKALEPSGVISNYTN

SEQ ID NO: 97053 - protein, 241 aa, Arabidopsis thaliana
  peptide (1)..(241): Ceres Seq. ID no. 12735893
  misc_feature (62)..(241): Pfam Name: Allene oxide cyclase Pfam Description: Allene oxide cyclase
  misc_feature (1)..(241): Homolog of NCBI NO: 18404656 NR Description: expressed protein; protein id: At3g25770.1, by cDNA: gi_14190460, supported by cDNA: gi_15809727 [Arabidopsis >gi|7939563|dbj|BAA95764.1| gene_id:K13N2.11~pir||S57813~similar
  misc_feature (1)..(241): Homolog of NCBI NO: 15230874 NR Description: hypothetical protein; protein id: At3g25760.1 thaliana] >gi|7939562|dbj|BAA95763.1|
  misc_feature (1)..(241): Homolog of NCBI NO: 15320414 NR Description: ERD12 protein [Arabidopsis thaliana]
  misc_feature (1)..(241): Homolog of NCBI NO: 18404658 NR Description: expressed protein; protein id: At3g25780.1, by cDNA: 3457. [Arabidopsis thaliana] >gi|7939564|dbj|BAA95765.1| to unknown protein [Arabidopsis thaliana]
  misc_feature (1)..(241): Homolog of NCBI NO: 15222241 NR Description: allene oxide cyclase, putative; protein id: supported by cDNA: gi_16323064 [Arabidopsis thaliana] At1g13280/T6J4_23 [Arabidopsis thaliana]
  misc_feature (66)..(241): Homolog of NCBI NO: 25518012 NR Description: T6J4.4 protein - Arabidopsis thaliana
  misc_feature (1)..(241): Homolog of NCBI NO: 40644132 NR Description: allene oxide cyclase [Medicago truncatula]
  misc_feature (62)..(241): Homolog of NCBI NO: 21727906 NR Description: allene oxide cyclase [Oryza sativa (japonica
  misc_feature (12)..(241): Homolog of NCBI NO: 16416376 NR Description: mangrin [Bruguiera sexangula]
  misc_feature (16)..(241): Homolog of NCBI NO: 40644130 NR Description: allene oxide cyclase [Nicotiana tabacum]
MTTLNNLSCNQQFHRSSLLGSSKSFQNLGISSNGSDFSYPSSFTAKKNLTASRALSQNGNIENPRPSKVQELSVYEINELDRHSPKILKNAFSLMFGLGDLVPFTNKLYTGDLKKRVGITAGLCVVIEHVPEKKGERFEATYSFYFGDYGHLSVQGPYLTYEDSFLAITGGAGIFEGAYGQVKLQQLVYPTKLFYTFYLKGLANDLPLELTGTPVPPSKDIEPAPEAKALEPSGVISNYTN

SEQ ID NO: 97054 - protein, 147 aa, Arabidopsis thaliana
  peptide (1)..(147): Ceres Seq. ID no. 12735894
  misc_feature (1)..(147): Pfam Name: Allene oxide cyclase Pfam Description: Allene oxide cyclase
  misc_feature (1)..(147): Homolog of NCBI NO: 18404656 NR Description: expressed protein; protein id: At3g25770.1, by cDNA: gi_14190460, supported by cDNA: gi_15809727 [Arabidopsis >gi|7939563|dbj|BAA95764.1| gene_id:K13N2.11~pir||S57813~similar
  misc_feature (1)..(147): Homolog of NCBI NO: 15230874 NR Description: hypothetical protein; protein id: At3g25760.1 thaliana] >gi|7939562|dbj|BAA95763.1|
  misc_feature (1)..(147): Homolog of NCBI NO: 15320414 NR Description: ERD12 protein [Arabidopsis thaliana]
  misc_feature (1)..(147): Homolog of NCBI NO: 18404658 NR Description: expressed protein; protein id: At3g25780.1, by cDNA: 3457. [Arabidopsis thaliana] >gi|7939564|dbj|BAA95765.1| to unknown protein [Arabidopsis thaliana]
  misc_feature (1)..(147): Homolog of NCBI NO: 15222241 NR Description: allene oxide cyclase, putative; protein id: supported by cDNA: gi_16323064 [Arabidopsis thaliana] At1g13280/T6J4_23 [Arabidopsis thaliana]
  misc_feature (1)..(147): Homolog of NCBI NO: 25518012 NR Description: T6J4.4 protein - Arabidopsis thaliana
  misc_feature (1)..(147): Homolog of NCBI NO: 40644132 NR Description: allene oxide cyclase [Medicago truncatula]
  misc_feature (1)..(147): Homolog of NCBI NO: 21727906 NR Description: allene oxide cyclase [Oryza sativa (japonica
  misc_feature (1)..(147): Homolog of NCBI NO: 16416376 NR Description: mangrin [Bruguiera sexangula]
  misc_feature (1)..(147): Homolog of NCBI NO: 40644130 NR Description: allene oxide cyclase [Nicotiana tabacum]
MFGLGDLVPFTNKLYTGDLKKRVGITAGLCVVIEHVPEKKGERFEATYSFYFGDYGHLSVQGPYLTYEDSFLAITGGAGIFEGAYGQVKLQQLVYPTKLFYTFYLKGLANDLPLELTGTPVPPSKDIEPAPEAKALEPSGVISNYTN

SEQ ID NO: 97055 - DNA, 756 bp, Arabidopsis thaliana
  misc_feature (1)..(756): Ceres Seq. ID no. 12735911
  misc_feature: MA Experiment ID: 20001556 Result: Up-regulated in Transcription
  misc_feature: MA Experiment 20001556 PARAMETER Experiment Name: At_Drought_Soil_Dry_P Parameter: Age (day) Value: 26
  misc_feature: MA Experiment 20001556 PARAMETER Experiment Name: At_Drought_Soil_Dry_P Parameter: Organism Value: A. thaliana
  misc_feature: MA Experiment 20001556 PARAMETER Experiment Name: At_Drought_Soil_Dry_P Parameter: Plant Line Value: WS
  misc_feature: MA Experiment 20001556 PARAMETER Experiment Name: At_Drought_Soil_Dry_P Parameter: Post Timepoint (hr) Value: None
  misc_feature: MA Experiment 20001556 PARAMETER Experiment Name: At_Drought_Soil_Dry_P Parameter: Post-Treatment Value: None
  misc_feature: MA Experiment 20001556 PARAMETER Experiment Name: At_Drought_Soil_Dry_P Parameter: Timepoint (day) Value: 12
  misc_feature: MA Experiment 20001556 PARAMETER Experiment Name: At_Drought_Soil_Dry_P Parameter: Treatment Value: Drought vs. No Drought
  misc_feature: MA Experiment ID: 20001904 Result: Up-regulated in Transcription
  misc_feature: MA Experiment 20001904 PARAMETER Experiment Name: At_Drought_Reproduction_P Parameter: Age (day) Value: 37
  misc_feature: MA Experiment 20001904 PARAMETER Experiment Name: At_Drought_Reproduction_P Parameter: Organism Value: A. thaliana
  misc_feature: MA Experiment 20001904 PARAMETER Experiment Name: At_Drought_Reproduction_P Parameter: Plant Line Value: WS
  misc_feature: MA Experiment 20001904 PARAMETER Experiment Name: At_Drought_Reproduction_P Parameter: Timepoint (day) Value: 7
  misc_feature: MA Experiment 20001904 PARAMETER Experiment Name: At_Drought_Reproduction_P Parameter: Tissue Value: Rosettes
  misc_feature: MA Experiment 20001904 PARAMETER Experiment Name: At_Drought_Reproduction_P Parameter: Treatment Value: Drought vs. No Drought
  misc_feature: MA Experiment ID: 20001906 Result: Up-regulated in Transcription
  misc_feature: MA Experiment 20001906 PARAMETER Experiment Name: At_Drought_Reproduction_P Parameter: Age (day) Value: 35
  misc_feature: MA Experiment 20001906 PARAMETER Experiment Name: At_Drought_Reproduction_P Parameter: Organism Value: A. thaliana
  misc_feature: MA Experiment 20001906 PARAMETER Experiment Name: At_Drought_Reproduction_P Parameter: Plant Line Value: WS
  misc_feature: MA Experiment 20001906 PARAMETER Experiment Name: At_Drought_Reproduction_P Parameter: Timepoint (day) Value: 5
  misc_feature: MA Experiment 20001906 PARAMETER Experiment Name: At_Drought_Reproduction_P Parameter: Tissue Value: Siliques
  misc_feature: MA Experiment 20001906 PARAMETER Experiment Name: At_Drought_Reproduction_P Parameter: Treatment Value: Drought vs. No Drought
atggaaacggcgtcgtttaatccttcgtcttttctggctactttcccgtcgtttctcctcctcttcctcgccgtatacaccatcggctatttcctagttttccgtacatggaaacaatcatcacatttaggcgctagctgcttaatgtcactcttccacggcactcccgccgttataatggcttcccacgcgctgctcacaactccacgcgccgacgtacactcattcgcttctcccaataccgccgtggaatcaaacgtactcgacttcagcatggcttatttcaccgttgatcttctccattacttaatcttcctccctaacgacttcatcttcatcctccaccacattgcgaccctatacgttttcgccacgtgtagattcgccgtcggtcacggagctcacgggcttctcctcctcttgatactcgcggaggcgacgagcgcgtgtcagaacgtctggacgatcaccgggtatagaaaaaacgacgtcgcgttagcgaggagagtgagagagcttttgtctccgccgttttatcttttttatactgtggttcgtggattggctggtccggtggttttgtatgatatggcgacgttttacggtagcggtgcggcggatggagtggttccacggtgggcttggttatcgtggcttgttgtgattgggtttgctattttggttagtattttgtgggttttacgtaattggcttgattggtttagggagaataactctagcaagaaatacaagtga

SEQ ID NO: 97056 - protein, 251 aa, Arabidopsis thaliana
  peptide (1)..(251): Ceres Seq. ID no. 12735912
  misc_feature (1)..(251): Homolog of NCBI NO: 15230950 NR Description: hypothetical protein; protein id: At3g25950.1
  misc_feature (1)..(232): Homolog of NCBI NO: 9279600 NR Description: gene_id:MPE11.12~unknown protein [Arabidopsis
  misc_feature (16)..(248): Homolog of NCBI NO: 15241364 NR Description: putative protein; protein id: At5g14280.1
  misc_feature (16)..(248): Homolog of NCBI NO: 26450181 NR Description: unknown protein [Arabidopsis thaliana]
  misc_feature (8)..(251): Homolog of NCBI NO: 15232128 NR Description: unknown protein; protein id: At3g27270.1 thaliana] >gi|9294220|dbj|BAB02122.1| gene_id:K17E12.9~unknown
METASFNPSSFLATFPSFLLLFLAVYTIGYFLVFRTWKQSSHLGASCLMSLFHGTPAVIMASHALLTTPRADVHSFASPNTAVESNVLDFSMAYFTVDLLHYLIFLPNDFIFILHHIATLYVFATCRFAVGHGAHGLLLLLILAEATSACQNVWTITGYRKNDVALARRVRELLSPPFYLFYTVVRGLAGPVVLYDMATFYGSGAADGVVPRWAWLSWLVVIGFAILVSILWVLRNWLDWFRENNSSKKYK

SEQ ID NO: 97057 - protein, 203 aa, Arabidopsis thaliana
  peptide (1)..(203): Ceres Seq. ID no. 12735913
  misc_feature (1)..(203): Homolog of NCBI NO: 15230950 NR Description: hypothetical protein; protein id: At3g25950.1
  misc_feature (1)..(184): Homolog of NCBI NO: 9279600 NR Description: gene_id:MPE11.12~unknown protein [Arabidopsis
  misc_feature (1)..(200): Homolog of NCBI NO: 15241364 NR Description: putative protein; protein id: At5g14280.1
  misc_feature (1)..(200): Homolog of NCBI NO: 26450181 NR Description: unknown protein [Arabidopsis thaliana]
  misc_feature (1)..(203): Homolog of NCBI NO: 15232128 NR Description: unknown protein; protein id: At3g27270.1 thaliana] >gi|9294220|dbj|BAB02122.1| gene_id:K17E12.9~unknown
MSLFHGTPAVIMASHALLTTPRADVHSFASPNTAVESNVLDFSMAYFTVDLLHYLIFLPNDFIFILHHIATLYVFATCRFAVGHGAHGLLLLLILAEATSACQNVWTITGYRKNDVALARRVRELLSPPFYLFYTVVRGLAGPVVLYDMATFYGSGAADGVVPRWAWLSWLVVIGFAILVSILWVLRNWLDWFRENNSSKKYK

SEQ ID NO: 97058 - protein, 192 aa, Arabidopsis thaliana
  peptide (1)..(192): Ceres Seq. ID no. 12735914
  misc_feature (1)..(192): Homolog of NCBI NO: 15230950 NR Description: hypothetical protein; protein id: At3g25950.1
  misc_feature (1)..(173): Homolog of NCBI NO: 9279600 NR Description: gene_id:MPE11.12~unknown protein [Arabidopsis
  misc_feature (1)..(189): Homolog of NCBI NO: 15241364 NR Description: putative protein; protein id: At5g14280.1
  misc_feature (1)..(189): Homolog of NCBI NO: 26450181 NR Description: unknown protein [Arabidopsis thaliana]
  misc_feature (1)..(192): Homolog of NCBI NO: 15232128 NR Description: unknown protein; protein id: At3g27270.1 thaliana] >gi|9294220|dbj|BAB02122.1| gene_id:K17E12.9~unknown
MASHALLTTPRADVHSFASPNTAVESNVLDFSMAYFTVDLLHYLIFLPNDFIFILHHIATLYVFATCRFAVGHGAHGLLLLLILAEATSACQNVWTITGYRKNDVALARRVRELLSPPFYLFYTVVRGLAGPVVLYDMATFYGSGAADGVVPRWAWLSWLVVIGFAILVSILWVLRNWLDWFRENNSSKKYK

SEQ ID NO: 97059 - DNA, 2224 bp, Arabidopsis thaliana
  misc_feature (1)..(2224): Ceres Seq. ID no. 12735926
  misc_feature: MA Experiment ID: 20000315 Result: Down-regulated in Transcription
  misc_feature: MA Experiment 20000315 PARAMETER Experiment Name: At_14day_Shoots-Roots_Sub_P Parameter: Age (day) Value: 14
  misc_feature: MA Experiment 20000315 PARAMETER Experiment Name: At_14day_Shoots-Roots_Sub_P Parameter: Organism Value: A. thaliana
  misc_feature: MA Experiment 20000315 PARAMETER Experiment Name: At_14day_Shoots-Roots_Sub_P Parameter: Plant Line Value: WS
  misc_feature: MA Experiment 20000315 PARAMETER Experiment Name: At_14day_Shoots-Roots_Sub_P Parameter: Tissue Value: Shoots vs. Whole Plant
  misc_feature: MA Experiment ID: 20000327 Result: Down-regulated in Transcription
  misc_feature: MA Experiment 20000327 PARAMETER Experiment Name: At_42deg_Heat_Sub_P Parameter: Age (day) Value: 14
  misc_feature: MA Experiment 20000327 PARAMETER Experiment Name: At_42deg_Heat_Sub_P Parameter: Organism Value: A. thaliana
  misc_feature: MA Experiment 20000327 PARAMETER Experiment Name: At_42deg_Heat_Sub_P Parameter: Plant Line Value: WS
  misc_feature: MA Experiment 20000327 PARAMETER Experiment Name: At_42deg_Heat_Sub_P Parameter: Temperature (deg C) Value: 42 vs. 22
  misc_feature: MA Experiment 20000327 PARAMETER Experiment Name: At_42deg_Heat_Sub_P Parameter: Timepoint (hr) Value: 1
  misc_feature: MA Experiment 20000327 PARAMETER Experiment Name: At_42deg_Heat_Sub_P Parameter: Tissue Value: Aerial
  misc_feature: MA Experiment ID: 20000328 Result: Down-regulated in Transcription
  misc_feature: MA Experiment 20000328 PARAMETER Experiment Name: At_42deg_Heat_Sub_P Parameter: Age (day) Value: 14
  misc_feature: MA Experiment 20000328 PARAMETER Experiment Name: At_42deg_Heat_Sub_P Parameter: Organism Value: A. thaliana
  misc_feature: MA Experiment 20000328 PARAMETER Experiment Name: At_42deg_Heat_Sub_P Parameter: Plant Line Value: WS
  misc_feature: MA Experiment 20000328 PARAMETER Experiment Name: At_42deg_Heat_Sub_P Parameter: Temperature (deg C) Value: 42 vs. 22
  misc_feature: MA Experiment 20000328 PARAMETER Experiment Name: At_42deg_Heat_Sub_P Parameter: Timepoint (hr) Value: 6
  misc_feature: MA Experiment 20000328 PARAMETER Experiment Name: At_42deg_Heat_Sub_P Parameter: Tissue Value: Aerial
agaaagaaaaattcatacttccaaaggaaaggggaagaaaaacaaaaacaaaaaaatctcaagtcaacaaacaacaacgaaggtccgaagaactttgaatgttgttatcatcatcatcataatcagaatcatcaacatcatcgttgtattcttttctggaagaactggaatcgccgtaaagttcgaatttttttttgttagattgtacaaaagggtgttgtgattaaggaagaagaagaagaagaagataaaaaggttttttttttggctgttgttgtaatctgggaaagtttgggattttgtatcgatctcagatggtgaaaagacgaagaagtgtgattgttttggggatatgattaaagaacctgaattgttctggtgttgagaataagaaactatgtggaaacagattctaagtaagcttcccaacaaaaagtcttcaaagcacgaacatcgtggacgtgaacacggtggccattcttcttcatcttctcatacttcaggtgcctctacttccaaaagcactgataatggcgccgcgaaatcgcatgctaagaacgcttctccagccggcaaatccgctgcttctgactcgggttttaaagatgggaatctaaagagtagtgggaacaacaacaacaacaacaacaacggtgtctttactccttatgaagcattgccgagttttaaagatgttccaaacacggaaaagcaaaacttgttcattaaaaagttgaacttgtgccgtgtagtgtttgatttcacggatcctacaaagaacatcaaggaaaaagatattaagaggcagacattgctggagcttgtggattatgtgaattctcctaatggaaagtttagcgaagtcggtatccaagaagtcgttcggatggtctctgctaacatatttagaacgctaaatcctcaaccacgggaaaataaagttatcgatgccttagacctggaggaggaagaaccttccatggatcttgcgtggcctcacttgcagcttgtgtatgagcttttcttgaggtttgttgcttcgcctgaaactgacaccaagctggctaagagatatatagatcaatcttttgtcttgcggttactggatttatttgattccgaggatcctagagaaagagattgtctgaaaaccattctccatcggatctatggtaaatttatggtacaccgacctttcatcaggaaatccattaacaacatcttctataggtttgttttcgaaacagagaaacataatgggattgctgagtttctagaaatcttgggaagtatcatcaatggattcgctcttcccttgaaagacgagcacaaagtgtttcttgttcgagttttgatacctctccacaaaccaaaatgcttgcaaatgtatcatcaacaattgtcttattgtatcacacagtttgtggaaaaggattgcaaacttgctgatacggttataagaggattgttgaaatattggcccgtgacaaacagttccaaagaagtcatgtttctgaacgagttggaggaagtactcgaagcaactcagccaccagaatttcaacggtgcatggtaccactgtttcgccaaatagctcgatgtttgaacagtctgcattttcaggttgcagagagagctttattcttatggaacaacaatcacattgagaatctgataatgcaaaaccgtaaagtcattcttccaattatattcccagcgttggagagaaacgcacagaaacattggaaccaagctgttcatagcttgacactaaacgtgcgaaagatatttcatgaccttgaccctgagttatttaaagaatgcctcgcaaagttcaaggaagatgaatcaaaagcagctgaaaccgaagcaaaacgtgaagccacttggaaacgtttggaagaactcggagtgcgaaaggcttcataaagttagagttgtagagaagaaagagagagaaagagagcttctgtatcttctattgacatgttgttcttcagatacatacttgagaagagaaaagtttcatattggtctcttggtttgaaggaaaaaggaaactcaaagatgtaagattgttcctgttttgatttccattatttttatttcttgtttcctcttaaatcttcctgcttgttaaaatgggttatttttgctacattgtatgatcatcacttgttccactttcttgagacttgtcttattcattcatcaaaaaaaagc

SEQ ID NO: 97060 - protein, 510 aa, Arabidopsis thaliana
  peptide (1)..(510): Ceres Seq. ID no. 12735927
  misc_feature (93)..(506): Pfam Name: Protein phosphatase 2A regulatory B subunit (B56 Pfam Description: Protein phosphatase 2A regulatory B subunit
  misc_feature (1)..(510): Homolog of NCBI NO: 15230961 NR Description: putative B regulatory subunit of protein by cDNA: gi_16323339 [Arabidopsis thaliana]
  misc_feature (28)..(508): Homolog of NCBI NO: 21537284 NR Description: B regulatory subunit of protein phosphatase 2A,
  misc_feature (28)..(508): Homolog of NCBI NO: 15222851 NR Description: B regulatory subunit of protein phosphatase 2A, protein id: At1g13460.1, supported by cDNA: 126195. [Arabidopsis
  misc_feature (1)..(510): Homolog of NCBI NO: 21530784 NR Description: putative protein phosphatase 2A B'zeta subunit
  misc_feature (1)..(508): Homolog of NCBI NO: 21530786 NR Description: putative protein phosphatase 2A B'teta subunit
  misc_feature (1)..(509): Homolog of NCBI NO: 18414444 NR Description: Expressed protein; protein id: At4g15415.1, by cDNA: gi_20147342, supported by cDNA: gi_2160693 [Arabidopsis >gi|2160694|gb|AAB58902.1| B' regulatory subunit of PP2A
  misc_feature (1)..(509): Homolog of NCBI NO: 20147343 NR Description: AT4g15410/dl3750w [Arabidopsis thaliana]
  misc_feature (40)..(509): Homolog of NCBI NO: 7485149 NR Description: hypothetical protein - Arabidopsis thaliana phosphatase like protein [Arabidopsis thaliana]
  misc_feature (1)..(508): Homolog of NCBI NO: 15233119 NR Description: B regulatory subunit of PP2A, putative; protein
  misc_feature (21)..(510): Homolog of NCBI NO: 34394129 NR Description: putative protein phosphatase PP2A0 B' subunit
MWKQILSKLPNKKSSKHEHRGREHGGHSSSSSHTSGASTSKSTDNGAAKSHAKNASPAGKSAASDSGFKDGNLKSSGNNNNNNNNGVFTPYEALPSFKDVPNTEKQNLFIKKLNLCRVVFDFTDPTKNIKEKDIKRQTLLELVDYVNSPNGKFSEVGIQEVVRMVSANIFRTLNPQPRENKVIDALDLEEEEPSMDLAWPHLQLVYELFLRFVASPETDTKLAKRYIDQSFVLRLLDLFDSEDPRERDCLKTILHRIYGKFMVHRPFIRKSINNIFYRFVFETEKHNGIAEFLEILGSIINGFALPLKDEHKVFLVRVLIPLHKPKCLQMYHQQLSYCITQFVEKDCKLADTVIRGLLKYWPVTNSSKEVMFLNELEEVLEATQPPEFQRCMVPLFRQIARCLNSLHFQVAERALFLWNNNHIENLIMQNRKVILPIIFPALERNAQKHWNQAVHSLTLNVRKIFHDLDPELFKECLAKFKEDESKAAETEAKREATWKRLEELGVRKAS

SEQ ID NO: 97061 - protein, 347 aa, Arabidopsis thaliana
  peptide (1)..(347): Ceres Seq. ID no. 12735928
  misc_feature (1)..(343): Pfam Name: Protein phosphatase 2A regulatory B subunit (B56 Pfam Description: Protein phosphatase 2A regulatory B subunit
  misc_feature (1)..(347): Homolog of NCBI NO: 15230961 NR Description: putative B regulatory subunit of protein by cDNA: gi_16323339 [Arabidopsis thaliana]
  misc_feature (1)..(345): Homolog of NCBI NO: 21537284 NR Description: B regulatory subunit of protein phosphatase 2A,
  misc_feature (1)..(345): Homolog of NCBI NO: 15222851 NR Description: B regulatory subunit of protein phosphatase 2A, protein id: At1g13460.1, supported by cDNA: 126195. [Arabidopsis
  misc_feature (1)..(347): Homolog of NCBI NO: 21530784 NR Description: putative protein phosphatase 2A B'zeta subunit
  misc_feature (1)..(345): Homolog of NCBI NO: 21530786 NR Description: putative protein phosphatase 2A B'teta subunit
  misc_feature (1)..(346): Homolog of NCBI NO: 18414444 NR Description: Expressed protein; protein id: At4g15415.1, by cDNA: gi_20147342, supported by cDNA: gi_2160693 [Arabidopsis >gi|2160694|gb|AAB58902.1| B' regulatory subunit of PP2A
  misc_feature (1)..(346): Homolog of NCBI NO: 20147343 NR Description: AT4g15410/dl3750w [Arabidopsis thaliana]
  misc_feature (1)..(346): Homolog of NCBI NO: 7485149 NR Description: hypothetical protein - Arabidopsis thaliana phosphatase like protein [Arabidopsis thaliana]
  misc_feature (1)..(345): Homolog of NCBI NO: 15233119 NR Description: B regulatory subunit of PP2A, putative; protein
  misc_feature (1)..(347): Homolog of NCBI NO: 34394129 NR Description: putative protein phosphatase PP2A0 B' subunit
MVSANIFRTLNPQPRENKVIDALDLEEEEPSMDLAWPHLQLVYELFLRFVASPETDTKLAKRYIDQSFVLRLLDLFDSEDPRERDCLKTILHRIYGKFMVHRPFIRKSINNIFYRFVFETEKHNGIAEFLEILGSIINGFALPLKDEHKVFLVRVLIPLHKPKCLQMYHQQLSYCITQFVEKDCKLADTVIRGLLKYWPVTNSSKEVMFLNELEEVLEATQPPEFQRCMVPLFRQIARCLNSLHFQVAERALFLWNNNHIENLIMQNRKVILPIIFPALERNAQKHWNQAVHSLTLNVRKIFHDLDPELFKECLAKFKEDESKAAETEAKREATWKRLEELGVRKAS

SEQ ID NO: 97062 - protein, 316 aa, Arabidopsis thaliana
  peptide (1)..(316): Ceres Seq. ID no. 12735929
  misc_feature (1)..(312): Pfam Name: Protein phosphatase 2A regulatory B subunit (B56 Pfam Description: Protein phosphatase 2A regulatory B subunit
  misc_feature (1)..(316): Homolog of NCBI NO: 15230961 NR Description: putative B regulatory subunit of protein by cDNA: gi_16323339 [Arabidopsis thaliana]
  misc_feature (1)..(314): Homolog of NCBI NO: 21537284 NR Description: B regulatory subunit of protein phosphatase 2A,
  misc_feature (1)..(314): Homolog of NCBI NO: 15222851 NR Description: B regulatory subunit of protein phosphatase 2A, protein id: At1g13460.1, supported by cDNA: 126195. [Arabidopsis
  misc_feature (1)..(316): Homolog of NCBI NO: 21530784 NR Description: putative protein phosphatase 2A B'zeta subunit
  misc_feature (1)..(314): Homolog of NCBI NO: 21530786 NR Description: putative protein phosphatase 2A B'teta subunit
  misc_feature (1)..(315): Homolog of NCBI NO: 18414444 NR Description: Expressed protein; protein id: At4g15415.1, by cDNA: gi_20147342, supported by cDNA: gi_2160693 [Arabidopsis >gi|2160694|gb|AAB58902.1| B' regulatory subunit of PP2A
  misc_feature (1)..(315): Homolog of NCBI NO: 20147343 NR Description: AT4g15410/dl3750w [Arabidopsis thaliana]
  misc_feature (1)..(315): Homolog of NCBI NO: 7485149 NR Description: hypothetical protein - Arabidopsis thaliana phosphatase like protein [Arabidopsis thaliana]
  misc_feature (1)..(314): Homolog of NCBI NO: 15233119 NR Description: B regulatory subunit of PP2A, putative; protein
  misc_feature (1)..(316): Homolog of NCBI NO: 34394129 NR Description: putative protein phosphatase PP2A0 B' subunit
MDLAWPHLQLVYELFLRFVASPETDTKLAKRYIDQSFVLRLLDLFDSEDPRERDCLKTILHRIYGKFMVHRPFIRKSINNIFYRFVFETEKHNGIAEFLEILGSIINGFALPLKDEHKVFLVRVLIPLHKPKCLQMYHQQLSYCITQFVEKDCKLADTVIRGLLKYWPVTNSSKEVMFLNELEEVLEATQPPEFQRCMVPLFRQIARCLNSLHFQVAERALFLWNNNHIENLIMQNRKVILPIIFPALERNAQKHWNQAVHSLTLNVRKIFHDLDPELFKECLAKFKEDESKAAETEAKREATWKRLEELGVRKAS

SEQ ID NO: 97063 - DNA, 2925 bp, Arabidopsis thaliana
  misc_feature (1)..(2925): Ceres Seq. ID no. 12735953
  misc_feature: MA Experiment ID: 108434 Result: Down-regulated in Transcription
  misc_feature: MA Experiment 108434 PARAMETER Experiment Name: At_Root_Tips_cDNA_P Parameter: Tissue Value: Root Tips
  misc_feature: MA Experiment ID: 108464 Result: Up-regulated in Transcription
  misc_feature: MA Experiment 108464 PARAMETER Experiment Name: At_Germinating_Seeds_cDNA_P Parameter: Age (day) Value: 4 vs. 0
  misc_feature: MA Experiment 108464 PARAMETER Experiment Name: At_Germinating_Seeds_cDNA_P Parameter: Tissue Value: Germinating Seeds
  misc_feature: MA Experiment ID: 108585 Result: Up-regulated in Transcription
  misc_feature: MA Experiment 108585 PARAMETER Experiment Name: At_5mM_NaNP_cDNA_P Parameter: Timepoint (hr) Value: 6
  misc_feature: MA Experiment 108585 PARAMETER Experiment Name: At_5mM_NaNP_cDNA_P Parameter: Tissue Value: Aerial
  misc_feature: MA Experiment 108585 PARAMETER Experiment Name: At_5mM_NaNP_cDNA_P Parameter: Treatment Value: null
  misc_feature: MA Experiment ID: 20000224 Result: Up-regulated in Transcription
atgtttgatcgaaaggtgctcagatacttcaggaaagacggtcacaattggaggaagaaaaaagatggaaagactgtgaaggaagctcatgagaggttgaaggcgggaagcgttgatgttctacattgttactatgcgcatggacaggacaatgaaaactttcaaagacgcagttactggttgcttcaggaagaactttcccacatagtttttgttcactacctcgaagttaagggtagtagagtttctacttcttttaaccggatgcaaaggactgaagacgcggctcggtctcctcaagaaactggggacgccttgaccagtgaacatgatggttatgcttcttgcagcttcaatcaaaatgatcatagcaatcattcacaaactactgactcagcaagtgtcaatggttttcactctccagaacttgaagatgctgaatcagcatacaatcagcatggaagttccacagcttactctcatcaagaacttcagcagcctgcaacaggaggaaaccttactggttttgatccttactatcaaatctctttgacgcccagggatagttatcaaaaagagcttcgcacaatccccgtaactgattcttcaattatggtagacaaaagcaaaactatcaacagtcctggagtaacaaatgggttaaaaaacagaaaatccattgattcccaaacctgggaagagattctgggaaattgtggttctggagttgaagccttacctttgcagcctaacagtgagcatgaagtgctggaccaaatactcgaaagctcttttacaatgcaagattttgctagtctacaagagtccatggtcaaaagccagaatcaggagttaaattcaggacttacatctgatcgtaccgtgtggttccaaggacaagatatggagctaaatgctataagcaatctagcttcgaatgaaaaagctccatatctatctacgatgaaacaacatctgttacacggtgcattgggcgaagaaggtctgaaaaagatggacagtttcaatcgctggatgagcaaagaacttggagatgttggtgttatagctgatgcaaacgagtcctttactcaatcaagttcaagaacctactgggaagaagttgagagtgaggatgggtccaatggtcacaactctaggagggacatggatggatatgttatgagtccttccctctcaaaggaacagctctttagcatcaatgacttctctccaagctgggcttatgtgggttgtgaagtggtggtttttgtcactggaaaattcttaaagactcgggaggagactgaaattggcgagtggtcttgcatgtttgggcaaacagaagttccagcagatgttatatctaatggtattctccaatgtgttgctcctatgcatgaggctggaagagttcccttttatgtaacatgttccaacagattggcatgcagtgaagtgcgtgaattcgagtataaggttgccgagtctcaagtttttgatagagaagcagatgatgagtctactattgacattcttgaggcaagatttgttaaactgttgtgctcgaaatctgaaaatacaagccctgtttctgggaatgacagtgatttgtcacaattgagcgagaagattagtttactacttttcgagaacgatgaccagttggatcagatgctcatgaatgaaatctcccaagaaaatatgaaaaacaaccttttgcaggaatttctgaaagaaagcttacactcatggcttttacaaaagatagcagaaggtggaaaaggtccaagtgttttggatgaaggtggccaaggtgtattacattttgcagcttctcttggttacaactgggccttagaaccaacaataatcgctggtgtaagcgttgattttcgcgatgtaaatggttggaccgcacttcattgggcagctttctttggcagggagaggataattggttcactcatagctcttggtgctgctcctggaactttaactgacccaaatccagatttcccatcaggaagcacaccttctgatctagcctatgctaatggtcacaaaggaattgctggttatctctcagaatatgccttaagagctcatgtttctttgctcagtctaaatgataaaaatgccgaaactgttgagatggctcctagcccatccagctcatcattgacagactcgttgacagctgtacgtaacgctactcaggcagcagctcggattcatcaggttttcagggctcagtctttccagaagaagcaactaaaagaatttggagataaaaagcttggaatgtcggaggagcgtgctctttcgatgcttgctcctaaaacacacaaatcaggaagggcacatagtgatgattccgtgcaagccgctgctattcggattcagaacaagttccgaggttacaagggaagaaaagactatttgattaccagacaaagaatcatcaaaatacaggctcatgtgagaggttatcagtttaggaaaaactacagaaagataatttggtcagtgggggtattagagaaggtgatattacgttggagacggaaaggagctggtttgcgcgggtttaagtcagaagcacttgttgagaagatgcaagacggaacagagaaagaagaagatgatgattttttcaaacaaggaagaaagcaaacagaggataggctacaaaaagctcttgcaagagtgaaatccatggttcaatatcctgaagctagagatcaataccgtagattgctaaatgttgtcaacgacatccaagaaagcaaggttgaaaaagctcttgaaaattcagaagcaacttgttttgatgatgatgatgatctgatagatattgaagcattgttggaagatgatgacacattgatgttgcctatgtcctcatctttgtggaccagttaa

SEQ ID NO: 97064 - protein, 974 aa, Arabidopsis thaliana; identical to SEQ ID NO: 24426
  peptide (1)..(974): Ceres Seq. ID no. 12735954
  misc_feature (406)..(493): Pfam Name: IPT/TIG domain Pfam Description: IPT/TIG domain
  misc_feature (518)..(974): Homolog of NCBI NO: 11545505 NR Description: calmodulin-binding protein [Arabidopsis thaliana]
  misc_feature (1)..(963): Homolog of NCBI NO: 37533660 NR Description: putative calmodulin binding protein similar to
  misc_feature (1)..(739): Homolog of NCBI NO: 30697970 NR Description: calmodulin-binding protein [Arabidopsis thaliana]
  misc_feature (705)..(964): Homolog of NCBI NO: 30697970 NR Description: calmodulin-binding protein [Arabidopsis thaliana]
  misc_feature (1)..(767): Homolog of NCBI NO: 37991923 NR Description: putative calmodulin-binding transcription factor
  misc_feature (725)..(972): Homolog of NCBI NO: 37991923 NR Description: putative calmodulin-binding transcription factor
  misc_feature (320)..(718): Homolog of NCBI NO: 11612392 NR Description: anther ethylene-upregulated protein ER1
  misc_feature (723)..(964): Homolog of NCBI NO: 11612392 NR Description: anther ethylene-upregulated protein ER1
  misc_feature (312)..(712): Homolog of NCBI NO: 15242417 NR Description: calmodulin-binding protein; protein id: [Arabidopsis thaliana] >gi|9955528|emb|CAC05467.1| putative
  misc_feature (708)..(968): Homolog of NCBI NO: 15242417 NR Description: calmodulin-binding protein; protein id: [Arabidopsis thaliana] >gi|9955528|emb|CAC05467.1| putative

SEQ ID NO: 97065 - protein, 886 aa, Arabidopsis thaliana
  peptide (1)..(886): Ceres Seq. ID no. 12735955
  misc_feature (318)..(405): Pfam Name: IPT/TIG domain Pfam Description: IPT/TIG domain
  misc_feature (430)..(886): Homolog of NCBI NO: 11545505 NR Description: calmodulin-binding protein [Arabidopsis thaliana]
  misc_feature (1)..(875): Homolog of NCBI NO: 37533660 NR Description: putative calmodulin binding protein similar to
  misc_feature (1)..(651): Homolog of NCBI NO: 30697970 NR Description: calmodulin-binding protein [Arabidopsis thaliana]
  misc_feature (617)..(876): Homolog of NCBI NO: 30697970 NR Description: calmodulin-binding protein [Arabidopsis thaliana]
  misc_feature (1)..(679): Homolog of NCBI NO: 37991923 NR Description: putative calmodulin-binding transcription factor
  misc_feature (637)..(884): Homolog of NCBI NO: 37991923 NR Description: putative calmodulin-binding transcription factor
  misc_feature (232)..(630): Homolog of NCBI NO: 11612392 NR Description: anther ethylene-upregulated protein ER1
  misc_feature (635)..(876): Homolog of NCBI NO: 11612392 NR Description: anther ethylene-upregulated protein ER1
  misc_feature (224)..(624): Homolog of NCBI NO: 15242417 NR Description: calmodulin-binding protein; protein id: [Arabidopsis thaliana] >gi|9955528|emb|CAC05467.1| putative
  misc_feature (620)..(880): Homolog of NCBI NO: 15242417 NR Description: calmodulin-binding protein; protein id: [Arabidopsis thaliana] >gi|9955528|emb|CAC05467.1| putative
MQRTEDAARSPQETGDALTSEHDGYASCSFNQNDHSNHSQTTDSASVNGFHSPELEDAESAYNQHGSSTAYSHQELQQPATGGNLTGFDPYYQISLTPRDSYQKELRTIPVTDSSIMVDKSKTINSPGVTNGLKNRKSIDSQTWEEILGNCGSGVEALPLQPNSEHEVLDQILESSFTMQDFASLQESMVKSQNQELNSGLTSDRTVWFQGQDMELNAISNLASNEKAPYLSTMKQHLLHGALGEEGLKKMDSFNRWMSKELGDVGVIADANESFTQSSSRTYWEEVESEDGSNGHNSRRDMDGYVMSPSLSKEQLFSINDFSPSWAYVGCEVVVFVTGKFLKTREETEIGEWSCMFGQTEVPADVISNGILQCVAPMHEAGRVPFYVTCSNRLACSEVREFEYKVAESQVFDREADDESTIDILEARFVKLLCSKSENTSPVSGNDSDLSQLSEKISLLLFENDDQLDQMLMNEISQENMKNNLLQEFLKESLHSWLLQKIAEGGKGPSVLDEGGQGVLHFAASLGYNWALEPTIIAGVSVDFRDVNGWTALHWAAFFGRERIIGSLIALGAAPGTLTDPNPDFPSGSTPSDLAYANGHKGIAGYLSEYALRAHVSLLSLNDKNAETVEMAPSPSSSSLTDSLTAVRNATQAAARIHQVFRAQSFQKKQLKEFGDKKLGMSEERALSMLAPKTHKSGRAHSDDSVQAAAIRIQNKFRGYKGRKDYLITRQRIIKIQAHVRGYQFRKNYRKIIWSVGVLEKVILRWRRKGAGLRGFKSEALVEKMQDGTEKEEDDDFFKQGRKQTEDRLQKALARVKSMVQYPEARDQYRRLLNVVNDIQESKVEKALENSEATCFDDDDDLIDIEALLEDDDTLMLPMSSSLWTS

SEQ ID NO: 97066 - protein, 770 aa, Arabidopsis thaliana
  peptide (1)..(770): Ceres Seq. ID no. 12735956
  misc_feature (202)..(289): Pfam Name: IPT/TIG domain Pfam Description: IPT/TIG domain
  misc_feature (314)..(770): Homolog of NCBI NO: 11545505 NR Description: calmodulin-binding protein [Arabidopsis thaliana]
  misc_feature (1)..(759): Homolog of NCBI NO: 37533660 NR Description: putative calmodulin binding protein similar to
  misc_feature (1)..(535): Homolog of NCBI NO: 30697970 NR Description: calmodulin-binding protein [Arabidopsis thaliana]
  misc_feature (501)..(760): Homolog of NCBI NO: 30697970 NR Description: calmodulin-binding protein [Arabidopsis thaliana]
  misc_feature (1)..(563): Homolog of NCBI NO: 37991923 NR Description: putative calmodulin-binding transcription factor
  misc_feature (521)..(768): Homolog of NCBI NO: 37991923 NR Description: putative calmodulin-binding transcription factor
  misc_feature (116)..(514): Homolog of NCBI NO: 11612392 NR Description: anther ethylene-upregulated protein ER1
  misc_feature (519)..(760): Homolog of NCBI NO: 11612392 NR Description: anther ethylene-upregulated protein ER1
  misc_feature (108)..(508): Homolog of NCBI NO: 15242417 NR Description: calmodulin-binding protein; protein id: [Arabidopsis thaliana] >gi|9955528|emb|CAC05467.1| putative
  misc_feature (504)..(764): Homolog of NCBI NO: 15242417 NR Description: calmodulin-binding protein; protein id: [Arabidopsis thaliana] >gi|9955528|emb|CAC05467.1| putative
MVDKSKTINSPGVTNGLKNRKSIDSQTWEEILGNCGSGVEALPLQPNSEHEVLDQILESSFTMQDFASLQESMVKSQNQELNSGLTSDRTVWFQGQDMELNAISNLASNEKAPYLSTMKQHLLHGALGEEGLKKMDSFNRWMSKELGDVGVIADANESFTQSSSRTYWEEVESEDGSNGHNSRRDMDGYVMSPSLSKEQLFSINDFSPSWAYVGCEVVVFVTGKFLKTREETEIGEWSCMFGQTEVPADVISNGILQCVAPMHEAGRVPFYVTCSNRLACSEVREFEYKVAESQVFDREADDESTIDILEARFVKLLCSKSENTSPVSGNDSDLSQLSEKISLLLFENDDQLDQMLMNEISQENMKNNLLQEFLKESLHSWLLQKIAEGGKGPSVLDEGGQGVLHFAASLGYNWALEPTIIAGVSVDFRDVNGWTALHWAAFFGRERIIGSLIALGAAPGTLTDPNPDFPSGSTPSDLAYANGHKGIAGYLSEYALRAHVSLLSLNDKNAETVEMAPSPSSSSLTDSLTAVRNATQAAARIHQVFRAQSFQKKQLKEFGDKKLGMSEERALSMLAPKTHKSGRAHSDDSVQAAAIRIQNKFRGYKGRKDYLITRQRIIKIQAHVRGYQFRKNYRKIIWSVGVLEKVILRWRRKGAGLRGFKSEALVEKMQDGTEKEEDDDFFKQGRKQTEDRLQKALARVKSMVQYPEARDQYRRLLNVVNDIQESKVEKALENSEATCFDDDDDLIDIEALLEDDDTLMLPMSSSLWTS

SEQ ID NO: 97067 - DNA, 2213 bp, Arabidopsis thaliana
  misc_feature (1)..(2213): Ceres Seq. ID no. 12735961
  misc_feature: MA Experiment ID: 20000180 Result: Down-regulated in Transcription
  misc_feature: MA Experiment 20000180 PARAMETER Experiment Name: At_Germinating_Seeds_P Parameter: Age (hr) Value: 24 vs. 0
  misc_feature: MA Experiment 20000180 PARAMETER Experiment Name: At_Germinating_Seeds_P Parameter: Tissue Value: Germinating Seeds
  misc_feature: MA Experiment ID: 20000227 Result: Up-regulated in Transcription
  misc_feature: MA Experiment 20000227 PARAMETER Experiment Name: At_Root-Tips-vs-Tops_P Parameter: Tissue Value: Root Tips vs. Root Tops
  misc_feature: MA Experiment ID: 20000234 Result: Up-regulated in Transcription
  misc_feature: MA Experiment 20000234 PARAMETER Experiment Name: At_Siliques_P Parameter: Age (day) Value: 21
  misc_feature: MA Experiment 20000234 PARAMETER Experiment Name: At_Siliques_P Parameter: Organism Value: A. thaliana
  misc_feature: MA Experiment 20000234 PARAMETER Experiment Name: At_Siliques_P Parameter: Plant Line Value: WS
  misc_feature: MA Experiment 20000234 PARAMETER Experiment Name: At_Siliques_P Parameter: Tissue Value: Less Than 5mm Siliques vs. Whole Plant
  misc_feature: MA Experiment ID: 20000235 Result: Up-regulated in Transcription
  misc_feature: MA Experiment 20000235 PARAMETER Experiment Name: At_Siliques_P Parameter: Age (day) Value: 21
  misc_feature: MA Experiment 20000235 PARAMETER Experiment Name: At_Siliques_P Parameter: Organism Value: A. thaliana
  misc_feature: MA Experiment 20000235 PARAMETER Experiment Name: At_Siliques_P Parameter: Plant Line Value: WS
  misc_feature: MA Experiment 20000235 PARAMETER Experiment Name: At_Siliques_P Parameter: Tissue Value: 5-10mm Siliques vs. Whole Plant
  misc_feature: MA Experiment ID: 20000264 Result: Up-regulated in Transcription
  misc_feature: MA Experiment 20000264 PARAMETER Experiment Name: At_Open_Flower_P Parameter: Age (day) Value: 21
  misc_feature: MA Experiment 20000264 PARAMETER Experiment Name: At_Open_Flower_P Parameter: Plant Line Value: WS
  misc_feature: MA Experiment 20000264 PARAMETER Experiment Name: At_Open_Flower_P Parameter: Tissue Value: Open Flower vs. Whole Plant
  misc_feature: MA Experiment ID: 20000286 Result: Up-regulated in Transcription
  misc_feature: MA Experiment 20000286 PARAMETER Experiment Name: At_Open_Flower_P Parameter: Age (day) Value: 21
  misc_feature: MA Experiment 20000286 PARAMETER Experiment Name: At_Open_Flower_P Parameter: Plant Line Value: WS
  misc_feature: MA Experiment 20000286 PARAMETER Experiment Name: At_Open_Flower_P Parameter: Tissue Value: Half Open vs. Whole Plant
  misc_feature: MA Experiment ID: 20001556 Result: Up-regulated in Transcription
  misc_feature: MA Experiment 20001556 PARAMETER Experiment Name: At_Drought_Soil_Dry_P Parameter: Age (day) Value: 26
  misc_feature: MA Experiment 20001556 PARAMETER Experiment Name: At_Drought_Soil_Dry_P Parameter: Organism Value: A. thaliana
  misc_feature: MA Experiment 20001556 PARAMETER Experiment Name: At_Drought_Soil_Dry_P Parameter: Plant Line Value: WS
  misc_feature: MA Experiment 20001556 PARAMETER Experiment Name: At_Drought_Soil_Dry_P Parameter: Post Timepoint (hr) Value: None
  misc_feature: MA Experiment 20001556 PARAMETER Experiment Name: At_Drought_Soil_Dry_P Parameter: Post-Treatment Value: None
  misc_feature: MA Experiment 20001556 PARAMETER Experiment Name: At_Drought_Soil_Dry_P Parameter: Timepoint (day) Value: 12
  misc_feature: MA Experiment 20001556 PARAMETER Experiment Name: At_Drought_Soil_Dry_P Parameter: Treatment Value: Drought vs. No Drought
  misc_feature: MA Experiment ID: 20001557 Result: Up-regulated in Transcription
  misc_feature: MA Experiment 20001557 PARAMETER Experiment Name: At_Drought_Soil_Dry_P Parameter: Age (day) Value: 27
  misc_feature: MA Experiment 20001557 PARAMETER Experiment Name: At_Drought_Soil_Dry_P Parameter: Organism Value: A. thaliana
  misc_feature: MA Experiment 20001557 PARAMETER Experiment Name: At_Drought_Soil_Dry_P Parameter: Plant Line Value: WS
  misc_feature: MA Experiment 20001557 PARAMETER Experiment Name: At_Drought_Soil_Dry_P Parameter: Post Timepoint (hr) Value: 3
  misc_feature: MA Experiment 20001557 PARAMETER Experiment Name: At_Drought_Soil_Dry_P Parameter: Post-Treatment Value: Re-Water vs. No Drought
  misc_feature: MA Experiment 20001557 PARAMETER Experiment Name: At_Drought_Soil_Dry_P Parameter: Timepoint (day) Value: 13
  misc_feature: MA Experiment 20001557 PARAMETER Experiment Name: At_Drought_Soil_Dry_P Parameter: Treatment Value: Drought vs. No Drought
  misc_feature: MA Experiment ID: 20001558 Result: Up-regulated in Transcription
  misc_feature: MA Experiment 20001558 PARAMETER Experiment Name: At_Drought_Soil_Dry_P Parameter: Age (day) Value: 27
  misc_feature: MA Experiment 20001558 PARAMETER Experiment Name: At_Drought_Soil_Dry_P Parameter: Organism Value: A. thaliana
  misc_feature: MA Experiment 20001558 PARAMETER Experiment Name: At_Drought_Soil_Dry_P Parameter: Plant Line Value: WS
  misc_feature: MA Experiment 20001558 PARAMETER Experiment Name: At_Drought_Soil_Dry_P Parameter: Post Timepoint (hr) Value: 6
  misc_feature: MA Experiment 20001558 PARAMETER Experiment Name: At_Drought_Soil_Dry_P Parameter: Post-Treatment Value: Re-Water vs. No Drought
  misc_feature: MA Experiment 20001558 PARAMETER Experiment Name: At_Drought_Soil_Dry_P Parameter: Timepoint (day) Value: 13
  misc_feature: MA Experiment 20001558 PARAMETER Experiment Name: At_Drought_Soil_Dry_P Parameter: Treatment Value: Drought vs. No Drought
gatgacgcgcaacggccgatgaacatatcgaaggccaagcttcttcttcttcctcctcctcttacaccaaaactgaatcgttctctgtattctcattctcagcgtcgtactcgatcacttcctcatcacagagacaaacccataaactggaactctactcacagtttcgttctacacaatcctctactttcattgctcgaaaaatgcaaacttttgttacatttgaagcaaattcaagctcagatgataataaatggtttgattctggacccatttgcttcaagccggttaattgctttctgtgcattatcggaatctcgatatctcgattactctgtgaagattcttaaaggtattgagaaccctaacatattctcttggaatgtaacgattagaggattctctgagagtgagaatcctaaagaatcgtttttgctctataagcagatgcttagacatggttgttgtgagtccagaccggatcatttcacttaccctgttttgtttaaggtttgtgctgatcttaggttgagtagtttaggtcatatgattcttgggcatgttcttaagctaagattggaattggttagtcatgtgcataatgcgtcgattcatatgtttgcttcttgtggtgatatggaaaatgcgaggaaggtgttcgatgaaagtcctgtgagggatttggtttcttggaattgtttgattaatgggtataagaagattggtgaggcggagaaggcgatatatgtatataagctaatggaatctgaaggagttaagccggatgatgtgacgatgattgggttggtttcttcgtgttcaatgttgggagatttgaatcgtgggaaagagttttatgaatacgtaaaagaaaatggactgagaatgacgattcctcttgtaaatgctttgatggatatgttctcgaaatgcggagatattcacgaggcacgaaggatatttgataacttggaaaagagaacaattgtgtcgtggactacaatgatttcaggatatgctagatgtggtttgcttgatgtttcaaggaagctttttgatgatatggaagaaaaagatgttgtactgtggaatgcaatgatcggtggatcagtccaagccaagcgtggtcaagacgctttggcattgttccaggagatgcaaacaagtaacactaagcctgacgaaatcaccatgatacattgcctatctgcttgttctcagcttggtgctcttgatgttggcatttggattcatcgttacatcgagaaatacagtcttagtctcaatgttgcgctaggaacttcattggttgacatgtacgccaaatgtggtaacatctcagaagctctcagtgtttttcacggaattcaaacaagaaactcgcttacatacacagcgataatcggaggtttagcccttcatggagatgcatccactgctatatcatacttcaacgaaatgattgatgcagggattgccccagacgagatcactttcataggactattatcagcatgttgccatggtggaatgatccaaacaggccgtgattatttctctcagatgaagtctagattcaacctaaaccctcaattgaaacattactctataatggtagatctgctagggagagccgggctattagaagaagcagacaggctcatggaaagtatgccaatggaggcagatgctgcggtttggggagcattattattcggttgcaggatgcacggtaatgttgagctgggagagaaagcggctaagaaacttctcgaacttgatcccagtgatagcgggatctatgtgttgttggatggcatgtatggagaggctaatatgtgggaagatgcaaagagagcgaggaggatgatgaacgagagaggtgtagagaagattcctggttgtagttccattgaggttaatggaattgtctgtgagttcatcgttagggataaatcgagaccggaatctgagaaaatttatgatcgcttacattgtcttggaaggcatatgaggagctcgttgagtgtactattttcggaatatgagattactaataactaatgggactgaatgaaactgctgagttttgtattaaggcatctttggtctaaactagtatagaaatgggtttgagggcaaaaaaaaactcaaatgacatctcctgtgtattaattggccagtttaataaaaacatagtaacattaagagtg

SEQ ID NO: 97068 - protein, 687 aa, Arabidopsis thaliana
  peptide (1)..(687): Ceres Seq. ID no. 12735962
  misc_feature (125)..(159): Pfam Name: PPR repeat Pfam Description: PPR repeat
  misc_feature (62)..(678): Homolog of NCBI NO: 37534112 NR Description: putative selenium-binding protein-like [Oryza
  misc_feature (39)..(674): Homolog of NCBI NO: 15227619 NR Description: hypothetical protein; protein id: At2g29760.1
  misc_feature (39)..(664): Homolog of NCBI NO: 15223099 NR Description: unknown protein; protein id: At1g08070.1 thaliana] >gi|8778839|gb|AAF79838.1|AC026875_18 T6D22.15
  misc_feature (59)..(669): Homolog of NCBI NO: 9294596 NR Description: gb|AAC35225.1~gene_id:MVC8.5~strong similarity to
  misc_feature (59)..(669): Homolog of NCBI NO: 15233234 NR Description: hypothetical protein; protein id: At3g15930.1
  misc_feature (119)..(665): Homolog of NCBI NO: 15221713 NR Description: PPR-repeat protein; protein id: At1g31430.1
  misc_feature (60)..(664): Homolog of NCBI NO: 15233584 NR Description: hypothetical protein; protein id: At4g14820.1
  misc_feature (141)..(674): Homolog of NCBI NO: 34910298 NR Description: P0013F10.8 [Oryza sativa (japonica
  misc_feature (77)..(660): Homolog of NCBI NO: 9279687 NR Description: gb|AAC35225.1~gene_id:MWI23.6~strong similarity
  misc_feature (77)..(660): Homolog of NCBI NO: 15228829 NR Description: hypothetical protein; protein id: At3g22690.1
DDAQRPMNISKAKLLLLPPPLTPKLNRSLYSHSQRRTRSLPHHRDKPINWNSTHSFVLHNPLLSLLEKCKLLLHLKQIQAQMIINGLILDPFASSRLIAFCALSESRYLDYSVKILKGIENPNIFSWNVTIRGFSESENPKESFLLYKQMLRHGCCESRPDHFTYPVLFKVCADLRLSSLGHMILGHVLKLRLELVSHVHNASIHMFASCGDMENARKVFDESPVRDLVSWNCLINGYKKIGEAEKAIYVYKLMESEGVKPDDVTMIGLVSSCSMLGDLNRGKEFYEYVKENGLRMTIPLVNALMDMFSKCGDIHEARRIFDNLEKRTIVSWTTMISGYARCGLLDVSRKLFDDMEEKDVVLWNAMIGGSVQAKRGQDALALFQEMQTSNTKPDEITMIHCLSACSQLGALDVGIWIHRYIEKYSLSLNVALGTSLVDMYAKCGNISEALSVFHGIQTRNSLTYTAIIGGLALHGDASTAISYFNEMIDAGIAPDEITFIGLLSACCHGGMIQTGRDYFSQMKSRFNLNPQLKHYSIMVDLLGRAGLLEEADRLMESMPMEADAAVWGALLFGCRMHGNVELGEKAAKKLLELDPSDSGIYVLLDGMYGEANMWEDAKRARRMMNERGVEKIPGCSSIEVNGIVCEFIVRDKSRPESEKIYDRLHCLGRHMRSSLSVLFSEYEITNN

SEQ ID NO: 97069 - protein, 681 aa, Arabidopsis thaliana
  peptide (1)..(681): Ceres Seq. ID no. 12735963
  misc_feature (119)..(153): Pfam Name: PPR repeat Pfam Description: PPR repeat
  misc_feature (56)..(672): Homolog of NCBI NO: 37534112 NR Description: putative selenium-binding protein-like [Oryza
  misc_feature (33)..(668): Homolog of NCBI NO: 15227619 NR Description: hypothetical protein; protein id: At2g29760.1
  misc_feature (33)..(658): Homolog of NCBI NO: 15223099 NR Description: unknown protein; protein id: At1g08070.1 thaliana] >gi|8778839|gb|AAF79838.1|AC026875_18 T6D22.15
  misc_feature (53)..(663): Homolog of NCBI NO: 9294596 NR Description: gb|AAC35225.1~gene_id:MVC8.5~strong similarity to
  misc_feature (53)..(663): Homolog of NCBI NO: 15233234 NR Description: hypothetical protein; protein id: At3g15930.1
  misc_feature (113)..(659): Homolog of NCBI NO: 15221713 NR Description: PPR-repeat protein; protein id: At1g31430.1
  misc_feature (54)..(658): Homolog of NCBI NO: 15233584 NR Description: hypothetical protein; protein id: At4g14820.1
  misc_feature (135)..(668): Homolog of NCBI NO: 34910298 NR Description: P0013F10.8 [Oryza sativa (japonica
  misc_feature (71)..(654): Homolog of NCBI NO: 9279687 NR Description: gb|AAC35225.1~gene_id:MWI23.6~strong similarity
  misc_feature (71)..(654): Homolog of NCBI NO: 15228829 NR Description: hypothetical protein; protein id: At3g22690.1
MNISKAKLLLLPPPLTPKLNRSLYSHSQRRTRSLPHHRDKPINWNSTHSFVLHNPLLSLLEKCKLLLHLKQIQAQMIINGLILDPFASSRLIAFCALSESRYLDYSVKILKGIENPNIFSWNVTIRGFSESENPKESFLLYKQMLRHGCCESRPDHFTYPVLFKVCADLRLSSLGHMILGHVLKLRLELVSHVHNASIHMFASCGDMENARKVFDESPVRDLVSWNCLINGYKKIGEAEKAIYVYKLMESEGVKPDDVTMIGLVSSCSMLGDLNRGKEFYEYVKENGLRMTIPLVNALMDMFSKCGDIHEARRIFDNLEKRTIVSWTTMISGYARCGLLDVSRKLFDDMEEKDVVLWNAMIGGSVQAKRGQDALALFQEMQTSNTKPDEITMIHCLSACSQLGALDVGIWIHRYIEKYSLSLNVALGTSLVDMYAKCGNISEALSVFHGIQTRNSLTYTAIIGGLALHGDASTAISYFNEMIDAGIAPDEITFIGLLSACCHGGMIQTGRDYFSQMKSRFNLNPQLKHYSIMVDLLGRAGLLEEADRLMESMPMEADAAVWGALLFGCRMHGNVELGEKAAKKLLELDPSDSGIYVLLDGMYGEANMWEDAKRARRMMNERGVEKIPGCSSIEVNGIVCEFIVRDKSRPESEKIYDRLHCLGRHMRSSLSVLFSEYEITNN

SEQ ID NO: 97070 - protein, 606 aa, Arabidopsis thaliana
  peptide (1)..(606): Ceres Seq. ID no. 12735964
  misc_feature (44)..(78): Pfam Name: PPR repeat Pfam Description: PPR repeat
  misc_feature (1)..(597): Homolog of NCBI NO: 37534112 NR Description: putative selenium-binding protein-like [Oryza
  misc_feature (1)..(593): Homolog of NCBI NO: 15227619 NR Description: hypothetical protein; protein id: At2g29760.1
  misc_feature (1)..(583): Homolog of NCBI NO: 15223099 NR Description: unknown protein; protein id: At1g08070.1 thaliana] >gi|8778839|gb|AAF79838.1|AC026875_18 T6D22.15
  misc_feature (1)..(588): Homolog of NCBI NO: 9294596 NR Description: gb|AAC35225.1~gene_id:MVC8.5~strong similarity to
  misc_feature (1)..(588): Homolog of NCBI NO: 15233234 NR Description: hypothetical protein; protein id: At3g15930.1
  misc_feature (38)..(584): Homolog of NCBI NO: 15221713 NR Description: PPR-repeat protein; protein id: At1g31430.1
  misc_feature (1)..(583): Homolog of NCBI NO: 15233584 NR Description: hypothetical protein; protein id: At4g14820.1
  misc_feature (60)..(593): Homolog of NCBI NO: 34910298 NR Description: P0013F10.8 [Oryza sativa (japonica
  misc_feature (1)..(579): Homolog of NCBI NO: 9279687 NR Description: gb|AAC35225.1~gene_id:MWI23.6~strong similarity
  misc_feature (1)..(579): Homolog of NCBI NO: 15228829 NR Description: hypothetical protein; protein id: At3g22690.1
MIINGLILDPFASSRLIAFCALSESRYLDYSVKILKGIENPNIFSWNVTIRGFSESENPKESFLLYKQMLRHGCCESRPDHFTYPVLFKVCADLRLSSLGHMILGHVLKLRLELVSHVHNASIHMFASCGDMENARKVFDESPVRDLVSWNCLINGYKKIGEAEKAIYVYKLMESEGVKPDDVTMIGLVSSCSMLGDLNRGKEFYEYVKENGLRMTIPLVNALMDMFSKCGDIHEARRIFDNLEKRTIVSWTTMISGYARCGLLDVSRKLFDDMEEKDVVLWNAMIGGSVQAKRGQDALALFQEMQTSNTKPDEITMIHCLSACSQLGALDVGIWIHRYIEKYSLSLNVALGTSLVDMYAKCGNISEALSVFHGIQTRNSLTYTAIIGGLALHGDASTAISYFNEMIDAGIAPDEITFIGLLSACCHGGMIQTGRDYFSQMKSRFNLNPQLKHYSIMVDLLGRAGLLEEADRLMESMPMEADAAVWGALLFGCRMHGNVELGEKAAKKLLELDPSDSGIYVLLDGMYGEANMWEDAKRARRMMNERGVEKIPGCSSIEVNGIVCEFIVRDKSRPESEKIYDRLHCLGRHMRSSLSVLFSEYEITNN

SEQ ID NO: 97071 - DNA, 825 bp, Arabidopsis thaliana
  misc_feature (1)..(825): Ceres Seq. ID no. 12735982
  misc_feature: MA Experiment ID: 20000439 Result: Up-regulated in Transcription
  misc_feature: MA Experiment 20000439 PARAMETER Experiment Name: At_Roots__P Parameter: Age (day) Value: 14 vs. 21
  misc_feature: MA Experiment 20000439 PARAMETER Experiment Name: At_Roots__P Parameter: Organism Value: A. thaliana
  misc_feature: MA Experiment 20000439 PARAMETER Experiment Name: At_Roots__P Parameter: Tissue Value: Roots vs. Whole Plant
  misc_feature: MA Experiment ID: 20000451 Result: Down-regulated in Transcription
  misc_feature: MA Experiment 20000451 PARAMETER Experiment Name: At_CS6879_Shoots-Roots_P Parameter: Age (day) Value: 14
  misc_feature: MA Experiment 20000451 PARAMETER Experiment Name: At_CS6879_Shoots-Roots_P Parameter: Organism Value: A. thaliana
  misc_feature: MA Experiment 20000451 PARAMETER Experiment Name: At_CS6879_Shoots-Roots_P Parameter: Plant Line Value: CS6879 vs. WS
  misc_feature: MA Experiment 20000451 PARAMETER Experiment Name: At_CS6879_Shoots-Roots_P Parameter: Tissue Value: Roots
atggggagagggaagattgtgatccagaagatcgatgattccacgagtagacaagtcactttctccaaaagaagaaagggtctcatcaagaaagctaaagaacttgctattctctgcgacgccgaggtctgtctcatcattttctccaacactgacaagctctatgactttgccagctccagtgtgaaatctactattgaacgattcaatacggctaagatggaggagcaagaactaatgaaccctgcatcagaagttaagttttggcagagagaggctgaaactctaaggcaagaattgcactcattgcaagaaaattatcggcaactaacgggagtggaattaaatggtttgagcgttaaggagttacaaaacatagagagtcaacttgaaatgagtttacgtggaattcgtatgaaaagggaacaaattttgaccaatgaaattaaagagctaaccagaaagaggaatcttgttcatcatgaaaacctcgaattgtcgagaaaagtacaaaggattcatcaagaaaatgtcgaactatacaagaaggcttatggaacgtcgaacacaaatggattgggacatcatgagctagtagatgcagtttatgaatcccatgcacaggttaggctgcagctaagccagcctgagcagtcccattataagacatcttcaaacagctaagatcatataagagatatataacaaattgagtaagtgtgagtgtaatcatgtcggagagcaaaccaaaggtttgatttgtacgatatatacttatatatggtctcaagtgaaagcaatggaacagcttctcgattatattct

SEQ ID NO: 97072 - protein, 227 aa, Arabidopsis thaliana
  peptide (1)..(227): Ceres Seq. ID no. 12735983
  misc_feature (74)..(172): Pfam Name: K-box region Pfam Description: K-box region
  misc_feature (1)..(227): Homolog of NCBI NO: 15227254 NR Description: MADS-box protein AGL17; protein id: At2g22630.1
  misc_feature (8)..(200): Homolog of NCBI NO: 862648 NR Description: MADS-box protein AGL17
  misc_feature (1)..(223): Homolog of NCBI NO: 15235748 NR Description: MADS-box protein; protein id: At4g37940.1, by cDNA: gi_18478602 [Arabidopsis thaliana]
  misc_feature (1)..(226): Homolog of NCBI NO: 34452085 NR Description: MADS-box protein 14 [Petunia x hybrida]
  misc_feature (1)..(220): Homolog of NCBI NO: 38344968 NR Description: OSJNBa0072F16.13 [Oryza sativa (japonica
  misc_feature (1)..(227): Homolog of NCBI NO: 7489303 NR Description: MADS-box transcription factor DEFH125 - garden
  misc_feature (1)..(225): Homolog of NCBI NO: 29611976 NR Description: MADS-box transcription factor MADS2 [Zea mays]
  misc_feature (1)..(225): Homolog of NCBI NO: 9964296 NR Description: MADS box protein 2 [Zea mays]
  misc_feature (1)..(227): Homolog of NCBI NO: 30694601 NR Description: MADS-box protein [Arabidopsis thaliana]
  misc_feature (1)..(225): Homolog of NCBI NO: 30313677 NR Description: transcription factor MADS27 [Oryza sativa
MGRGKIVIQKIDDSTSRQVTFSKRRKGLIKKAKELAILCDAEVCLIIFSNTDKLYDFASSSVKSTIERFNTAKMEEQELMNPASEVKFWQREAETLRQELHSLQENYRQLTGVELNGLSVKELQNIESQLEMSLRGIRMKREQILTNEIKELTRKRNLVHHENLELSRKVQRIHQENVELYKKAYGTSNTNGLGHHELVDAVYESHAQVRLQLSQPEQSHYKTSSNS

SEQ ID NO: 97073 - protein, 154 aa, Arabidopsis thaliana
  peptide (1)..(154): Ceres Seq. ID no. 12735984
  misc_feature (1)..(99): Pfam Name: K-box region Pfam Description: K-box region
  misc_feature (1)..(154): Homolog of NCBI NO: 15227254 NR Description: MADS-box protein AGL17; protein id: At2g22630.1
  misc_feature (1)..(127): Homolog of NCBI NO: 862648 NR Description: MADS-box protein AGL17
  misc_feature (1)..(150): Homolog of NCBI NO: 15235748 NR Description: MADS-box protein; protein id: At4g37940.1, by cDNA: gi_18478602 [Arabidopsis thaliana]
  misc_feature (1)..(153): Homolog of NCBI NO: 34452085 NR Description: MADS-box protein 14 [Petunia x hybrida]
  misc_feature (1)..(147): Homolog of NCBI NO: 38344968 NR Description: OSJNBa0072F16.13 [Oryza sativa (japonica
  misc_feature (1)..(154): Homolog of NCBI NO: 7489303 NR Description: MADS-box transcription factor DEFH125 - garden
  misc_feature (1)..(152): Homolog of NCBI NO: 29611976 NR Description: MADS-box transcription factor MADS2 [Zea mays]
  misc_feature (1)..(152): Homolog of NCBI NO: 9964296 NR Description: MADS box protein 2 [Zea mays]
  misc_feature (1)..(154): Homolog of NCBI NO: 30694601 NR Description: MADS-box protein [Arabidopsis thaliana]
  misc_feature (1)..(152): Homolog of NCBI NO: 30313677 NR Description: transcription factor MADS27 [Oryza sativa
MEEQELMNPASEVKFWQREAETLRQELHSLQENYRQLTGVELNGLSVKELQNIESQLEMSLRGIRMKREQILTNEIKELTRKRNLVHHENLELSRKVQRIHQENVELYKKAYGTSNTNGLGHHELVDAVYESHAQVRLQLSQPEQSHYKTSSNS

SEQ ID NO: 97074 - protein, 148 aa, Arabidopsis thaliana
  peptide (1)..(148): Ceres Seq. ID no. 12735985
  misc_feature (1)..(93): Pfam Name: K-box region Pfam Description: K-box region
  misc_feature (1)..(148): Homolog of NCBI NO: 15227254 NR Description: MADS-box protein AGL17; protein id: At2g22630.1
  misc_feature (1)..(121): Homolog of NCBI NO: 862648 NR Description: MADS-box protein AGL17
  misc_feature (1)..(144): Homolog of NCBI NO: 15235748 NR Description: MADS-box protein; protein id: At4g37940.1, by cDNA: gi_18478602 [Arabidopsis thaliana]
  misc_feature (1)..(147): Homolog of NCBI NO: 34452085 NR Description: MADS-box protein 14 [Petunia x hybrida]
  misc_feature (1)..(141): Homolog of NCBI NO: 38344968 NR Description: OSJNBa0072F16.13 [Oryza sativa (japonica
  misc_feature (1)..(148): Homolog of NCBI NO: 7489303 NR Description: MADS-box transcription factor DEFH125 - garden
  misc_feature (1)..(146): Homolog of NCBI NO: 29611976 NR Description: MADS-box transcription factor MADS2 [Zea mays]
  misc_feature (1)..(146): Homolog of NCBI NO: 9964296 NR Description: MADS box protein 2 [Zea mays]
  misc_feature (1)..(148): Homolog of NCBI NO: 30694601 NR Description: MADS-box protein [Arabidopsis thaliana]
  misc_feature (1)..(146): Homolog of NCBI NO: 30313677 NR Description: transcription factor MADS27 [Oryza sativa
MNPASEVKFWQREAETLRQELHSLQENYRQLTGVELNGLSVKELQNIESQLEMSLRGIRMKREQILTNEIKELTRKRNLVHHENLELSRKVQRIHQENVELYKKAYGTSNTNGLGHHELVDAVYESHAQVRLQLSQPEQSHYKTSSNS

SEQ ID NO: 97075 - DNA, 1237 bp, Arabidopsis thaliana
  misc_feature (1)..(1237): Ceres Seq. ID no. 12735989
  misc_feature: MA Experiment ID: 20000179 Result: Up-regulated in Transcription
  misc_feature: MA Experiment 20000179 PARAMETER Experiment Name: At_Germinating_Seeds_P Parameter: Age (hr) Value: 6 vs. 0
  misc_feature: MA Experiment 20000179 PARAMETER Experiment Name: At_Germinating_Seeds_P Parameter: Tissue Value: Germinating Seeds
  misc_feature: MA Experiment ID: 20000180 Result: Up-regulated in Transcription
  misc_feature: MA Experiment 20000180 PARAMETER Experiment Name: At_Germinating_Seeds_P Parameter: Age (hr) Value: 24 vs. 0
  misc_feature: MA Experiment 20000180 PARAMETER Experiment Name: At_Germinating_Seeds_P Parameter: Tissue Value: Germinating Seeds
  misc_feature: MA Experiment ID: 20000184 Result: Up-regulated in Transcription
  misc_feature: MA Experiment 20000184 PARAMETER Experiment Name: At_Shoots__P Parameter: Age (day) Value: 7
  misc_feature: MA Experiment 20000184 PARAMETER Experiment Name: At_Shoots__P Parameter: Tissue Value: Shoots vs. Whole Plant
  misc_feature: MA Experiment ID: 20000185 Result: Up-regulated in Transcription
  misc_feature: MA Experiment 20000185 PARAMETER Experiment Name: At_Roots__P Parameter: Age (day) Value: 7 vs. 21
  misc_feature: MA Experiment 20000185 PARAMETER Experiment Name: At_Roots__P Parameter: Organism Value: A. thaliana
  misc_feature: MA Experiment 20000185 PARAMETER Experiment Name: At_Roots__P Parameter: Tissue Value: Roots vs. Whole Plant
  misc_feature: MA Experiment ID: 20000211 Result: Up-regulated in Transcription
  misc_feature: MA Experiment 20000211 PARAMETER Experiment Name: At_0.001percent_MeJA__P Parameter: Age (day) Value: 14
  misc_feature: MA Experiment 20000211 PARAMETER Experiment Name: At_0.001percent_MeJA__P Parameter: Organism Value: A. thaliana
  misc_feature: MA Experiment 20000211 PARAMETER Experiment Name: At_0.001percent_MeJA__P Parameter: Plant Line Value: WS
  misc_feature: MA Experiment 20000211 PARAMETER Experiment Name: At_0.001percent_MeJA__P Parameter: Timepoint (hr) Value: 1
  misc_feature: MA Experiment 20000211 PARAMETER Experiment Name: At_0.001percent_MeJA__P Parameter: Tissue Value: Aerial
  misc_feature: MA Experiment 20000211 PARAMETER Experiment Name: At_0.001percent_MeJA__P Parameter: Treatment Value: 0.001percent MeJA vs. No Treatment
  misc_feature: MA Experiment ID: 20000234 Result: Down-regulated in Transcription
  misc_feature: MA Experiment 20000234 PARAMETER Experiment Name: At_Siliques_P Parameter: Age (day) Value: 21
  misc_feature: MA Experiment 20000234 PARAMETER Experiment Name: At_Siliques_P Parameter: Organism Value: A. thaliana
  misc_feature: MA Experiment 20000234 PARAMETER Experiment Name: At_Siliques_P Parameter: Plant Line Value: WS
  misc_feature: MA Experiment 20000234 PARAMETER Experiment Name: At_Siliques_P Parameter: Tissue Value: Less Than 5mm Siliques vs. Whole Plant
  misc_feature: MA Experiment ID: 20000235 Result: Down-regulated in Transcription
  misc_feature: MA Experiment 20000235 PARAMETER Experiment Name: At_Siliques_P Parameter: Age (day) Value: 21
  misc_feature: MA Experiment 20000235 PARAMETER Experiment Name: At_Siliques_P Parameter: Organism Value: A. thaliana
  misc_feature: MA Experiment 20000235 PARAMETER Experiment Name: At_Siliques_P Parameter: Plant Line Value: WS
  misc_feature: MA Experiment 20000235 PARAMETER Experiment Name: At_Siliques_P Parameter: Tissue Value: 5-10mm Siliques vs. Whole Plant
  misc_feature: MA Experiment ID: 20000264 Result: Down-regulated in Transcription
  misc_feature: MA Experiment 20000264 PARAMETER Experiment Name: At_Open_Flower_P Parameter: Age (day) Value: 21
  misc_feature: MA Experiment 20000264 PARAMETER Experiment Name: At_Open_Flower_P Parameter: Plant Line Value: WS
  misc_feature: MA Experiment 20000264 PARAMETER Experiment Name: At_Open_Flower_P Parameter: Tissue Value: Open Flower vs. Whole Plant
  misc_feature: MA Experiment ID: 20000437 Result: Down-regulated in Transcription
  misc_feature: MA Experiment 20000437 PARAMETER Experiment Name: At_Drought_P Parameter: Age (day) Value: 8
  misc_feature: MA Experiment 20000437 PARAMETER Experiment Name: At_Drought_P Parameter: Organism Value: A. thaliana
  misc_feature: MA Experiment 20000437 PARAMETER Experiment Name: At_Drought_P Parameter: Plant Line Value: WS
  misc_feature: MA Experiment 20000437 PARAMETER Experiment Name: At_Drought_P Parameter: Timepoint (hr) Value: 24
  misc_feature: MA Experiment 20000437 PARAMETER Experiment Name: At_Drought_P Parameter: Tissue Value: Whole Plant
  misc_feature: MA Experiment 20000437 PARAMETER Experiment Name: At_Drought_P Parameter: Treatment Value: Drought vs. No Drought
  misc_feature: MA Experiment ID: 20000439 Result: Up-regulated in Transcription
  misc_feature: MA Experiment 20000439 PARAMETER Experiment Name: At_Roots__P Parameter: Age (day) Value: 14 vs. 21
  misc_feature: MA Experiment 20000439 PARAMETER Experiment Name: At_Roots__P Parameter: Organism Value: A. thaliana
  misc_feature: MA Experiment 20000439 PARAMETER Experiment Name: At_Roots__P Parameter: Tissue Value: Roots vs. Whole Plant
  misc_feature: MA Experiment ID: 20000443 Result: Up-regulated in Transcription
  misc_feature: MA Experiment 20000443 PARAMETER Experiment Name: At_1uM_BR-BRZ__P Parameter: Tissue Value: Shoot Apices
  misc_feature: MA Experiment 20000443 PARAMETER Experiment Name: At_1uM_BR-BRZ__P Parameter: Treatment Value: 1uM BRZ vs. No Treatment
  misc_feature: MA Experiment ID: 20000452 Result: Up-regulated in Transcription
  misc_feature: MA Experiment 20000452 PARAMETER Experiment Name: At_CS6879_Shoots-Roots_P Parameter: Age (day) Value: 14
  misc_feature: MA Experiment 20000452 PARAMETER Experiment Name: At_CS6879_Shoots-Roots_P Parameter: Organism Value: A. thaliana
  misc_feature: MA Experiment 20000452 PARAMETER Experiment Name: At_CS6879_Shoots-Roots_P Parameter: Plant Line Value: CS6879 vs. WS
  misc_feature: MA Experiment 20000452 PARAMETER Experiment Name: At_CS6879_Shoots-Roots_P Parameter: Tissue Value: Shoots
  misc_feature: MA Experiment ID: 20000495 Result: Down-regulated in Transcription
  misc_feature: MA Experiment 20000495 PARAMETER Experiment Name: At_Guard_Cells_P Parameter: Harvest Date Value: 8/2/2002
  misc_feature: MA Experiment 20000495 PARAMETER Experiment Name: At_Guard_Cells_P Parameter: Organism Value: A. thaliana
  misc_feature: MA Experiment 20000495 PARAMETER Experiment Name: At_Guard_Cells_P Parameter: Tissue Value: Guard Cells vs. Leaves
  misc_feature: MA Experiment ID: 20000496 Result: Down-regulated in Transcription
  misc_feature: MA Experiment 20000496 PARAMETER Experiment Name: At_Guard_Cells_P Parameter: Harvest Date Value: 7/19/2002
  misc_feature: MA Experiment 20000496 PARAMETER Experiment Name: At_Guard_Cells_P Parameter: Organism Value: Canola
  misc_feature: MA Experiment 20000496 PARAMETER Experiment Name: At_Guard_Cells_P Parameter: Tissue Value: Guard Cells vs. Leaves
  misc_feature: MA Experiment ID: 20001248 Result: Down-regulated in Transcription
  misc_feature: MA Experiment 20001248 PARAMETER Experiment Name: At_Far-red-induction_P Parameter: Age (day) Value: 7
  misc_feature: MA Experiment 20001248 PARAMETER Experiment Name: At_Far-red-induction_P Parameter: Light Value: Far-red vs. White
  misc_feature: MA Experiment 20001248 PARAMETER Experiment Name: At_Far-red-induction_P Parameter: Organism Value: A. thaliana
  misc_feature: MA Experiment 20001248 PARAMETER Experiment Name: At_Far-red-induction_P Parameter: Plant Line Value: Columbia
  misc_feature: MA Experiment 20001248 PARAMETER Experiment Name: At_Far-red-induction_P Parameter: Timepoint (hr) Value: 4
  misc_feature: MA Experiment 20001248 PARAMETER Experiment Name: At_Far-red-induction_P Parameter: Tissue Value: Whole Plant
atggatgattcaagctttatggatttgatgatcgacactgacgagtatctgatcgatgactgggaatccgatttcccgatatgcggggaaactaacaccaaccccggttccgagtctggatctggaaccgggtttgagttgctagcagaaagaccaacgaagcaaatgaaaaccaacaacaacatgaattcaacatcttcttctccgtcgtcttcttcttcttctggttctcgcacgtcacaagtgatctcatttgggtctccagacacgaaaaccaacccggtcgagacatctttgaacttctccaaccaagtaagcatggatcagaaagtggggtcgaaaagaaaagattgtgttaacaatggaggaagaagagaaccacatctattgaaagaacatgttttggctgaacgaaaacgtcgacaaaagctcaacgagcgtttgattgctctctctgctcttcttcctggcctcaaaaagacggacaaggcaacagttcttgaagatgccatcaaacatttgaaacaacttcaagagcgggtaaagaagctggaggaggagcgagtggtgaccaagaaaatggatcaatcaattatattggtgaagagatctcaagtgtatttagatgatgattcttcatcttattcttctacttgctctgctgcgtctcctctgtcttcttcttcggacgaagtttcgatcttcaaacaaacaatgcctatgatcgaagcccgagtttcagacagagatttgttgattagagtccattgtgagaagaacaaagggtgtatgattaagatcttaagttccttggagaagtttcgtcttgaagtagtcaatagcttcactttaccatttggaaattcaactctcgttataaccattctcactaagatggacaacaaattttctcgaccagttgaagaagtggtgaagaacataagagttgcgttagctgaataatattttaaaaaacgtttatgtgaatttcgcagtggttaaacgtgttagatttggtctccaattttgaccagatcactcggtttagttgaataatgagtagttggataataaaaccagatatatgcacgaaatatgggattttgtcgtttgttgagtgcaaaagctggattggtgtgtgtacctaattatggctgtatcattggttttgatactttgatatatatttttccccaatatcattgggttggttcaataatgaagtacctaagtgttc

SEQ ID NO: 97076 - protein, 320 aa, Arabidopsis thaliana
  peptide (1)..(320): Ceres Seq. ID no. 12735990
  misc_feature (129)..(178): Pfam Name: Helix-loop-helix DNA-binding domain Pfam Description: Helix-loop-helix DNA-binding domain
  misc_feature (1)..(320): Homolog of NCBI NO: 20127018 NR Description: putative bHLH transcription factor [Arabidopsis
  misc_feature (7)..(320): Homolog of NCBI NO: 30681819 NR Description: bHLH transcription factor -related [Arabidopsis
  misc_feature (1)..(299): Homolog of NCBI NO: 25412138 NR Description: probable bHLH transcription factor [imported] - thaliana >gi|3738091|gb|AAC63588.1| putative bHLH transcription
  misc_feature (11)..(318): Homolog of NCBI NO: 30681813 NR Description: bHLH protein [Arabidopsis thaliana]
  misc_feature (11)..(318): Homolog of NCBI NO: 20127016 NR Description: putative bHLH transcription factor [Arabidopsis
  misc_feature (11)..(299): Homolog of NCBI NO: 25412136 NR Description: probable bHLH transcription factor [imported] - thaliana >gi|3738090|gb|AAC63587.1| putative bHLH transcription [Arabidopsis thaliana] >gi|20197758|gb|AAM15235.1| putative bHLH
  misc_feature (47)..(320): Homolog of NCBI NO: 30681807 NR Description: bHLH protein family [Arabidopsis thaliana]
  misc_feature (25)..(319): Homolog of NCBI NO: 20127022 NR Description: putative bHLH transcription factor [Arabidopsis
  misc_feature (25)..(319): Homolog of NCBI NO: 30691602 NR Description: bHLH protein family [Arabidopsis thaliana]
  misc_feature (25)..(320): Homolog of NCBI NO: 7487499 NR Description: hypothetical protein T28I19.130 - Arabidopsis >gi|4490730|emb|CAB38933.1| putative protein [Arabidopsis >gi|7270768|emb|CAB80450.1| putative protein [Arabidopsis
MDDSSFMDLMIDTDEYLIDDWESDFPICGETNTNPGSESGSGTGFELLAERPTKQMKTNNNMNSTSSSPSSSSSSGSRTSQVISFGSPDTKTNPVETSLNFSNQVSMDQKVGSKRKDCVNNGGRREPHLLKEHVLAERKRRQKLNERLIALSALLPGLKKTDKATVLEDAIKHLKQLQERVKKLEEERVVTKKMDQSIILVKRSQVYLDDDSSSYSSTCSAASPLSSSSDEVSIFKQTMPMIEARVSDRDLLIRVHCEKNKGCMIKILSSLEKFRLEVVNSFTLPFGNSTLVITILTKMDNKFSRPVEEVVKNIRVALAE

SEQ ID NO: 97077 - protein, 314 aa, Arabidopsis thaliana
  peptide (1)..(314): Ceres Seq. ID no. 12735991
  misc_feature (123)..(172): Pfam Name: Helix-loop-helix DNA-binding domain Pfam Description: Helix-loop-helix DNA-binding domain
  misc_feature (1)..(314): Homolog of NCBI NO: 20127018 NR Description: putative bHLH transcription factor [Arabidopsis
  misc_feature (1)..(314): Homolog of NCBI NO: 30681819 NR Description: bHLH transcription factor -related [Arabidopsis
  misc_feature (1)..(293): Homolog of NCBI NO: 25412138 NR Description: probable bHLH transcription factor [imported] - thaliana >gi|3738091|gb|AAC63588.1| putative bHLH transcription
  misc_feature (5)..(312): Homolog of NCBI NO: 30681813 NR Description: bHLH protein [Arabidopsis thaliana]
  misc_feature (5)..(312): Homolog of NCBI NO: 20127016 NR Description: putative bHLH transcription factor [Arabidopsis
  misc_feature (5)..(293): Homolog of NCBI NO: 25412136 NR Description: probable bHLH transcription factor [imported] - thaliana >gi|3738090|gb|AAC63587.1| putative bHLH transcription [Arabidopsis thaliana] >gi|20197758|gb|AAM15235.1| putative bHLH
  misc_feature (41)..(314): Homolog of NCBI NO: 30681807 NR Description: bHLH protein family [Arabidopsis thaliana]
  misc_feature (19)..(313): Homolog of NCBI NO: 20127022 NR Description: putative bHLH transcription factor [Arabidopsis
  misc_feature (19)..(313): Homolog of NCBI NO: 30691602 NR Description: bHLH protein family [Arabidopsis thaliana]
  misc_feature (19)..(314): Homolog of NCBI NO: 7487499 NR Description: hypothetical protein T28I19.130 - Arabidopsis >gi|4490730|emb|CAB38933.1| putative protein [Arabidopsis >gi|7270768|emb|CAB80450.1| putative protein [Arabidopsis
MDLMIDTDEYLIDDWESDFPICGETNTNPGSESGSGTGFELLAERPTKQMKTNNNMNSTSSSPSSSSSSGSRTSQVISFGSPDTKTNPVETSLNFSNQVSMDQKVGSKRKDCVNNGGRREPHLLKEHVLAERKRRQKLNERLIALSALLPGLKKTDKATVLEDAIKHLKQLQERVKKLEEERVVTKKMDQSIILVKRSQVYLDDDSSSYSSTCSAASPLSSSSDEVSIFKQTMPMIEARVSDRDLLIRVHCEKNKGCMIKILSSLEKFRLEVVNSFTLPFGNSTLVITILTKMDNKFSRPVEEVVKNIRVALAE

SEQ ID NO: 97078 - protein, 311 aa, Arabidopsis thaliana
  peptide (1)..(311): Ceres Seq. ID no. 12735992
  misc_feature (120)..(169): Pfam Name: Helix-loop-helix DNA-binding domain Pfam Description: Helix-loop-helix DNA-binding domain
  misc_feature (1)..(311): Homolog of NCBI NO: 20127018 NR Description: putative bHLH transcription factor [Arabidopsis
  misc_feature (1)..(311): Homolog of NCBI NO: 30681819 NR Description: bHLH transcription factor -related [Arabidopsis
  misc_feature (1)..(290): Homolog of NCBI NO: 25412138 NR Description: probable bHLH transcription factor [imported] - thaliana >gi|3738091|gb|AAC63588.1| putative bHLH transcription
  misc_feature (2)..(309): Homolog of NCBI NO: 30681813 NR Description: bHLH protein [Arabidopsis thaliana]
  misc_feature (2)..(309): Homolog of NCBI NO: 20127016 NR Description: putative bHLH transcription factor [Arabidopsis
  misc_feature (2)..(290): Homolog of NCBI NO: 25412136 NR Description: probable bHLH transcription factor [imported] - thaliana >gi|3738090|gb|AAC63587.1| putative bHLH transcription [Arabidopsis thaliana] >gi|20197758|gb|AAM15235.1| putative bHLH
  misc_feature (38)..(311): Homolog of NCBI NO: 30681807 NR Description: bHLH protein family [Arabidopsis thaliana]
  misc_feature (16)..(310): Homolog of NCBI NO: 20127022 NR Description: putative bHLH transcription factor [Arabidopsis
  misc_feature (16)..(310): Homolog of NCBI NO: 30691602 NR Description: bHLH protein family [Arabidopsis thaliana]
  misc_feature (16)..(311): Homolog of NCBI NO: 7487499 NR Description: hypothetical protein T28I19.130 - Arabidopsis >gi|4490730|emb|CAB38933.1| putative protein [Arabidopsis >gi|7270768|emb|CAB80450.1| putative protein [Arabidopsis
MIDTDEYLIDDWESDFPICGETNTNPGSESGSGTGFELLAERPTKQMKTNNNMNSTSSSPSSSSSSGSRTSQVISFGSPDTKTNPVETSLNFSNQVSMDQKVGSKRKDCVNNGGRREPHLLKEHVLAERKRRQKLNERLIALSALLPGLKKTDKATVLEDAIKHLKQLQERVKKLEEERVVTKKMDQSIILVKRSQVYLDDDSSSYSSTCSAASPLSSSSDEVSIFKQTMPMIEARVSDRDLLIRVHCEKNKGCMIKILSSLEKFRLEVVNSFTLPFGNSTLVITILTKMDNKFSRPVEEVVKNIRVALAE

SEQ ID NO: 97079 - DNA, 1758 bp, Arabidopsis thaliana
  misc_feature (1)..(1758): Ceres Seq. ID no. 12736002
  misc_feature: MA Experiment ID: 20000440 Result: Up-regulated in Transcription
  misc_feature: MA Experiment 20000440 PARAMETER Experiment Name: At_Closed-Flower__Sub_P Parameter: Tissue Value: Closed Flower vs. Whole Plant
atgaaaccattcgtaatcaggaaccttccaagatttcaatcaactcttagatcttcgcttctctacacaaatcatcgcccctcttctcgattctctctctctactcgtcgattcaccaccggagccacctacattcgccgatggaaagcaacggcggcgcagacactcaaactctccgccgtgaactccacggtgatgatgaaaccggcgaagattgcgttggatcaatttatagcttctctatttacgtttctgcttctctacattttgcgtcggagtagtaataagaataagaagaatcgtggactcgtcgtttcccaaaacgataccgtatccaaaaatcttgaaacggaggttgattctggcactgatgtgatcatcgtcggagctggtgtcgccggttccgctcttgctcatactctcggcaaggaaggaagaagagtgcacgttatagaaagagatttttctgagcaagacagaatcgttggtgaattgcttcaacctggtggttatttgaagttaatagaacttggacttgaagattgtgtgaagaagattgatgctcaacgagttcttggttatgttctctttaaagatgggaagcatactaaacttgcttaccccttggaaacgtttgattcggatgtagccgggagaagtttccataatgggagatttgtacagagaatgcgagaaaaagcccttactctttcaaatgtacgattggaacaaggaacggttacgtcgttgcttgaagaacacgggacaattaaaggggttcgatacagaacaaaagagggcaatgagtttagatcatttgctcctctcacaattgtatgtgatggttgtttctccaacttgcgtcgctctctttgcaaacctaaggtggatgtgccatctacttttgtgggtcttgtcttggagaactgtgaacttccatttgcaaatcacgggcacgttgttctcggtgacccatcacccatcttaatgtatcccatcagcagttctgaagtccgttgcttagtagatgtaccgggtcaaaaacttcctcccattgcaaatggtgaaatggcaaagtatctgaaaacacgggttgcgcctcaagtaccaaccaaggtccgtgaagcattcatcaccgctgttgagaaaggtaatatcagaaccatgccaaaccgaagcatgccagctgatccgattcctactcctggagctcttcttcttggtgatgcattcaacatgagacatcctttaaccggtggtgggatgaccgttgcattggcggatatagttgtactccgtgatcttctaaggccaattcgcaaccttaatgacaaagaagctttgtctaagtatattgaatccttttacacactacgaaaacctgtagcttccaccattaatacattggcggatgcgttgtataaggtctttttagcatcttcagatgaagcaagaacggaaatgcgtgaagcttgcttcgactatcttagccttggaggtgttttctcatctggtccagttgcattgctctctggtttaaaccctcgtcctctgagtttagttctccacttctttgctgtggcgatctacgctgtttgtcgtttaatgctaccatttccttcgattgagagcttttggcttggagctaggataatctcgagtgcttcaagcatcatctttccaataattaaagcagagggagttagacaaatgttcttccctcgtacaatccctgccatataccgtgctcctccttaa

SEQ ID NO: 97080 - protein, 585 aa, Arabidopsis thaliana
  peptide (1)..(585): Ceres Seq. ID no. 12736003
  misc_feature (273)..(471): Pfam Name: Monooxygenase Pfam Description: Monooxygenase
  misc_feature (1)..(585): Homolog of NCBI NO: 15227757 NR Description: squalene monooxygenase (squalene epoxidase)(SE), protein id: At2g22830.1 [Arabidopsis thaliana]
  misc_feature (77)..(585): Homolog of NCBI NO: 18420113 NR Description: squalene monooxygenase (squalene epoxidase)(SE), protein id: At4g37760.1, supported by cDNA: 118648., supported by gi_18086576 [Arabidopsis thaliana] >gi|18086577|gb|AAL57712.1|
  misc_feature (77)..(585): Homolog of NCBI NO: 21537043 NR Description: squalene epoxidase-like protein [Arabidopsis
  misc_feature (77)..(585): Homolog of NCBI NO: 7488348 NR Description: squalene monooxygenase (EC 1.14.99.7) -
  misc_feature (120)..(584): Homolog of NCBI NO: 27311241 NR Description: Putative Squalene monooxygenase [Oryza sativa
  misc_feature (78)..(585): Homolog of NCBI NO: 27475610 NR Description: squalene monooxygenase 2 [Medicago truncatula]
  misc_feature (78)..(585): Homolog of NCBI NO: 27475612 NR Description: squalene monooxygenase 1 [Medicago truncatula]
  misc_feature (67)..(585): Homolog of NCBI NO: 6685403 NR Description: Squalene monooxygenase (Squalene epoxidase) (SE)
  misc_feature (120)..(585): Homolog of NCBI NO: 27311240 NR Description: Putative Squalene monooxygenase [Oryza sativa
  misc_feature (74)..(584): Homolog of NCBI NO: 18406296 NR Description: squalene monooxygenase, putative; protein id: [Arabidopsis thaliana] >gi|25455713|pir||T52462 hypothetical
MKPFVIRNLPRFQSTLRSSLLYTNHRPSSRFSLSTRRFTTGATYIRRWKATAAQTLKLSAVNSTVMMKPAKIALDQFIASLFTFLLLYILRRSSNKNKKNRGLVVSQNDTVSKNLETEVDSGTDVIIVGAGVAGSALAHTLGKEGRRVHVIERDFSEQDRIVGELLQPGGYLKLIELGLEDCVKKIDAQRVLGYVLFKDGKHTKLAYPLETFDSDVAGRSFHNGRFVQRMREKALTLSNVRLEQGTVTSLLEEHGTIKGVRYRTKEGNEFRSFAPLTIVCDGCFSNLRRSLCKPKVDVPSTFVGLVLENCELPFANHGHVVLGDPSPILMYPISSSEVRCLVDVPGQKLPPIANGEMAKYLKTRVAPQVPTKVREAFITAVEKGNIRTMPNRSMPADPIPTPGALLLGDAFNMRHPLTGGGMTVALADIVVLRDLLRPIRNLNDKEALSKYIESFYTLRKPVASTINTLADALYKVFLASSDEARTEMREACFDYLSLGGVFSSGPVALLSGLNPRPLSLVLHFFAVAIYAVCRLMLPFPSIESFWLGARIISSASSIIFPIIKAEGVRQMFFPRTIPAIYRAPP

SEQ ID NO: 97081 - protein, 520 aa, Arabidopsis thaliana
  peptide (1)..(520): Ceres Seq. ID no. 12736004
  misc_feature (208)..(406): Pfam Name: Monooxygenase Pfam Description: Monooxygenase
  misc_feature (1)..(520): Homolog of NCBI NO: 15227757 NR Description: squalene monooxygenase (squalene epoxidase)(SE), protein id: At2g22830.1 [Arabidopsis thaliana]
  misc_feature (12)..(520): Homolog of NCBI NO: 18420113 NR Description: squalene monooxygenase (squalene epoxidase)(SE), protein id: At4g37760.1, supported by cDNA: 118648., supported by gi_18086576 [Arabidopsis thaliana] >gi|18086577|gb|AAL57712.1|
  misc_feature (12)..(520): Homolog of NCBI NO: 21537043 NR Description: squalene epoxidase-like protein [Arabidopsis
  misc_feature (12)..(520): Homolog of NCBI NO: 7488348 NR Description: squalene monooxygenase (EC 1.14.99.7) -
  misc_feature (55)..(519): Homolog of NCBI NO: 27311241 NR Description: Putative Squalene monooxygenase [Oryza sativa
  misc_feature (13)..(520): Homolog of NCBI NO: 27475610 NR Description: squalene monooxygenase 2 [Medicago truncatula]
  misc_feature (13)..(520): Homolog of NCBI NO: 27475612 NR Description: squalene monooxygenase 1 [Medicago truncatula]
  misc_feature (2)..(520): Homolog of NCBI NO: 6685403 NR Description: Squalene monooxygenase (Squalene epoxidase) (SE)
  misc_feature (55)..(520): Homolog of NCBI NO: 27311240 NR Description: Putative Squalene monooxygenase [Oryza sativa
  misc_feature (9)..(519): Homolog of NCBI NO: 18406296 NR Description: squalene monooxygenase, putative; protein id: [Arabidopsis thaliana] >gi|25455713|pir||T52462 hypothetical
MMKPAKIALDQFIASLFTFLLLYILRRSSNKNKKNRGLVVSQNDTVSKNLETEVDSGTDVIIVGAGVAGSALAHTLGKEGRRVHVIERDFSEQDRIVGELLQPGGYLKLIELGLEDCVKKIDAQRVLGYVLFKDGKHTKLAYPLETFDSDVAGRSFHNGRFVQRMREKALTLSNVRLEQGTVTSLLEEHGTIKGVRYRTKEGNEFRSFAPLTIVCDGCFSNLRRSLCKPKVDVPSTFVGLVLENCELPFANHGHVVLGDPSPILMYPISSSEVRCLVDVPGQKLPPIANGEMAKYLKTRVAPQVPTKVREAFITAVEKGNIRTMPNRSMPADPIPTPGALLLGDAFNMRHPLTGGGMTVALADIVVLRDLLRPIRNLNDKEALSKYIESFYTLRKPVASTINTLADALYKVFLASSDEARTEMREACFDYLSLGGVFSSGPVALLSGLNPRPLSLVLHFFAVAIYAVCRLMLPFPSIESFWLGARIISSASSIIFPIIKAEGVRQMFFPRTIPAIYRAPP

SEQ ID NO: 97082 - protein, 519 aa, Arabidopsis thaliana
  peptide (1)..(519): Ceres Seq. ID no. 12736005
  misc_feature (207)..(405): Pfam Name: Monooxygenase Pfam Description: Monooxygenase
  misc_feature (1)..(519): Homolog of NCBI NO: 15227757 NR Description: squalene monooxygenase (squalene epoxidase)(SE), protein id: At2g22830.1 [Arabidopsis thaliana]
  misc_feature (11)..(519): Homolog of NCBI NO: 18420113 NR Description: squalene monooxygenase (squalene epoxidase)(SE), protein id: At4g37760.1, supported by cDNA: 118648., supported by gi_18086576 [Arabidopsis thaliana] >gi|18086577|gb|AAL57712.1|
  misc_feature (11)..(519): Homolog of NCBI NO: 21537043 NR Description: squalene epoxidase-like protein [Arabidopsis
  misc_feature (11)..(519): Homolog of NCBI NO: 7488348 NR Description: squalene monooxygenase (EC 1.14.99.7) -
  misc_feature (54)..(518): Homolog of NCBI NO: 27311241 NR Description: Putative Squalene monooxygenase [Oryza sativa
  misc_feature (12)..(519): Homolog of NCBI NO: 27475610 NR Description: squalene monooxygenase 2 [Medicago truncatula]
  misc_feature (12)..(519): Homolog of NCBI NO: 27475612 NR Description: squalene monooxygenase 1 [Medicago truncatula]
  misc_feature (1)..(519): Homolog of NCBI NO: 6685403 NR Description: Squalene monooxygenase (Squalene epoxidase) (SE)
  misc_feature (54)..(519): Homolog of NCBI NO: 27311240 NR Description: Putative Squalene monooxygenase [Oryza sativa
  misc_feature (8)..(518): Homolog of NCBI NO: 18406296 NR Description: squalene monooxygenase, putative; protein id: [Arabidopsis thaliana] >gi|25455713|pir||T52462 hypothetical
MKPAKIALDQFIASLFTFLLLYILRRSSNKNKKNRGLVVSQNDTVSKNLETEVDSGTDVIIVGAGVAGSALAHTLGKEGRRVHVIERDFSEQDRIVGELLQPGGYLKLIELGLEDCVKKIDAQRVLGYVLFKDGKHTKLAYPLETFDSDVAGRSFHNGRFVQRMREKALTLSNVRLEQGTVTSLLEEHGTIKGVRYRTKEGNEFRSFAPLTIVCDGCFSNLRRSLCKPKVDVPSTFVGLVLENCELPFANHGHVVLGDPSPILMYPISSSEVRCLVDVPGQKLPPIANGEMAKYLKTRVAPQVPTKVREAFITAVEKGNIRTMPNRSMPADPIPTPGALLLGDAFNMRHPLTGGGMTVALADIVVLRDLLRPIRNLNDKEALSKYIESFYTLRKPVASTINTLADALYKVFLASSDEARTEMREACFDYLSLGGVFSSGPVALLSGLNPRPLSLVLHFFAVAIYAVCRLMLPFPSIESFWLGARIISSASSIIFPIIKAEGVRQMFFPRTIPAIYRAPP

SEQ ID NO: 97083 - DNA, 1308 bp, Arabidopsis thaliana
  misc_feature (1)..(1308): Ceres Seq. ID no. 12736009
  misc_feature: MA Experiment ID: 20000314 Result: Down-regulated in Transcription
  misc_feature: MA Experiment 20000314 PARAMETER Experiment Name: At_14day_Shoots-Roots_Sub_P Parameter: Age (day) Value: 14
  misc_feature: MA Experiment 20000314 PARAMETER Experiment Name: At_14day_Shoots-Roots_Sub_P Parameter: Organism Value: A. thaliana
  misc_feature: MA Experiment 20000314 PARAMETER Experiment Name: At_14day_Shoots-Roots_Sub_P Parameter: Plant Line Value: WS
  misc_feature: MA Experiment 20000314 PARAMETER Experiment Name: At_14day_Shoots-Roots_Sub_P Parameter: Tissue Value: Roots vs. Whole Plant
  misc_feature: MA Experiment ID: 20000440 Result: Down-regulated in Transcription
  misc_feature: MA Experiment 20000440 PARAMETER Experiment Name: At_Closed-Flower__Sub_P Parameter: Tissue Value: Closed Flower vs. Whole Plant
  misc_feature: MA Experiment ID: 20001807 Result: Up-regulated in Transcription
  misc_feature: MA Experiment 20001807 PARAMETER Experiment Name: At_50mM_NH4NO3_L-to-H_Sub_P Parameter: Timepoint (hr) Value: 6
  misc_feature: MA Experiment 20001807 PARAMETER Experiment Name: At_50mM_NH4NO3_L-to-H_Sub_P Parameter: Tissue Value: Leaf
  misc_feature: MA Experiment 20001807 PARAMETER Experiment Name: At_50mM_NH4NO3_L-to-H_Sub_P Parameter: Treatment Value: 50mM NH4NO3 vs 100mM Mannitol
atgaaatcaacaccaaaattgctgcttttacttctgtttatcataaatcatcatgttgattcgggctctatcgtcaagtttcttcccggctttgaaggccctcttcctttcgaactcgaaaccgggtacattggtattggtgaggaagaggatgtgcaattgttctactactttataaagtctgagagaaatccaaaagaagaccctcttcttctctggttaagtggaggacctgggtgttcttctatcactggccttcttttcgagaatggacccttggctttgaagtccaaggtttacaatggaagtgtcccttctttggtctccactacatattcgtggacaaagacggcgaacataatattcttggatcagcctattggagctggcttctcctactcaagaatcccacttattgatacgcctagtgacacaggcgaagttaagaatatccatgagtttctccaaaagtggttaagcaagcatccacagttttcttccaatcctttctatgctagcggagattcttattccggtatgattgttccagccctcgttcaagaaatttcgaaaggaaattatatatgttgcaaacctcctataaatctacagggctatatactcgggaacccaataacatattttgaagtcgaccaaaactatcgcattccattttctcatggaatggcacttatttcagatgaactatacgagtcaattaggagagactgcaaaggaaattatttcaacgtggatccacgtaacacaaaatgtttgaaacttgttgaagaataccataagtgtaccgacgaactaaatgaattcaatatattatcaccagattgcgacacgacatctcctgattgctttttatatccatattatctccttggctactggatcaacgacgagagcgttcgcgatgctcttcatgttaataagagcagtattggaaaatgggagcgatgtacttatcaaaatagaatcccatacaacaaagacatcaataacagcataccataccatatgaataacagtattagtggctaccgatctctcatctacagtggtgatcatgatttggtggttcctttccttgcaactcaagcctggataaaatctctaaattactccatcattcatgaatggagaccttggatgattaaagatcaaatcgctggatacacgagaacttattccaataagatgacatttgctactgtcaaaggaagtgggcacacagcagagtataaaccaaacgagacttttatcatgtttcaaaggtggattagtggtcatgacctttaa

SEQ ID NO: 97084 - protein, 435 aa, Arabidopsis thaliana
  peptide (1)..(435): Ceres Seq. ID no. 12736010
  misc_feature (29)..(432): Pfam Name: Serine carboxypeptidase Pfam Description: Serine carboxypeptidase
  misc_feature (1)..(435): Homolog of NCBI NO: 15227765 NR Description: putative serine carboxypeptidase I; protein id: [Arabidopsis thaliana] >gi|25289780|pir||E84618 probable serine
  misc_feature (1)..(395): Homolog of NCBI NO: 30681870 NR Description: serine carboxypeptidase -related [Arabidopsis
  misc_feature (1)..(435): Homolog of NCBI NO: 15227769 NR Description: putative serine carboxypeptidase II; protein id:
  misc_feature (1)..(435): Homolog of NCBI NO: 15227772 NR Description: putative serine carboxypeptidase I; protein id: supported by cDNA: 33165. [Arabidopsis thaliana]
  misc_feature (6)..(435): Homolog of NCBI NO: 15227773 NR Description: putative serine carboxypeptidase I; protein id: [Arabidopsis thaliana] >gi|25289775|pir||E84619 probable serine
  misc_feature (6)..(435): Homolog of NCBI NO: 30681900 NR Description: serine carboxypeptidase -related [Arabidopsis
  misc_feature (6)..(435): Homolog of NCBI NO: 18400137 NR Description: putative serine carboxypeptidase I; protein id: [Arabidopsis thaliana] >gi|20197128|gb|AAC17816.2| putative carboxypeptidase I [Arabidopsis thaliana]
  misc_feature (7)..(435): Homolog of NCBI NO: 25289782 NR Description: probable serine carboxypeptidase I [imported] - thaliana >gi|3169172|gb|AAC17815.1| putative serine I [Arabidopsis thaliana] >gi|20197276|gb|AAM15008.1| putative
  misc_feature (3)..(435): Homolog of NCBI NO: 15228300 NR Description: putative glucose acyltransferase; protein id: [Arabidopsis thaliana] >gi|8567775|gb|AAF76347.1| glucose putative [Arabidopsis thaliana]
  misc_feature (7)..(435): Homolog of NCBI NO: 15219433 NR Description: putative serine carboxypeptidase; protein id: [Arabidopsis thaliana] >gi|25289779|pir||C96759 protein serine
MKSTPKLLLLLLFIINHHVDSGSIVKFLPGFEGPLPFELETGYIGIGEEEDVQLFYYFIKSERNPKEDPLLLWLSGGPGCSSITGLLFENGPLALKSKVYNGSVPSLVSTTYSWTKTANIIFLDQPIGAGFSYSRIPLIDTPSDTGEVKNIHEFLQKWLSKHPQFSSNPFYASGDSYSGMIVPALVQEISKGNYICCKPPINLQGYILGNPITYFEVDQNYRIPFSHGMALISDELYESIRRDCKGNYFNVDPRNTKCLKLVEEYHKCTDELNEFNILSPDCDTTSPDCFLYPYYLLGYWINDESVRDALHVNKSSIGKWERCTYQNRIPYNKDINNSIPYHMNNSISGYRSLIYSGDHDLVVPFLATQAWIKSLNYSIIHEWRPWMIKDQIAGYTRTYSNKMTFATVKGSGHTAEYKPNETFIMFQRWISGHDL

SEQ ID NO: 97085 - protein, 256 aa, Arabidopsis thaliana
  peptide (1)..(256): Ceres Seq. ID no. 12736011
  misc_feature (1)..(253): Pfam Name: Serine carboxypeptidase Pfam Description: Serine carboxypeptidase
  misc_feature (1)..(256): Homolog of NCBI NO: 15227765 NR Description: putative serine carboxypeptidase I; protein id: [Arabidopsis thaliana] >gi|25289780|pir||E84618 probable serine
  misc_feature (1)..(216): Homolog of NCBI NO: 30681870 NR Description: serine carboxypeptidase -related [Arabidopsis
  misc_feature (1)..(256): Homolog of NCBI NO: 15227769 NR Description: putative serine carboxypeptidase II; protein id:
  misc_feature (1)..(256): Homolog of NCBI NO: 15227772 NR Description: putative serine carboxypeptidase I; protein id: supported by cDNA: 33165. [Arabidopsis thaliana]
  misc_feature (1)..(256): Homolog of NCBI NO: 15227773 NR Description: putative serine carboxypeptidase I; protein id: [Arabidopsis thaliana] >gi|25289775|pir||E84619 probable serine
  misc_feature (1)..(256): Homolog of NCBI NO: 30681900 NR Description: serine carboxypeptidase -related [Arabidopsis
  misc_feature (1)..(256): Homolog of NCBI NO: 18400137 NR Description: putative serine carboxypeptidase I; protein id: [Arabidopsis thaliana] >gi|20197128|gb|AAC17816.2| putative carboxypeptidase I [Arabidopsis thaliana]
  misc_feature (1)..(256): Homolog of NCBI NO: 25289782 NR Description: probable serine carboxypeptidase I [imported] - thaliana >gi|3169172|gb|AAC17815.1| putative serine I [Arabidopsis thaliana] >gi|20197276|gb|AAM15008.1| putative
  misc_feature (1)..(256): Homolog of NCBI NO: 15228300 NR Description: putative glucose acyltransferase; protein id: [Arabidopsis thaliana] >gi|8567775|gb|AAF76347.1| glucose putative [Arabidopsis thaliana]
  misc_feature (1)..(256): Homolog of NCBI NO: 15219433 NR Description: putative serine carboxypeptidase; protein id: [Arabidopsis thaliana] >gi|25289779|pir||C96759 protein serine
MIVPALVQEISKGNYICCKPPINLQGYILGNPITYFEVDQNYRIPFSHGMALISDELYESIRRDCKGNYFNVDPRNTKCLKLVEEYHKCTDELNEFNILSPDCDTTSPDCFLYPYYLLGYWINDESVRDALHVNKSSIGKWERCTYQNRIPYNKDINNSIPYHMNNSISGYRSLIYSGDHDLVVPFLATQAWIKSLNYSIIHEWRPWMIKDQIAGYTRTYSNKMTFATVKGSGHTAEYKPNETFIMFQRWISGHDL

SEQ ID NO: 97086 - DNA, 1329 bp, Arabidopsis thaliana
  misc_feature (1)..(1329): Ceres Seq. ID no. 12736012
  misc_feature: MA Experiment ID: 20000307 Result: Up-regulated in Transcription
  misc_feature: MA Experiment 20000307 PARAMETER Experiment Name: At_Germinating_Seeds_Sub_P Parameter: Age (hr) Value: 24 vs. 0
  misc_feature: MA Experiment 20000307 PARAMETER Experiment Name: At_Germinating_Seeds_Sub_P Parameter: Organism Value: A. thaliana
  misc_feature: MA Experiment 20000307 PARAMETER Experiment Name: At_Germinating_Seeds_Sub_P Parameter: Plant Line Value: WS
  misc_feature: MA Experiment 20000307 PARAMETER Experiment Name: At_Germinating_Seeds_Sub_P Parameter: Tissue Value: Germinating Seeds
  misc_feature: MA Experiment ID: 20000314 Result: Up-regulated in Transcription
  misc_feature: MA Experiment 20000314 PARAMETER Experiment Name: At_14day_Shoots-Roots_Sub_P Parameter: Age (day) Value: 14
  misc_feature: MA Experiment 20000314 PARAMETER Experiment Name: At_14day_Shoots-Roots_Sub_P Parameter: Organism Value: A. thaliana
  misc_feature: MA Experiment 20000314 PARAMETER Experiment Name: At_14day_Shoots-Roots_Sub_P Parameter: Plant Line Value: WS
  misc_feature: MA Experiment 20000314 PARAMETER Experiment Name: At_14day_Shoots-Roots_Sub_P Parameter: Tissue Value: Roots vs. Whole Plant
  misc_feature: MA Experiment ID: 20000315 Result: Down-regulated in Transcription
  misc_feature: MA Experiment 20000315 PARAMETER Experiment Name: At_14day_Shoots-Roots_Sub_P Parameter: Age (day) Value: 14
  misc_feature: MA Experiment 20000315 PARAMETER Experiment Name: At_14day_Shoots-Roots_Sub_P Parameter: Organism Value: A. thaliana
  misc_feature: MA Experiment 20000315 PARAMETER Experiment Name: At_14day_Shoots-Roots_Sub_P Parameter: Plant Line Value: WS
  misc_feature: MA Experiment 20000315 PARAMETER Experiment Name: At_14day_Shoots-Roots_Sub_P Parameter: Tissue Value: Shoots vs. Whole Plant
  misc_feature: MA Experiment ID: 20000328 Result: Down-regulated in Transcription
  misc_feature: MA Experiment 20000328 PARAMETER Experiment Name: At_42deg_Heat_Sub_P Parameter: Age (day) Value: 14
  misc_feature: MA Experiment 20000328 PARAMETER Experiment Name: At_42deg_Heat_Sub_P Parameter: Organism Value: A. thaliana
  misc_feature: MA Experiment 20000328 PARAMETER Experiment Name: At_42deg_Heat_Sub_P Parameter: Plant Line Value: WS
  misc_feature: MA Experiment 20000328 PARAMETER Experiment Name: At_42deg_Heat_Sub_P Parameter: Temperature (deg C) Value: 42 vs. 22
  misc_feature: MA Experiment 20000328 PARAMETER Experiment Name: At_42deg_Heat_Sub_P Parameter: Timepoint (hr) Value: 6
  misc_feature: MA Experiment 20000328 PARAMETER Experiment Name: At_42deg_Heat_Sub_P Parameter: Tissue Value: Aerial
  misc_feature: MA Experiment ID: 20000347 Result: Down-regulated in Transcription
  misc_feature: MA Experiment 20000347 PARAMETER Experiment Name: At_2mM_SA_Sub_P Parameter: Age (day) Value: 14
  misc_feature: MA Experiment 20000347 PARAMETER Experiment Name: At_2mM_SA_Sub_P Parameter: Organism Value: A. thaliana
  misc_feature: MA Experiment 20000347 PARAMETER Experiment Name: At_2mM_SA_Sub_P Parameter: Plant Line Value: WS
  misc_feature: MA Experiment 20000347 PARAMETER Experiment Name: At_2mM_SA_Sub_P Parameter: Timepoint (hr) Value: 6
  misc_feature: MA Experiment 20000347 PARAMETER Experiment Name: At_2mM_SA_Sub_P Parameter: Tissue Value: Aerial
  misc_feature: MA Experiment 20000347 PARAMETER Experiment Name: At_2mM_SA_Sub_P Parameter: Treatment Value: 2mM SA vs. No Treatment
  misc_feature: MA Experiment ID: 20000348 Result: Up-regulated in Transcription
  misc_feature: MA Experiment 20000348 PARAMETER Experiment Name: At_100uM_ABA_Sub_P Parameter: Age (day) Value: 14
  misc_feature: MA Experiment 20000348 PARAMETER Experiment Name: At_100uM_ABA_Sub_P Parameter: Organism Value: A. thaliana
  misc_feature: MA Experiment 20000348 PARAMETER Experiment Name: At_100uM_ABA_Sub_P Parameter: Plant Line Value: WS
  misc_feature: MA Experiment 20000348 PARAMETER Experiment Name: At_100uM_ABA_Sub_P Parameter: Timepoint (hr) Value: 1
  misc_feature: MA Experiment 20000348 PARAMETER Experiment Name: At_100uM_ABA_Sub_P Parameter: Tissue Value: Aerial
  misc_feature: MA Experiment 20000348 PARAMETER Experiment Name: At_100uM_ABA_Sub_P Parameter: Treatment Value: 100uM ABA vs. No Treatment
  misc_feature: MA Experiment ID: 20000440 Result: Down-regulated in Transcription
  misc_feature: MA Experiment 20000440 PARAMETER Experiment Name: At_Closed-Flower__Sub_P Parameter: Tissue Value: Closed Flower vs. Whole Plant
atggagccaacgttccatgcttttatgtttccctggtttgcttttggtcatatgattccttttctacatcttgcaaacaaactagctgagaaaggtcatcaaatcactttcttgctacctaagaaagcccaaaaacagttggaacatcacaatctgttcccagacagtattgtctttcaccctctcacaatccctcatgtcaatggcctccctgctggtgctgagacaacctcggatatctcaatctcgatggacaacttactgtcggaagccttggatctcactcgcgatcaggttgaagctgcggttcgtgctctgagaccggacttgatcttttttgattttgctcattggattccagaaattgccaaagagcatatgatcaagagtgtgagttacatgatagtatctgcaacaacaatagcttatacatttgcccctggtggtgtattaggtgttcccccaccaggttatccttcatcaaaggtgttgtaccgtgaaaacgatgctcatgccttagcaaccttatctatcttctacaagagactttatcatcagatcactacaggttttaagagctgtgacatcattgcattgaggacatgtaatgaaatcgaaggtaaattctgcgactatatatcaagtcaataccataagaaggttctcttgactggtccaatgctccctgagcaagacacaagtaaaccactagaagaacagttgagtcattttctgagcaggttcccaccgaggtcagtggtgttttgtgcacttggtagccagatcgttcttgaaaaggatcaattccaagaactctgcttagggatggagctgacaggtttaccgtttcttatagcggtaaagccaccgagaggatcatcgacggtcgaagaagggttaccagaagggttccaggagcgggtgaaagggcgtggtgtggtttggggaggatgggtgcaacaaccattgatattggatcatccgtcaataggctgctttgtgaaccattgtggtccgggaacaatatgggagtgtcttatgactgattgtcaaatggttttgcttccatttttaggtgatcaagttctcttcacaagattgatgaccgaggaattcaaggtgtctgtagaagtgtcgagagaaaaaacaggatggttttcaaaggagagcttgagcgatgcgatcaagtctgtgatggataaagatagcgacctcggaaagctagtgaggagtaaccacgccaaattgaaggagactcttggtagtcatggattattaactggttacgtggataaatttgtagaggaattgcaagagtatttgatttga

SEQ ID NO: 97087 - protein, 442 aa, Arabidopsis thaliana
  peptide (1)..(442): Ceres Seq. ID no. 12736013
  misc_feature (1)..(442): Homolog of NCBI NO: 15227766 NR Description: putative flavonol 3-O-glucosyltransferase;
  misc_feature (1)..(442): Homolog of NCBI NO: 15233903 NR Description: putative protein; protein id: At4g09500.1
  misc_feature (208)..(442): Homolog of NCBI NO: 28393204 NR Description: unknown protein [Arabidopsis thaliana]
  misc_feature (1)..(206): Homolog of NCBI NO: 28393204 NR Description: unknown protein [Arabidopsis thaliana]
  misc_feature (1)..(438): Homolog of NCBI NO: 15239523 NR Description: flavonol 3-O-glucosyltransferase-like protein; id: At5g53990.1, supported by cDNA: gi_17529305, supported by gi_20465446 [Arabidopsis thaliana] >gi|10177261|dbj|BAB10729.1|
  misc_feature (1)..(438): Homolog of NCBI NO: 15217796 NR Description: anthocyanidin-3-glucoside rhamnosyltransferase, protein id: At1g64920.1 [Arabidopsis thaliana]
  misc_feature (1)..(438): Homolog of NCBI NO: 15217773 NR Description: rhamnosyltransferase, putative; protein id:
  misc_feature (1)..(439): Homolog of NCBI NO: 15239525 NR Description: flavonol 3-O-glucosyltransferase-like protein;
  misc_feature (5)..(439): Homolog of NCBI NO: 15234196 NR Description: UDP rhamnose--anthocyanidin-3-glucoside
  misc_feature (5)..(439): Homolog of NCBI NO: 15234195 NR Description: UDP rhamnose-anthocyanidin-3-glucoside
MEPTFHAFMFPWFAFGHMIPFLHLANKLAEKGHQITFLLPKKAQKQLEHHNLFPDSIVFHPLTIPHVNGLPAGAETTSDISISMDNLLSEALDLTRDQVEAAVRALRPDLIFFDFAHWIPEIAKEHMIKSVSYMIVSATTIAYTFAPGGVLGVPPPGYPSSKVLYRENDAHALATLSIFYKRLYHQITTGFKSCDIIALRTCNEIEGKFCDYISSQYHKKVLLTGPMLPEQDTSKPLEEQLSHFLSRFPPRSVVFCALGSQIVLEKDQFQELCLGMELTGLPFLIAVKPPRGSSTVEEGLPEGFQERVKGRGVVWGGWVQQPLILDHPSIGCFVNHCGPGTIWECLMTDCQMVLLPFLGDQVLFTRLMTEEFKVSVEVSREKTGWFSKESLSDAIKSVMDKDSDLGKLVRSNHAKLKETLGSHGLLTGYVDKFVEELQEYLI

SEQ ID NO: 97088 - protein, 434 aa, Arabidopsis thaliana
  peptide (1)..(434): Ceres Seq. ID no. 12736014
  misc_feature (1)..(434): Homolog of NCBI NO: 15227766 NR Description: putative flavonol 3-O-glucosyltransferase;
  misc_feature (1)..(434): Homolog of NCBI NO: 15233903 NR Description: putative protein; protein id: At4g09500.1
  misc_feature (200)..(434): Homolog of NCBI NO: 28393204 NR Description: unknown protein [Arabidopsis thaliana]
  misc_feature (1)..(198): Homolog of NCBI NO: 28393204 NR Description: unknown protein [Arabidopsis thaliana]
  misc_feature (1)..(430): Homolog of NCBI NO: 15239523 NR Description: flavonol 3-O-glucosyltransferase-like protein; id: At5g53990.1, supported by cDNA: gi_17529305, supported by gi_20465446 [Arabidopsis thaliana] >gi|10177261|dbj|BAB10729.1|
  misc_feature (1)..(430): Homolog of NCBI NO: 15217796 NR Description: anthocyanidin-3-glucoside rhamnosyltransferase, protein id: At1g64920.1 [Arabidopsis thaliana]
  misc_feature (1)..(430): Homolog of NCBI NO: 15217773 NR Description: rhamnosyltransferase, putative; protein id:
  misc_feature (1)..(431): Homolog of NCBI NO: 15239525 NR Description: flavonol 3-O-glucosyltransferase-like protein;
  misc_feature (1)..(431): Homolog of NCBI NO: 15234196 NR Description: UDP rhamnose--anthocyanidin-3-glucoside
  misc_feature (1)..(431): Homolog of NCBI NO: 15234195 NR Description: UDP rhamnose-anthocyanidin-3-glucoside
MFPWFAFGHMIPFLHLANKLAEKGHQITFLLPKKAQKQLEHHNLFPDSIVFHPLTIPHVNGLPAGAETTSDISISMDNLLSEALDLTRDQVEAAVRALRPDLIFFDFAHWIPEIAKEHMIKSVSYMIVSATTIAYTFAPGGVLGVPPPGYPSSKVLYRENDAHALATLSIFYKRLYHQITTGFKSCDIIALRTCNEIEGKFCDYISSQYHKKVLLTGPMLPEQDTSKPLEEQLSHFLSRFPPRSVVFCALGSQIVLEKDQFQELCLGMELTGLPFLIAVKPPRGSSTVEEGLPEGFQERVKGRGVVWGGWVQQPLILDHPSIGCFVNHCGPGTIWECLMTDCQMVLLPFLGDQVLFTRLMTEEFKVSVEVSREKTGWFSKESLSDAIKSVMDKDSDLGKLVRSNHAKLKETLGSHGLLTGYVDKFVEELQEYLI

SEQ ID NO: 97089 - protein, 425 aa, Arabidopsis thaliana
  peptide (1)..(425): Ceres Seq. ID no. 12736015
  misc_feature (1)..(425): Homolog of NCBI NO: 15227766 NR Description: putative flavonol 3-O-glucosyltransferase;
  misc_feature (1)..(425): Homolog of NCBI NO: 15233903 NR Description: putative protein; protein id: At4g09500.1
  misc_feature (191)..(425): Homolog of NCBI NO: 28393204 NR Description: unknown protein [Arabidopsis thaliana]
  misc_feature (1)..(189): Homolog of NCBI NO: 28393204 NR Description: unknown protein [Arabidopsis thaliana]
  misc_feature (1)..(421): Homolog of NCBI NO: 15239523 NR Description: flavonol 3-O-glucosyltransferase-like protein; id: At5g53990.1, supported by cDNA: gi_17529305, supported by gi_20465446 [Arabidopsis thaliana] >gi|10177261|dbj|BAB10729.1|
  misc_feature (1)..(421): Homolog of NCBI NO: 15217796 NR Description: anthocyanidin-3-glucoside rhamnosyltransferase, protein id: At1g64920.1 [Arabidopsis thaliana]
  misc_feature (1)..(421): Homolog of NCBI NO: 15217773 NR Description: rhamnosyltransferase, putative; protein id:
  misc_feature (1)..(422): Homolog of NCBI NO: 15239525 NR Description: flavonol 3-O-glucosyltransferase-like protein;
  misc_feature (1)..(422): Homolog of NCBI NO: 15234196 NR Description: UDP rhamnose--anthocyanidin-3-glucoside
  misc_feature (1)..(422): Homolog of NCBI NO: 15234195 NR Description: UDP rhamnose-anthocyanidin-3-glucoside
MIPFLHLANKLAEKGHQITFLLPKKAQKQLEHHNLFPDSIVFHPLTIPHVNGLPAGAETTSDISISMDNLLSEALDLTRDQVEAAVRALRPDLIFFDFAHWIPEIAKEHMIKSVSYMIVSATTIAYTFAPGGVLGVPPPGYPSSKVLYRENDAHALATLSIFYKRLYHQITTGFKSCDIIALRTCNEIEGKFCDYISSQYHKKVLLTGPMLPEQDTSKPLEEQLSHFLSRFPPRSVVFCALGSQIVLEKDQFQELCLGMELTGLPFLIAVKPPRGSSTVEEGLPEGFQERVKGRGVVWGGWVQQPLILDHPSIGCFVNHCGPGTIWECLMTDCQMVLLPFLGDQVLFTRLMTEEFKVSVEVSREKTGWFSKESLSDAIKSVMDKDSDLGKLVRSNHAKLKETLGSHGLLTGYVDKFVEELQEYLI

SEQ ID NO: 97090 - DNA, 1314 bp, Arabidopsis thaliana
  misc_feature (1)..(1314): Ceres Seq. ID no. 12736023
  misc_feature: MA Experiment ID: 20000180 Result: Up-regulated in Transcription
  misc_feature: MA Experiment 20000180 PARAMETER Experiment Name: At_Germinating_Seeds_P Parameter: Age (hr) Value: 24 vs. 0
  misc_feature: MA Experiment 20000180 PARAMETER Experiment Name: At_Germinating_Seeds_P Parameter: Tissue Value: Germinating Seeds
  misc_feature: MA Experiment ID: 20000182 Result: Down-regulated in Transcription
  misc_feature: MA Experiment 20000182 PARAMETER Experiment Name: At_2mM_SA_P Parameter: Age (day) Value: 14
  misc_feature: MA Experiment 20000182 PARAMETER Experiment Name: At_2mM_SA_P Parameter: Organism Value: A. thaliana
  misc_feature: MA Experiment 20000182 PARAMETER Experiment Name: At_2mM_SA_P Parameter: Plant Line Value: WS
  misc_feature: MA Experiment 20000182 PARAMETER Experiment Name: At_2mM_SA_P Parameter: Timepoint (hr) Value: 6
  misc_feature: MA Experiment 20000182 PARAMETER Experiment Name: At_2mM_SA_P Parameter: Tissue Value: Aerial
  misc_feature: MA Experiment 20000182 PARAMETER Experiment Name: At_2mM_SA_P Parameter: Treatment Value: 2mM SA vs. No Treatment
  misc_feature: MA Experiment ID: 20000235 Result: Up-regulated in Transcription
  misc_feature: MA Experiment 20000235 PARAMETER Experiment Name: At_Siliques_P Parameter: Age (day) Value: 21
  misc_feature: MA Experiment 20000235 PARAMETER Experiment Name: At_Siliques_P Parameter: Organism Value: A. thaliana
  misc_feature: MA Experiment 20000235 PARAMETER Experiment Name: At_Siliques_P Parameter: Plant Line Value: WS
  misc_feature: MA Experiment 20000235 PARAMETER Experiment Name: At_Siliques_P Parameter: Tissue Value: 5-10mm Siliques vs. Whole Plant
  misc_feature: MA Experiment ID: 20000437 Result: Down-regulated in Transcription
  misc_feature: MA Experiment 20000437 PARAMETER Experiment Name: At_Drought_P Parameter: Age (day) Value: 8
  misc_feature: MA Experiment 20000437 PARAMETER Experiment Name: At_Drought_P Parameter: Organism Value: A. thaliana
  misc_feature: MA Experiment 20000437 PARAMETER Experiment Name: At_Drought_P Parameter: Plant Line Value: WS
  misc_feature: MA Experiment 20000437 PARAMETER Experiment Name: At_Drought_P Parameter: Timepoint (hr) Value: 24
  misc_feature: MA Experiment 20000437 PARAMETER Experiment Name: At_Drought_P Parameter: Tissue Value: Whole Plant
  misc_feature: MA Experiment 20000437 PARAMETER Experiment Name: At_Drought_P Parameter: Treatment Value: Drought vs. No Drought
  misc_feature: MA Experiment ID: 20000460 Result: Up-regulated in Transcription
  misc_feature: MA Experiment 20000460 PARAMETER Experiment Name: At_10percent_PEG_P Parameter: Age (day) Value: 12
  misc_feature: MA Experiment 20000460 PARAMETER Experiment Name: At_10percent_PEG_P Parameter: Organism Value: A. thaliana
  misc_feature: MA Experiment 20000460 PARAMETER Experiment Name: At_10percent_PEG_P Parameter: Plant Line Value: WS
  misc_feature: MA Experiment 20000460 PARAMETER Experiment Name: At_10percent_PEG_P Parameter: Timepoint (day) Value: 12
  misc_feature: MA Experiment 20000460 PARAMETER Experiment Name: At_10percent_PEG_P Parameter: Tissue Value: Whole Plant
  misc_feature: MA Experiment 20000460 PARAMETER Experiment Name: At_10percent_PEG_P Parameter: Treatment Value: 10percent PEG vs. No Treatment
  misc_feature: MA Experiment ID: 20000573 Result: Down-regulated in Transcription
  misc_feature: MA Experiment 20000573 PARAMETER Experiment Name: At_100uM_ABA_Mutants__P Parameter: Organism Value: A. thaliana
  misc_feature: MA Experiment 20000573 PARAMETER Experiment Name: At_100uM_ABA_Mutants__P Parameter: Plant Line Value: CS22 vs. Ler wt
  misc_feature: MA Experiment 20000573 PARAMETER Experiment Name: At_100uM_ABA_Mutants__P Parameter: Timepoint (hr) Value: N/A
  misc_feature: MA Experiment 20000573 PARAMETER Experiment Name: At_100uM_ABA_Mutants__P Parameter: Tissue Value: Whole Plant
  misc_feature: MA Experiment 20000573 PARAMETER Experiment Name: At_100uM_ABA_Mutants__P Parameter: Treatment Value: None
  misc_feature: MA Experiment ID: 20001247 Result: Down-regulated in Transcription
  misc_feature: MA Experiment 20001247 PARAMETER Experiment Name: At_Far-red-induction_P Parameter: Age (day) Value: 7
  misc_feature: MA Experiment 20001247 PARAMETER Experiment Name: At_Far-red-induction_P Parameter: Light Value: Far-red vs. White
  misc_feature: MA Experiment 20001247 PARAMETER Experiment Name: At_Far-red-induction_P Parameter: Organism Value: A. thaliana
  misc_feature: MA Experiment 20001247 PARAMETER Experiment Name: At_Far-red-induction_P Parameter: Plant Line Value: Columbia
  misc_feature: MA Experiment 20001247 PARAMETER Experiment Name: At_Far-red-induction_P Parameter: Timepoint (hr) Value: 1
  misc_feature: MA Experiment 20001247 PARAMETER Experiment Name: At_Far-red-induction_P Parameter: Tissue Value: Whole Plant
  misc_feature: MA Experiment ID: 20001248 Result: Down-regulated in Transcription
  misc_feature: MA Experiment 20001248 PARAMETER Experiment Name: At_Far-red-induction_P Parameter: Age (day) Value: 7
  misc_feature: MA Experiment 20001248 PARAMETER Experiment Name: At_Far-red-induction_P Parameter: Light Value: Far-red vs. White
  misc_feature: MA Experiment 20001248 PARAMETER Experiment Name: At_Far-red-induction_P Parameter: Organism Value: A. thaliana
  misc_feature: MA Experiment 20001248 PARAMETER Experiment Name: At_Far-red-induction_P Parameter: Plant Line Value: Columbia
  misc_feature: MA Experiment 20001248 PARAMETER Experiment Name: At_Far-red-induction_P Parameter: Timepoint (hr) Value: 4
  misc_feature: MA Experiment 20001248 PARAMETER Experiment Name: At_Far-red-induction_P Parameter: Tissue Value: Whole Plant
  misc_feature: MA Experiment ID: 20001450 Result: Down-regulated in Transcription
  misc_feature: MA Experiment 20001450 PARAMETER Experiment Name: At_Far-red-induction_P Parameter: Age (day) Value: 7
  misc_feature: MA Experiment 20001450 PARAMETER Experiment Name: At_Far-red-induction_P Parameter: Light Value: Far-red vs. White
  misc_feature: MA Experiment 20001450 PARAMETER Experiment Name: At_Far-red-induction_P Parameter: Organism Value: A. thaliana
  misc_feature: MA Experiment 20001450 PARAMETER Experiment Name: At_Far-red-induction_P Parameter: Plant Line Value: Columbia
  misc_feature: MA Experiment 20001450 PARAMETER Experiment Name: At_Far-red-induction_P Parameter: Timepoint (hr) Value: 8
  misc_feature: MA Experiment 20001450 PARAMETER Experiment Name: At_Far-red-induction_P Parameter: Tissue Value: Whole Plant
atgagtttgatactaaagtttatgcttcttattctacttgtctcgagtcatcatgttcgttctggctccatcgtcaagtttcttcctggttttaaaggccctcttcctttcgaacttgaaaccgggtacattggtattggtgaggaagagaatgtacaatttttctactatttcatcaaatcagataagaacccacaagaagatcctcttattatatggttaaatggagggcctggatgttcttgtctcagtggtcttttctttgagaacggacctttggctttgaagaacaaggtttacaatggaagtgtcccttctttggtctctactacatattcatggacaaagacagcaaacataatattcttggatcagcctgtgggatctggcttctcttactcaaaaactccaattgaaagaactagtgacacaagtgaagttaagaagatccatgagtttcttcaaaagtggctaatcaagcatccacaatttttgtccaacccgttttacgttgttggagattcttattcgggcatgattgttcccgccctcgttcacgaaatctcaaaagggaattatatatgttgcaaccctcctataaatcttcagggttatgtgcttggaaacccgataacacatattgaatttgaacaaaactttcgtattccatatgctcatggaatgtcgttaatctctgatgaactctacgagtcattgaagagaatctgcaagggaaattatttcagtgtggatccaagtaacaaaaaatgtttgaagcttgttgaagaataccataagtgtactgacaacataaatagccatcatacattaatagcaaattgcgatgactcaaatacacaacacatatctcctgattgctattattatccatatcatctggttgaatgttgggccaacaacgagagtgttcgcgaagctcttcatgttgataaggggagtataggagaatggatacgagatcatcggggtattccatacaaaagcgacattagaagcagcataccttaccatatgaataacagcatcaatggctaccgatctcttatcttcagtggtgatcatgacatcacaatgcctttccaagcaactcaagcctggataaaatctctaaattactccatcattgatgactggaggccttggatgataaaaggtcaaatcgctggatacacgagaacttattccaataagatgacatttgctactgtcaaaggaggtggacacacggcagagtatctaccagaagagagttctatcatgttccaaaggtggataagtgggcagcctttgtaa

SEQ ID NO: 97091 - protein, 437 aa, Arabidopsis thaliana
  peptide (1)..(437): Ceres Seq. ID no. 12736024
  misc_feature (29)..(434): Pfam Name: Serine carboxypeptidase Pfam Description: Serine carboxypeptidase
  misc_feature (1)..(437): Homolog of NCBI NO: 15227773 NR Description: putative serine carboxypeptidase I; protein id: [Arabidopsis thaliana] >gi|25289775|pir||E84619 probable serine
  misc_feature (1)..(437): Homolog of NCBI NO: 30681900 NR Description: serine carboxypeptidase -related [Arabidopsis
  misc_feature (1)..(437): Homolog of NCBI NO: 18400137 NR Description: putative serine carboxypeptidase I; protein id: [Arabidopsis thaliana] >gi|20197128|gb|AAC17816.2| putative carboxypeptidase I [Arabidopsis thaliana]
  misc_feature (1)..(437): Homolog of NCBI NO: 15227772 NR Description: putative serine carboxypeptidase I; protein id: supported by cDNA: 33165. [Arabidopsis thaliana]
  misc_feature (1)..(422): Homolog of NCBI NO: 30681910 NR Description: serine carboxypeptidase -related [Arabidopsis
  misc_feature (6)..(437): Homolog of NCBI NO: 15227765 NR Description: putative serine carboxypeptidase I; protein id: [Arabidopsis thaliana] >gi|25289780|pir||E84618 probable serine
  misc_feature (1)..(437): Homolog of NCBI NO: 15227769 NR Description: putative serine carboxypeptidase II; protein id:
  misc_feature (1)..(411): Homolog of NCBI NO: 30681915 NR Description: serine carboxypeptidase -related [Arabidopsis
  misc_feature (1)..(437): Homolog of NCBI NO: 25289782 NR Description: probable serine carboxypeptidase I [imported] - thaliana >gi|3169172|gb|AAC17815.1| putative serine I [Arabidopsis thaliana] >gi|20197276|gb|AAM15008.1| putative
  misc_feature (2)..(437): Homolog of NCBI NO: 15219433 NR Description: putative serine carboxypeptidase; protein id: [Arabidopsis thaliana] >gi|25289779|pir||C96759 protein serine
MSLILKFMLLILLVSSHHVRSGSIVKFLPGFKGPLPFELETGYIGIGEEENVQFFYYFIKSDKNPQEDPLIIWLNGGPGCSCLSGLFFENGPLALKNKVYNGSVPSLVSTTYSWTKTANIIFLDQPVGSGFSYSKTPIERTSDTSEVKKIHEFLQKWLIKHPQFLSNPFYVVGDSYSGMIVPALVHEISKGNYICCNPPINLQGYVLGNPITHIEFEQNFRIPYAHGMSLISDELYESLKRICKGNYFSVDPSNKKCLKLVEEYHKCTDNINSHHTLIANCDDSNTQHISPDCYYYPYHLVECWANNESVREALHVDKGSIGEWIRDHRGIPYKSDIRSSIPYHMNNSINGYRSLIFSGDHDITMPFQATQAWIKSLNYSIIDDWRPWMIKGQIAGYTRTYSNKMTFATVKGGGHTAEYLPEESSIMFQRWISGQPL

SEQ ID NO: 97092 - protein, 430 aa, Arabidopsis thaliana
  peptide (1)..(430): Ceres Seq. ID no. 12736025
  misc_feature (22)..(427): Pfam Name: Serine carboxypeptidase Pfam Description: Serine carboxypeptidase
  misc_feature (1)..(430): Homolog of NCBI NO: 15227773 NR Description: putative serine carboxypeptidase I; protein id: [Arabidopsis thaliana] >gi|25289775|pir||E84619 probable serine
  misc_feature (1)..(430): Homolog of NCBI NO: 30681900 NR Description: serine carboxypeptidase -related [Arabidopsis
  misc_feature (1)..(430): Homolog of NCBI NO: 18400137 NR Description: putative serine carboxypeptidase I; protein id: [Arabidopsis thaliana] >gi|20197128|gb|AAC17816.2| putative carboxypeptidase I [Arabidopsis thaliana]
  misc_feature (1)..(430): Homolog of NCBI NO: 15227772 NR Description: putative serine carboxypeptidase I; protein id: supported by cDNA: 33165. [Arabidopsis thaliana]
  misc_feature (1)..(415): Homolog of NCBI NO: 30681910 NR Description: serine carboxypeptidase -related [Arabidopsis
  misc_feature (1)..(430): Homolog of NCBI NO: 15227765 NR Description: putative serine carboxypeptidase I; protein id: [Arabidopsis thaliana] >gi|25289780|pir||E84618 probable serine
  misc_feature (1)..(430): Homolog of NCBI NO: 15227769 NR Description: putative serine carboxypeptidase II; protein id:
  misc_feature (1)..(404): Homolog of NCBI NO: 30681915 NR Description: serine carboxypeptidase -related [Arabidopsis
  misc_feature (1)..(430): Homolog of NCBI NO: 25289782 NR Description: probable serine carboxypeptidase I [imported] - thaliana >gi|3169172|gb|AAC17815.1| putative serine I [Arabidopsis thaliana] >gi|20197276|gb|AAM15008.1| putative
  misc_feature (1)..(430): Homolog of NCBI NO: 15219433 NR Description: putative serine carboxypeptidase; protein id: [Arabidopsis thaliana] >gi|25289779|pir||C96759 protein serine
MLLILLVSSHHVRSGSIVKFLPGFKGPLPFELETGYIGIGEEENVQFFYYFIKSDKNPQEDPLIIWLNGGPGCSCLSGLFFENGPLALKNKVYNGSVPSLVSTTYSWTKTANIIFLDQPVGSGFSYSKTPIERTSDTSEVKKIHEFLQKWLIKHPQFLSNPFYVVGDSYSGMIVPALVHEISKGNYICCNPPINLQGYVLGNPITHIEFEQNFRIPYAHGMSLISDELYESLKRICKGNYFSVDPSNKKCLKLVEEYHKCTDNINSHHTLIANCDDSNTQHISPDCYYYPYHLVECWANNESVREALHVDKGSIGEWIRDHRGIPYKSDIRSSIPYHMNNSINGYRSLIFSGDHDITMPFQATQAWIKSLNYSIIDDWRPWMIKGQIAGYTRTYSNKMTFATVKGGGHTAEYLPEESSIMFQRWISGQPL

SEQ ID NO: 97093 - protein, 259 aa, Arabidopsis thaliana
  peptide (1)..(259): Ceres Seq. ID no. 12736026
  misc_feature (1)..(256): Pfam Name: Serine carboxypeptidase Pfam Description: Serine carboxypeptidase
  misc_feature (1)..(259): Homolog of NCBI NO: 15227773 NR Description: putative serine carboxypeptidase I; protein id: [Arabidopsis thaliana] >gi|25289775|pir||E84619 probable serine
  misc_feature (1)..(259): Homolog of NCBI NO: 30681900 NR Description: serine carboxypeptidase -related [Arabidopsis
  misc_feature (1)..(259): Homolog of NCBI NO: 18400137 NR Description: putative serine carboxypeptidase I; protein id: [Arabidopsis thaliana] >gi|20197128|gb|AAC17816.2| putative carboxypeptidase I [Arabidopsis thaliana]
  misc_feature (1)..(259): Homolog of NCBI NO: 15227772 NR Description: putative serine carboxypeptidase I; protein id: supported by cDNA: 33165. [Arabidopsis thaliana]
  misc_feature (1)..(244): Homolog of NCBI NO: 30681910 NR Description: serine carboxypeptidase -related [Arabidopsis
  misc_feature (1)..(259): Homolog of NCBI NO: 15227765 NR Description: putative serine carboxypeptidase I; protein id: [Arabidopsis thaliana] >gi|25289780|pir||E84618 probable serine
  misc_feature (1)..(259): Homolog of NCBI NO: 15227769 NR Description: putative serine carboxypeptidase II; protein id:
  misc_feature (1)..(233): Homolog of NCBI NO: 30681915 NR Description: serine carboxypeptidase -related [Arabidopsis
  misc_feature (1)..(259): Homolog of NCBI NO: 25289782 NR Description: probable serine carboxypeptidase I [imported] - thaliana >gi|3169172|gb|AAC17815.1| putative serine I [Arabidopsis thaliana] >gi|20197276|gb|AAM15008.1| putative
  misc_feature (1)..(259): Homolog of NCBI NO: 15219433 NR Description: putative serine carboxypeptidase; protein id: [Arabidopsis thaliana] >gi|25289779|pir||C96759 protein serine
MIVPALVHEISKGNYICCNPPINLQGYVLGNPITHIEFEQNFRIPYAHGMSLISDELYESLKRICKGNYFSVDPSNKKCLKLVEEYHKCTDNINSHHTLIANCDDSNTQHISPDCYYYPYHLVECWANNESVREALHVDKGSIGEWIRDHRGIPYKSDIRSSIPYHMNNSINGYRSLIFSGDHDITMPFQATQAWIKSLNYSIIDDWRPWMIKGQIAGYTRTYSNKMTFATVKGGGHTAEYLPEESSIMFQRWISGQPL

SEQ ID NO: 97094 - DNA, 1020 bp, Arabidopsis thaliana
  misc_feature (1)..(1020): Ceres Seq. ID no. 12736027
  misc_feature: MA Experiment ID: 20000182 Result: Up-regulated in Transcription
  misc_feature: MA Experiment 20000182 PARAMETER Experiment Name: At_2mM_SA_P Parameter: Age (day) Value: 14
  misc_feature: MA Experiment 20000182 PARAMETER Experiment Name: At_2mM_SA_P Parameter: Organism Value: A. thaliana
  misc_feature: MA Experiment 20000182 PARAMETER Experiment Name: At_2mM_SA_P Parameter: Plant Line Value: WS
  misc_feature: MA Experiment 20000182 PARAMETER Experiment Name: At_2mM_SA_P Parameter: Timepoint (hr) Value: 6
  misc_feature: MA Experiment 20000182 PARAMETER Experiment Name: At_2mM_SA_P Parameter: Tissue Value: Aerial
  misc_feature: MA Experiment 20000182 PARAMETER Experiment Name: At_2mM_SA_P Parameter: Treatment Value: 2mM SA vs. No Treatment
  misc_feature: MA Experiment ID: 20000185 Result: Up-regulated in Transcription
  misc_feature: MA Experiment 20000185 PARAMETER Experiment Name: At_Roots__P Parameter: Age (day) Value: 7 vs. 21
  misc_feature: MA Experiment 20000185 PARAMETER Experiment Name: At_Roots__P Parameter: Organism Value: A. thaliana
  misc_feature: MA Experiment 20000185 PARAMETER Experiment Name: At_Roots__P Parameter: Tissue Value: Roots vs. Whole Plant
  misc_feature: MA Experiment ID: 20000227 Result: Down-regulated in Transcription
  misc_feature: MA Experiment 20000227 PARAMETER Experiment Name: At_Root-Tips-vs-Tops_P Parameter: Tissue Value: Root Tips vs. Root Tops
  misc_feature: MA Experiment ID: 20000234 Result: Down-regulated in Transcription
  misc_feature: MA Experiment 20000234 PARAMETER Experiment Name: At_Siliques_P Parameter: Age (day) Value: 21
  misc_feature: MA Experiment 20000234 PARAMETER Experiment Name: At_Siliques_P Parameter: Organism Value: A. thaliana
  misc_feature: MA Experiment 20000234 PARAMETER Experiment Name: At_Siliques_P Parameter: Plant Line Value: WS
  misc_feature: MA Experiment 20000234 PARAMETER Experiment Name: At_Siliques_P Parameter: Tissue Value: Less Than 5mm Siliques vs. Whole Plant
  misc_feature: MA Experiment ID: 20000264 Result: Down-regulated in Transcription
  misc_feature: MA Experiment 20000264 PARAMETER Experiment Name: At_Open_Flower_P Parameter: Age (day) Value: 21
  misc_feature: MA Experiment 20000264 PARAMETER Experiment Name: At_Open_Flower_P Parameter: Plant Line Value: WS
  misc_feature: MA Experiment 20000264 PARAMETER Experiment Name: At_Open_Flower_P Parameter: Tissue Value: Open Flower vs. Whole Plant
  misc_feature: MA Experiment ID: 20000437 Result: Up-regulated in Transcription
  misc_feature: MA Experiment 20000437 PARAMETER Experiment Name: At_Drought_P Parameter: Age (day) Value: 8
  misc_feature: MA Experiment 20000437 PARAMETER Experiment Name: At_Drought_P Parameter: Organism Value: A. thaliana
  misc_feature: MA Experiment 20000437 PARAMETER Experiment Name: At_Drought_P Parameter: Plant Line Value: WS
  misc_feature: MA Experiment 20000437 PARAMETER Experiment Name: At_Drought_P Parameter: Timepoint (hr) Value: 24
  misc_feature: MA Experiment 20000437 PARAMETER Experiment Name: At_Drought_P Parameter: Tissue Value: Whole Plant
  misc_feature: MA Experiment 20000437 PARAMETER Experiment Name: At_Drought_P Parameter: Treatment Value: Drought vs. No Drought
  misc_feature: MA Experiment ID: 20000439 Result: Up-regulated in Transcription
  misc_feature: MA Experiment 20000439 PARAMETER Experiment Name: At_Roots__P Parameter: Age (day) Value: 14 vs. 21
  misc_feature: MA Experiment 20000439 PARAMETER Experiment Name: At_Roots__P Parameter: Organism Value: A. thaliana
  misc_feature: MA Experiment 20000439 PARAMETER Experiment Name: At_Roots__P Parameter: Tissue Value: Roots vs. Whole Plant
  misc_feature: MA Experiment ID: 20000527 Result: Up-regulated in Transcription
  misc_feature: MA Experiment 20000527 PARAMETER Experiment Name: At_10percent_PEG_P Parameter: Age (day) Value: 20
  misc_feature: MA Experiment 20000527 PARAMETER Experiment Name: At_10percent_PEG_P Parameter: Organism Value: A. thaliana
  misc_feature: MA Experiment 20000527 PARAMETER Experiment Name: At_10percent_PEG_P Parameter: Plant Line Value: WS
  misc_feature: MA Experiment 20000527 PARAMETER Experiment Name: At_10percent_PEG_P Parameter: Timepoint (day) Value: 20
  misc_feature: MA Experiment 20000527 PARAMETER Experiment Name: At_10percent_PEG_P Parameter: Tissue Value: Whole Plant
  misc_feature: MA Experiment 20000527 PARAMETER Experiment Name: At_10percent_PEG_P Parameter: Treatment Value: 10percent PEG vs. No Treatment
  misc_feature: MA Experiment ID: 20001247 Result: Down-regulated in Transcription
  misc_feature: MA Experiment 20001247 PARAMETER Experiment Name: At_Far-red-induction_P Parameter: Age (day) Value: 7
  misc_feature: MA Experiment 20001247 PARAMETER Experiment Name: At_Far-red-induction_P Parameter: Light Value: Far-red vs. White
  misc_feature: MA Experiment 20001247 PARAMETER Experiment Name: At_Far-red-induction_P Parameter: Organism Value: A. thaliana
  misc_feature: MA Experiment 20001247 PARAMETER Experiment Name: At_Far-red-induction_P Parameter: Plant Line Value: Columbia
  misc_feature: MA Experiment 20001247 PARAMETER Experiment Name: At_Far-red-induction_P Parameter: Timepoint (hr) Value: 1
  misc_feature: MA Experiment 20001247 PARAMETER Experiment Name: At_Far-red-induction_P Parameter: Tissue Value: Whole Plant
  misc_feature: MA Experiment ID: 20001248 Result: Up-regulated in Transcription
  misc_feature: MA Experiment 20001248 PARAMETER Experiment Name: At_Far-red-induction_P Parameter: Age (day) Value: 7
  misc_feature: MA Experiment 20001248 PARAMETER Experiment Name: At_Far-red-induction_P Parameter: Light Value: Far-red vs. White
  misc_feature: MA Experiment 20001248 PARAMETER Experiment Name: At_Far-red-induction_P Parameter: Organism Value: A. thaliana
  misc_feature: MA Experiment 20001248 PARAMETER Experiment Name: At_Far-red-induction_P Parameter: Plant Line Value: Columbia
  misc_feature: MA Experiment 20001248 PARAMETER Experiment Name: At_Far-red-induction_P Parameter: Timepoint (hr) Value: 4
  misc_feature: MA Experiment 20001248 PARAMETER Experiment Name: At_Far-red-induction_P Parameter: Tissue Value: Whole Plant
  misc_feature: MA Experiment ID: 20001451 Result: Up-regulated in Transcription
  misc_feature: MA Experiment 20001451 PARAMETER Experiment Name: At_Far-red-induction_P Parameter: Age (day) Value: 7
  misc_feature: MA Experiment 20001451 PARAMETER Experiment Name: At_Far-red-induction_P Parameter: Light Value: Far-red vs. White
  misc_feature: MA Experiment 20001451 PARAMETER Experiment Name: At_Far-red-induction_P Parameter: Organism Value: A. thaliana
  misc_feature: MA Experiment 20001451 PARAMETER Experiment Name: At_Far-red-induction_P Parameter: Plant Line Value: Columbia
  misc_feature: MA Experiment 20001451 PARAMETER Experiment Name: At_Far-red-induction_P Parameter: Timepoint (hr) Value: 24
  misc_feature: MA Experiment 20001451 PARAMETER Experiment Name: At_Far-red-induction_P Parameter: Tissue Value: Whole Plant
  misc_feature: MA Experiment ID: 20001555 Result: Up-regulated in Transcription
  misc_feature: MA Experiment 20001555 PARAMETER Experiment Name: At_Drought_Soil_Dry_P Parameter: Age (day) Value: 24
  misc_feature: MA Experiment 20001555 PARAMETER Experiment Name: At_Drought_Soil_Dry_P Parameter: Organism Value: A. thaliana
  misc_feature: MA Experiment 20001555 PARAMETER Experiment Name: At_Drought_Soil_Dry_P Parameter: Plant Line Value: WS
  misc_feature: MA Experiment 20001555 PARAMETER Experiment Name: At_Drought_Soil_Dry_P Parameter: Post Timepoint (hr) Value: None
  misc_feature: MA Experiment 20001555 PARAMETER Experiment Name: At_Drought_Soil_Dry_P Parameter: Post-Treatment Value: None
  misc_feature: MA Experiment 20001555 PARAMETER Experiment Name: At_Drought_Soil_Dry_P Parameter: Timepoint (day) Value: 10
  misc_feature: MA Experiment 20001555 PARAMETER Experiment Name: At_Drought_Soil_Dry_P Parameter: Treatment Value: Drought vs. No Drought
atggagaagtatgagatggtgaaggatttaggatttggtaatttcggattggctcggcttatgcgtaataagcaaacaaacgagcttgtggctgtcaaattcatcgatcgaggctacaagatagatgagaacgttgcaagagaaataatcaatcatagagctctcaaccatccgaatattgttcggtttaaagaggttgttttaactccgacacatcttggaatagtaatggagtatgcagctggaggagaactgttcgagcggatatctagcgtgggtcgatttagcgaagctgaggcaagatatttctttcaacaactcatttgtggagtccattacttacatgcattgcaaatatgccatagagatctgaaattagaaaacacattgcttgatggaagcccagcaccacgtttaaaaatttgtgattttggctactcaaagtcttctgttctgcactccaacccaaaatcaacggtgggaactccggcatatatagcaccggaagttttttgtcgatcggaatacgacggaaagtcagttgatgtgtggtcttgtggagtggccctctatgttatgttggtaggagcttatccattcgaagaccctaaagaccctcgcaatttccgaaaaactgttcagaaaataatggccgtaaactacaagattccaggatatgttcacatatccgaagactgcagaaagttactatctcgtatatttgttgccaatccgttacatagaagtacgcttaaagagattaagagtcatgcatggttcctaaagaatttgccaagagaattaaaggagccagcacaagcaatctattaccaaaggaatgttaatcttattaatttttctcctcaaagagtagaggagattatgaagatagttggtgaggcaagaaccattccaaacctttctcgcccggtcgaatcgcttggatcagataaaaaagatgatgatgaagaagaatatttggatgctaatgatgaagaatggtatgatgattacgcatag

SEQ ID NO: 97095 - protein, 339 aa, Arabidopsis thaliana
  peptide (1)..(339): Ceres Seq. ID no. 12736028
  misc_feature (4)..(260): Pfam Name: Protein kinase domain Pfam Description: Protein kinase domain
  misc_feature (1)..(339): Homolog of NCBI NO: 15227774 NR Description: putative protein kinase; protein id: At2g23030.1
  misc_feature (1)..(339): Homolog of NCBI NO: 27808588 NR Description: At2g23030 [Arabidopsis thaliana]
MEKYEMVKDLGFGNFGLARLMRNKQTNELVAVKFIDRGYKIDENVAREIINHRALNHPNIVRFKEVVLTPTHLGIVMEYAAGGELFERISSVGRFSEAEARYFFQQLICGVHYLHALQICHRDLKLENTLLDGSPAPRLKICDFGYSKSSVLHSNPKSTVGTPAYIAPEVFCRSEYDGKSVDVWSCGVALYVMLVGAYPFEDPKDPRNFRKTVQKIMAVNYKIPGYVHISEDCRKLLSRIFVANPLHRSTLKEIKSHAWFLKNLPRELKEPAQAIYYQRNVNLINFSPQRVEEIMKIVGEARTIPNLSRPVESLGSDKKDDDEEEYLDANDEEWYDDYA

SEQ ID NO: 97096 - protein, 334 aa, Arabidopsis thaliana
  peptide (1)..(334): Ceres Seq. ID no. 12736029
  misc_feature (1)..(255): Pfam Name: Protein kinase domain Pfam Description: Protein kinase domain
  misc_feature (1)..(334): Homolog of NCBI NO: 15227774 NR Description: putative protein kinase; protein id: At2g23030.1
  misc_feature (1)..(334): Homolog of NCBI NO: 27808588 NR Description: At2g23030 [Arabidopsis thaliana]
MVKDLGFGNFGLARLMRNKQTNELVAVKFIDRGYKIDENVAREIINHRALNHPNIVRFKEVVLTPTHLGIVMEYAAGGELFERISSVGRFSEAEARYFFQQLICGVHYLHALQICHRDLKLENTLLDGSPAPRLKICDFGYSKSSVLHSNPKSTVGTPAYIAPEVFCRSEYDGKSVDVWSCGVALYVMLVGAYPFEDPKDPRNFRKTVQKIMAVNYKIPGYVHISEDCRKLLSRIFVANPLHRSTLKEIKSHAWFLKNLPRELKEPAQAIYYQRNVNLINFSPQRVEEIMKIVGEARTIPNLSRPVESLGSDKKDDDEEEYLDANDEEWYDDYA

SEQ ID NO: 97097 - protein, 319 aa, Arabidopsis thaliana
  peptide (1)..(319): Ceres Seq. ID no. 12736030
  misc_feature (1)..(240): Pfam Name: Protein kinase domain Pfam Description: Protein kinase domain
  misc_feature (1)..(319): Homolog of NCBI NO: 15227774 NR Description: putative protein kinase; protein id: At2g23030.1
  misc_feature (1)..(319): Homolog of NCBI NO: 27808588 NR Description: At2g23030 [Arabidopsis thaliana]
MRNKQTNELVAVKFIDRGYKIDENVAREIINHRALNHPNIVRFKEVVLTPTHLGIVMEYAAGGELFERISSVGRFSEAEARYFFQQLICGVHYLHALQICHRDLKLENTLLDGSPAPRLKICDFGYSKSSVLHSNPKSTVGTPAYIAPEVFCRSEYDGKSVDVWSCGVALYVMLVGAYPFEDPKDPRNFRKTVQKIMAVNYKIPGYVHISEDCRKLLSRIFVANPLHRSTLKEIKSHAWFLKNLPRELKEPAQAIYYQRNVNLINFSPQRVEEIMKIVGEARTIPNLSRPVESLGSDKKDDDEEEYLDANDEEWYDDYA

SEQ ID NO: 97098 - DNA, 1632 bp, Arabidopsis thaliana
  misc_feature (1)..(1632): Ceres Seq. ID no. 12736047
  misc_feature: MA Experiment ID: 20000171 Result: Up-regulated in Transcription
  misc_feature: MA Experiment 20000171 PARAMETER Experiment Name: At_42deg_Heat_P Parameter: Age (day) Value: 14
  misc_feature: MA Experiment 20000171 PARAMETER Experiment Name: At_42deg_Heat_P Parameter: Organism Value: A. thaliana
  misc_feature: MA Experiment 20000171 PARAMETER Experiment Name: At_42deg_Heat_P Parameter: Plant Line Value: WS
  misc_feature: MA Experiment 20000171 PARAMETER Experiment Name: At_42deg_Heat_P Parameter: Temperature (deg C) Value: 42 vs. 22
  misc_feature: MA Experiment 20000171 PARAMETER Experiment Name: At_42deg_Heat_P Parameter: Timepoint (hr) Value: 1
  misc_feature: MA Experiment 20000171 PARAMETER Experiment Name: At_42deg_Heat_P Parameter: Tissue Value: Aerial
atgataacaccaaaacttgaacttctttttttcatcatcatgttccacgtaaactctcgctttcgttataaattaagctataacttcgaactcccatgttcagttcaacacatttacaagttcttcgatctaatggaaacccatttcctaattttatctctcgccttcctctttttcatttctcttaaacttttgtttggtaaacggcatagcaagtttaacctaccaccaagtccggctaggccacttccgtttattggacaccttcacctcctaaaacagccgcttcaccgcacattcctctcattctctcaatcactaggtgatgccccgattttctccctccgcctcggaaaccatctcacggttgttgtctcttcctactccatcgctgaagaatgttttacaaaaaacgacattgttttggccaataggccaaagttcattctcgggaaacacattgagtacaacttcaccactatgaccagtgcgccttatggtgaccattggcgaaacctacgccgtatcggcaccctggagatcttttcgtcacacaagctcaacggctttttatctgtccgtaaagatgagatccgacacttgttattgcgcctctcaaaaaactcgcaacatggttttgcaaaggttgagatgagacaattgttttatgatttgactatcaacaacattcttcgaatggtggctgggaaacgattttatggagaggggacagaacaagatgaagttgcgcggcgagtgacacaactgattgacgagattgtgtacagggctggcgttgggaatgcagccgattatataccgattttgcgttggatcacagattttgagaaaggggtcaaggagttggcgagtcgggtcgatgagtttttgcagagtctggtggatgagagacgtgtgcataaacaaaagggtaacactatgatggatcacttgctttctctccaagaaactcagcctgattactatacagatgtcactcttaaaggaatcataattgttatgatacttgccgggactgaaacattagcagggactttagaatgggcgatgcttaatttgttgaaccatccagaagtattagagaaagcgaggaccgaaatcgataccgaagtcggttttgaccggttaatggatgaagctgatactaaaaatctgccttatctccaatggattgtgttggagaccttacgtctttacccggtagctccaacaaatattccacacatgacgtcagatgattgcatattggcaggatacgacgttccacgtgggtcgatgttattggtgaacgtatggtccatgcatagagacccgtctatatgggaagccccagaaatgttcaagccagagaggttcaaaaatgaaaagcttaatcagaagttgttgtcgtttgggtttggacgacgagcttgtcccggggttggcctagctcatcggttaatgagcttggctcttggatcgatggttcagtgtttcgaatggcagagaattggtgaagaatatgtagacactagagaagaacctatggccatgatgcgtcctgcgacaccgttgctagccatgtgtaaagctcgtcccattgtccataagtttctcgatgcttttgcttga

SEQ ID NO: 97099 - protein, 543 aa, Arabidopsis thaliana
  peptide (1)..(543): Ceres Seq. ID no. 12736048
  misc_feature (1)..(543): Homolog of NCBI NO: 15227789 NR Description: cytochrome p450 family; protein id: At2g23190.1
  misc_feature (34)..(543): Homolog of NCBI NO: 15227792 NR Description: cytochrome p450, putative; protein id: [Arabidopsis thaliana] >gi|7430669|pir||T00510 probable
  misc_feature (44)..(541): Homolog of NCBI NO: 15228472 NR Description: cytochrome p450 family; protein id: At3g28740.1, by cDNA: gi_15292830, supported by cDNA: gi_21280798 [Arabidopsis >gi|11994781|dbj|BAB03171.1| cytochrome P450 [Arabidopsis
  misc_feature (45)..(540): Homolog of NCBI NO: 15235536 NR Description: cytochrome p450 family; protein id: At4g37370.1, by cDNA: 253698., supported by cDNA: gi_17473897 [Arabidopsis
  misc_feature (45)..(540): Homolog of NCBI NO: 21554381 NR Description: cytochrome P450-like protein [Arabidopsis
  misc_feature (51)..(537): Homolog of NCBI NO: 15235517 NR Description: cytochrome p450 family; protein id: At4g37320.1
  misc_feature (50)..(539): Homolog of NCBI NO: 15235533 NR Description: cytochrome p450 family; protein id: At4g37330.1
  misc_feature (45)..(539): Homolog of NCBI NO: 15235535 NR Description: cytochrome p450 family; protein id: At4g37360.1
  misc_feature (53)..(543): Homolog of NCBI NO: 15235534 NR Description: cytochrome P450 monooxygenase, putative; protein
  misc_feature (49)..(539): Homolog of NCBI NO: 30692923 NR Description: cytochrome P450 91A1 [Arabidopsis thaliana] Cytochrome P450 81D1 >gi|9759034|dbj|BAB09361.1| cytochrome P450 thaliana] >gi|20147351|gb|AAM10388.1| AT5g36220/T30G6_3
MITPKLELLFFIIMFHVNSRFRYKLSYNFELPCSVQHIYKFFDLMETHFLILSLAFLFFISLKLLFGKRHSKFNLPPSPARPLPFIGHLHLLKQPLHRTFLSFSQSLGDAPIFSLRLGNHLTVVVSSYSIAEECFTKNDIVLANRPKFILGKHIEYNFTTMTSAPYGDHWRNLRRIGTLEIFSSHKLNGFLSVRKDEIRHLLLRLSKNSQHGFAKVEMRQLFYDLTINNILRMVAGKRFYGEGTEQDEVARRVTQLIDEIVYRAGVGNAADYIPILRWITDFEKGVKELASRVDEFLQSLVDERRVHKQKGNTMMDHLLSLQETQPDYYTDVTLKGIIIVMILAGTETLAGTLEWAMLNLLNHPEVLEKARTEIDTEVGFDRLMDEADTKNLPYLQWIVLETLRLYPVAPTNIPHMTSDDCILAGYDVPRGSMLLVNVWSMHRDPSIWEAPEMFKPERFKNEKLNQKLLSFGFGRRACPGVGLAHRLMSLALGSMVQCFEWQRIGEEYVDTREEPMAMMRPATPLLAMCKARPIVHKFLDAFA

SEQ ID NO: 97100 - protein, 530 aa, Arabidopsis thaliana
  peptide (1)..(530): Ceres Seq. ID no. 12736049
  misc_feature (1)..(530): Homolog of NCBI NO: 15227789 NR Description: cytochrome p450 family; protein id: At2g23190.1
  misc_feature (21)..(530): Homolog of NCBI NO: 15227792 NR Description: cytochrome p450, putative; protein id: [Arabidopsis thaliana] >gi|7430669|pir||T00510 probable
  misc_feature (31)..(528): Homolog of NCBI NO: 15228472 NR Description: cytochrome p450 family; protein id: At3g28740.1, by cDNA: gi_15292830, supported by cDNA: gi_21280798 [Arabidopsis >gi|11994781|dbj|BAB03171.1| cytochrome P450 [Arabidopsis
  misc_feature (32)..(527): Homolog of NCBI NO: 15235536 NR Description: cytochrome p450 family; protein id: At4g37370.1, by cDNA: 253698., supported by cDNA: gi_17473897 [Arabidopsis
  misc_feature (32)..(527): Homolog of NCBI NO: 21554381 NR Description: cytochrome P450-like protein [Arabidopsis
  misc_feature (38)..(524): Homolog of NCBI NO: 15235517 NR Description: cytochrome p450 family; protein id: At4g37320.1
  misc_feature (37)..(526): Homolog of NCBI NO: 15235533 NR Description: cytochrome p450 family; protein id: At4g37330.1
  misc_feature (32)..(526): Homolog of NCBI NO: 15235535 NR Description: cytochrome p450 family; protein id: At4g37360.1
  misc_feature (40)..(530): Homolog of NCBI NO: 15235534 NR Description: cytochrome P450 monooxygenase, putative; protein
  misc_feature (36)..(526): Homolog of NCBI NO: 30692923 NR Description: cytochrome P450 91A1 [Arabidopsis thaliana] Cytochrome P450 81D1 >gi|9759034|dbj|BAB09361.1| cytochrome P450 thaliana] >gi|20147351|gb|AAM10388.1| AT5g36220/T30G6_3
MFHVNSRFRYKLSYNFELPCSVQHIYKFFDLMETHFLILSLAFLFFISLKLLFGKRHSKFNLPPSPARPLPFIGHLHLLKQPLHRTFLSFSQSLGDAPIFSLRLGNHLTVVVSSYSIAEECFTKNDIVLANRPKFILGKHIEYNFTTMTSAPYGDHWRNLRRIGTLEIFSSHKLNGFLSVRKDEIRHLLLRLSKNSQHGFAKVEMRQLFYDLTINNILRMVAGKRFYGEGTEQDEVARRVTQLIDEIVYRAGVGNAADYIPILRWITDFEKGVKELASRVDEFLQSLVDERRVHKQKGNTMMDHLLSLQETQPDYYTDVTLKGIIIVMILAGTETLAGTLEWAMLNLLNHPEVLEKARTEIDTEVGFDRLMDEADTKNLPYLQWIVLETLRLYPVAPTNIPHMTSDDCILAGYDVPRGSMLLVNVWSMHRDPSIWEAPEMFKPERFKNEKLNQKLLSFGFGRRACPGVGLAHRLMSLALGSMVQCFEWQRIGEEYVDTREEPMAMMRPATPLLAMCKARPIVHKFLDAFA

SEQ ID NO: 97101 - protein, 499 aa, Arabidopsis thaliana
  peptide (1)..(499): Ceres Seq. ID no. 12736050
  misc_feature (1)..(499): Homolog of NCBI NO: 15227789 NR Description: cytochrome p450 family; protein id: At2g23190.1
  misc_feature (1)..(499): Homolog of NCBI NO: 15227792 NR Description: cytochrome p450, putative; protein id: [Arabidopsis thaliana] >gi|7430669|pir||T00510 probable
  misc_feature (1)..(497): Homolog of NCBI NO: 15228472 NR Description: cytochrome p450 family; protein id: At3g28740.1, by cDNA: gi_15292830, supported by cDNA: gi_21280798 [Arabidopsis >gi|11994781|dbj|BAB03171.1| cytochrome P450 [Arabidopsis
  misc_feature (1)..(496): Homolog of NCBI NO: 15235536 NR Description: cytochrome p450 family; protein id: At4g37370.1, by cDNA: 253698., supported by cDNA: gi_17473897 [Arabidopsis
  misc_feature (1)..(496): Homolog of NCBI NO: 21554381 NR Description: cytochrome P450-like protein [Arabidopsis
  misc_feature (7)..(493): Homolog of NCBI NO: 15235517 NR Description: cytochrome p450 family; protein id: At4g37320.1
  misc_feature (6)..(495): Homolog of NCBI NO: 15235533 NR Description: cytochrome p450 family; protein id: At4g37330.1
  misc_feature (1)..(495): Homolog of NCBI NO: 15235535 NR Description: cytochrome p450 family; protein id: At4g37360.1
  misc_feature (9)..(499): Homolog of NCBI NO: 15235534 NR Description: cytochrome P450 monooxygenase, putative; protein
  misc_feature (5)..(495): Homolog of NCBI NO: 30692923 NR Description: cytochrome P450 91A1 [Arabidopsis thaliana] Cytochrome P450 81D1 >gi|9759034|dbj|BAB09361.1| cytochrome P450 thaliana] >gi|20147351|gb|AAM10388.1| AT5g36220/T30G6_3
METHFLILSLAFLFFISLKLLFGKRHSKFNLPPSPARPLPFIGHLHLLKQPLHRTFLSFSQSLGDAPIFSLRLGNHLTVVVSSYSIAEECFTKNDIVLANRPKFILGKHIEYNFTTMTSAPYGDHWRNLRRIGTLEIFSSHKLNGFLSVRKDEIRHLLLRLSKNSQHGFAKVEMRQLFYDLTINNILRMVAGKRFYGEGTEQDEVARRVTQLIDEIVYRAGVGNAADYIPILRWITDFEKGVKELASRVDEFLQSLVDERRVHKQKGNTMMDHLLSLQETQPDYYTDVTLKGIIIVMILAGTETLAGTLEWAMLNLLNHPEVLEKARTEIDTEVGFDRLMDEADTKNLPYLQWIVLETLRLYPVAPTNIPHMTSDDCILAGYDVPRGSMLLVNVWSMHRDPSIWEAPEMFKPERFKNEKLNQKLLSFGFGRRACPGVGLAHRLMSLALGSMVQCFEWQRIGEEYVDTREEPMAMMRPATPLLAMCKARPIVHKFLDAFA

SEQ ID NO: 97102 - DNA, 2505 bp, Arabidopsis thaliana
  misc_feature (1)..(2505): Ceres Seq. ID no. 12736051
  misc_feature: MA Experiment ID: 20000171 Result: Down-regulated in Transcription
  misc_feature: MA Experiment 20000171 PARAMETER Experiment Name: At_42deg_Heat_P Parameter: Age (day) Value: 14
  misc_feature: MA Experiment 20000171 PARAMETER Experiment Name: At_42deg_Heat_P Parameter: Organism Value: A. thaliana
  misc_feature: MA Experiment 20000171 PARAMETER Experiment Name: At_42deg_Heat_P Parameter: Plant Line Value: WS
  misc_feature: MA Experiment 20000171 PARAMETER Experiment Name: At_42deg_Heat_P Parameter: Temperature (deg C) Value: 42 vs. 22
  misc_feature: MA Experiment 20000171 PARAMETER Experiment Name: At_42deg_Heat_P Parameter: Timepoint (hr) Value: 1
  misc_feature: MA Experiment 20000171 PARAMETER Experiment Name: At_42deg_Heat_P Parameter: Tissue Value: Aerial
  misc_feature: MA Experiment ID: 20000173 Result: Down-regulated in Transcription
  misc_feature: MA Experiment 20000173 PARAMETER Experiment Name: At_42deg_Heat_P Parameter: Age (day) Value: 14
  misc_feature: MA Experiment 20000173 PARAMETER Experiment Name: At_42deg_Heat_P Parameter: Organism Value: A. thaliana
  misc_feature: MA Experiment 20000173 PARAMETER Experiment Name: At_42deg_Heat_P Parameter: Plant Line Value: WS
  misc_feature: MA Experiment 20000173 PARAMETER Experiment Name: At_42deg_Heat_P Parameter: Temperature (deg C) Value: 42 vs. 22
  misc_feature: MA Experiment 20000173 PARAMETER Experiment Name: At_42deg_Heat_P Parameter: Timepoint (hr) Value: 6
  misc_feature: MA Experiment 20000173 PARAMETER Experiment Name: At_42deg_Heat_P Parameter: Tissue Value: Aerial
  misc_feature: MA Experiment ID: 20000182 Result: Up-regulated in Transcription
  misc_feature: MA Experiment 20000182 PARAMETER Experiment Name: At_2mM_SA_P Parameter: Age (day) Value: 14
  misc_feature: MA Experiment 20000182 PARAMETER Experiment Name: At_2mM_SA_P Parameter: Organism Value: A. thaliana
  misc_feature: MA Experiment 20000182 PARAMETER Experiment Name: At_2mM_SA_P Parameter: Plant Line Value: WS
  misc_feature: MA Experiment 20000182 PARAMETER Experiment Name: At_2mM_SA_P Parameter: Timepoint (hr) Value: 6
  misc_feature: MA Experiment 20000182 PARAMETER Experiment Name: At_2mM_SA_P Parameter: Tissue Value: Aerial
  misc_feature: MA Experiment 20000182 PARAMETER Experiment Name: At_2mM_SA_P Parameter: Treatment Value: 2mM SA vs. No Treatment
  misc_feature: MA Experiment ID: 20000184 Result: Down-regulated in Transcription
  misc_feature: MA Experiment 20000184 PARAMETER Experiment Name: At_Shoots__P Parameter: Age (day) Value: 7
  misc_feature: MA Experiment 20000184 PARAMETER Experiment Name: At_Shoots__P Parameter: Tissue Value: Shoots vs. Whole Plant
  misc_feature: MA Experiment ID: 20000185 Result: Down-regulated in Transcription
  misc_feature: MA Experiment 20000185 PARAMETER Experiment Name: At_Roots__P Parameter: Age (day) Value: 7 vs. 21
  misc_feature: MA Experiment 20000185 PARAMETER Experiment Name: At_Roots__P Parameter: Organism Value: A. thaliana
  misc_feature: MA Experiment 20000185 PARAMETER Experiment Name: At_Roots__P Parameter: Tissue Value: Roots vs. Whole Plant
  misc_feature: MA Experiment ID: 20000227 Result: Down-regulated in Transcription
  misc_feature: MA Experiment 20000227 PARAMETER Experiment Name: At_Root-Tips-vs-Tops_P Parameter: Tissue Value: Root Tips vs. Root Tops
  misc_feature: MA Experiment ID: 20000234 Result: Down-regulated in Transcription
  misc_feature: MA Experiment 20000234 PARAMETER Experiment Name: At_Siliques_P Parameter: Age (day) Value: 21
  misc_feature: MA Experiment 20000234 PARAMETER Experiment Name: At_Siliques_P Parameter: Organism Value: A. thaliana
  misc_feature: MA Experiment 20000234 PARAMETER Experiment Name: At_Siliques_P Parameter: Plant Line Value: WS
  misc_feature: MA Experiment 20000234 PARAMETER Experiment Name: At_Siliques_P Parameter: Tissue Value: Less Than 5mm Siliques vs. Whole Plant
  misc_feature: MA Experiment ID: 20000235 Result: Down-regulated in Transcription
  misc_feature: MA Experiment 20000235 PARAMETER Experiment Name: At_Siliques_P Parameter: Age (day) Value: 21
  misc_feature: MA Experiment 20000235 PARAMETER Experiment Name: At_Siliques_P Parameter: Organism Value: A. thaliana
  misc_feature: MA Experiment 20000235 PARAMETER Experiment Name: At_Siliques_P Parameter: Plant Line Value: WS
  misc_feature: MA Experiment 20000235 PARAMETER Experiment Name: At_Siliques_P Parameter: Tissue Value: 5-10mm Siliques vs. Whole Plant
  misc_feature: MA Experiment ID: 20000286 Result: Down-regulated in Transcription
  misc_feature: MA Experiment 20000286 PARAMETER Experiment Name: At_Open_Flower_P Parameter: Age (day) Value: 21
  misc_feature: MA Experiment 20000286 PARAMETER Experiment Name: At_Open_Flower_P Parameter: Plant Line Value: WS
  misc_feature: MA Experiment 20000286 PARAMETER Experiment Name: At_Open_Flower_P Parameter: Tissue Value: Half Open vs. Whole Plant
  misc_feature: MA Experiment ID: 20000437 Result: Down-regulated in Transcription
  misc_feature: MA Experiment 20000437 PARAMETER Experiment Name: At_Drought_P Parameter: Age (day) Value: 8
  misc_feature: MA Experiment 20000437 PARAMETER Experiment Name: At_Drought_P Parameter: Organism Value: A. thaliana
  misc_feature: MA Experiment 20000437 PARAMETER Experiment Name: At_Drought_P Parameter: Plant Line Value: WS
  misc_feature: MA Experiment 20000437 PARAMETER Experiment Name: At_Drought_P Parameter: Timepoint (hr) Value: 24
  misc_feature: MA Experiment 20000437 PARAMETER Experiment Name: At_Drought_P Parameter: Tissue Value: Whole Plant
  misc_feature: MA Experiment 20000437 PARAMETER Experiment Name: At_Drought_P Parameter: Treatment Value: Drought vs. No Drought
  misc_feature: MA Experiment ID: 20000438 Result: Down-regulated in Transcription
  misc_feature: MA Experiment 20000438 PARAMETER Experiment Name: At_Shoots__P Parameter: Age (day) Value: 14
  misc_feature: MA Experiment 20000438 PARAMETER Experiment Name: At_Shoots__P Parameter: Tissue Value: Shoots vs. Whole Plant
  misc_feature: MA Experiment ID: 20000439 Result: Down-regulated in Transcription
  misc_feature: MA Experiment 20000439 PARAMETER Experiment Name: At_Roots__P Parameter: Age (day) Value: 14 vs. 21
  misc_feature: MA Experiment 20000439 PARAMETER Experiment Name: At_Roots__P Parameter: Organism Value: A. thaliana
  misc_feature: MA Experiment 20000439 PARAMETER Experiment Name: At_Roots__P Parameter: Tissue Value: Roots vs. Whole Plant
  misc_feature: MA Experiment ID: 20000441 Result: Up-regulated in Transcription
  misc_feature: MA Experiment 20000441 PARAMETER Experiment Name: At_1uM_BR-BRZ__P Parameter: Tissue Value: Shoot Apices
  misc_feature: MA Experiment 20000441 PARAMETER Experiment Name: At_1uM_BR-BRZ__P Parameter: Treatment Value: 1uM BR vs. No Treatment
  misc_feature: MA Experiment ID: 20000443 Result: Up-regulated in Transcription
  misc_feature: MA Experiment 20000443 PARAMETER Experiment Name: At_1uM_BR-BRZ__P Parameter: Tissue Value: Shoot Apices
  misc_feature: MA Experiment 20000443 PARAMETER Experiment Name: At_1uM_BR-BRZ__P Parameter: Treatment Value: 1uM BRZ vs. No Treatment
  misc_feature: MA Experiment ID: 20000794 Result: Down-regulated in Transcription
  misc_feature: MA Experiment 20000794 PARAMETER Experiment Name: At_Petals_P Parameter: Age (day) Value: 23-25 days
  misc_feature: MA Experiment 20000794 PARAMETER Experiment Name: At_Petals_P Parameter: Plant Line Value: WS
  misc_feature: MA Experiment 20000794 PARAMETER Experiment Name: At_Petals_P Parameter: Tissue Value: Petals vs. Whole plant
  misc_feature: MA Experiment ID: 20001556 Result: Down-regulated in Transcription
  misc_feature: MA Experiment 20001556 PARAMETER Experiment Name: At_Drought_Soil_Dry_P Parameter: Age (day) Value: 26
  misc_feature: MA Experiment 20001556 PARAMETER Experiment Name: At_Drought_Soil_Dry_P Parameter: Organism Value: A. thaliana
  misc_feature: MA Experiment 20001556 PARAMETER Experiment Name: At_Drought_Soil_Dry_P Parameter: Plant Line Value: WS
  misc_feature: MA Experiment 20001556 PARAMETER Experiment Name: At_Drought_Soil_Dry_P Parameter: Post Timepoint (hr) Value: None
  misc_feature: MA Experiment 20001556 PARAMETER Experiment Name: At_Drought_Soil_Dry_P Parameter: Post-Treatment Value: None
  misc_feature: MA Experiment 20001556 PARAMETER Experiment Name: At_Drought_Soil_Dry_P Parameter: Timepoint (day) Value: 12
  misc_feature: MA Experiment 20001556 PARAMETER Experiment Name: At_Drought_Soil_Dry_P Parameter: Treatment Value: Drought vs. No Drought
  misc_feature: MA Experiment ID: 20001557 Result: Down-regulated in Transcription
  misc_feature: MA Experiment 20001557 PARAMETER Experiment Name: At_Drought_Soil_Dry_P Parameter: Age (day) Value: 27
  misc_feature: MA Experiment 20001557 PARAMETER Experiment Name: At_Drought_Soil_Dry_P Parameter: Organism Value: A. thaliana
  misc_feature: MA Experiment 20001557 PARAMETER Experiment Name: At_Drought_Soil_Dry_P Parameter: Plant Line Value: WS
  misc_feature: MA Experiment 20001557 PARAMETER Experiment Name: At_Drought_Soil_Dry_P Parameter: Post Timepoint (hr) Value: 3
  misc_feature: MA Experiment 20001557 PARAMETER Experiment Name: At_Drought_Soil_Dry_P Parameter: Post-Treatment Value: Re-Water vs. No Drought
  misc_feature: MA Experiment 20001557 PARAMETER Experiment Name: At_Drought_Soil_Dry_P Parameter: Timepoint (day) Value: 13
  misc_feature: MA Experiment 20001557 PARAMETER Experiment Name: At_Drought_Soil_Dry_P Parameter: Treatment Value: Drought vs. No Drought
  misc_feature: MA Experiment ID: 20001560 Result: Down-regulated in Transcription
  misc_feature: MA Experiment 20001560 PARAMETER Experiment Name: At_Drought_Soil_Dry_P Parameter: Age (day) Value: 28
  misc_feature: MA Experiment 20001560 PARAMETER Experiment Name: At_Drought_Soil_Dry_P Parameter: Organism Value: A. thaliana
  misc_feature: MA Experiment 20001560 PARAMETER Experiment Name: At_Drought_Soil_Dry_P Parameter: Plant Line Value: WS
  misc_feature: MA Experiment 20001560 PARAMETER Experiment Name: At_Drought_Soil_Dry_P Parameter: Post Timepoint (hr) Value: None
  misc_feature: MA Experiment 20001560 PARAMETER Experiment Name: At_Drought_Soil_Dry_P Parameter: Post-Treatment Value: None
  misc_feature: MA Experiment 20001560 PARAMETER Experiment Name: At_Drought_Soil_Dry_P Parameter: Timepoint (day) Value: 14
  misc_feature: MA Experiment 20001560 PARAMETER Experiment Name: At_Drought_Soil_Dry_P Parameter: Treatment Value: Drought vs. No Drought
  misc_feature: MA Experiment ID: 20001904 Result: Down-regulated in Transcription
  misc_feature: MA Experiment 20001904 PARAMETER Experiment Name: At_Drought_Reproduction_P Parameter: Age (day) Value: 37
  misc_feature: MA Experiment 20001904 PARAMETER Experiment Name: At_Drought_Reproduction_P Parameter: Organism Value: A. thaliana
  misc_feature: MA Experiment 20001904 PARAMETER Experiment Name: At_Drought_Reproduction_P Parameter: Plant Line Value: WS
  misc_feature: MA Experiment 20001904 PARAMETER Experiment Name: At_Drought_Reproduction_P Parameter: Timepoint (day) Value: 7
  misc_feature: MA Experiment 20001904 PARAMETER Experiment Name: At_Drought_Reproduction_P Parameter: Tissue Value: Rosettes
  misc_feature: MA Experiment 20001904 PARAMETER Experiment Name: At_Drought_Reproduction_P Parameter: Treatment Value: Drought vs. No Drought
atggagaatttctgttttcaagactctgtttctctatttatcacgatcatggttcttgttcttctcccccgtctcagtctttctgatacttcgacgtacacccgtcctgagaatttttacgtcaactgtggatcggattctaatgtattttatggtggccagaccttcgtcggagataccaactcgagtactaactcagtttccttcaccaacaaaggaactgaagtcatcaacgaccaatcgtccgttgcgcctgaaatataccggacggttaggatatttagacacccttcttcttacaagttcaaacttgattctctgggtctgcactttgtgcgtctccatttctctgttgtgttttctcgggcagatcttttaactgctcggttcactgtctctgctacctctggttctaatcatcacttgaaaagtttctcgcctcagaatctcactaataccccacgagttgaagagtttctcctgatgatgaactcgctggagttcgaaattcgatttgtgcccgatcattcctctttagctctcatcaatgccatcgaagtgttctctgctcctgatgacctcgaaatcccatcagcttccgataagaatctgcatacgatttacagattaaacgtaggaggcgagaaaatcactccggataatgataccttgggacgaacttggctgcctgacgatgatgactttctctaccgaaaagattcagcgaggaacattaattcaacacaaacgcctaactacgtgggagggttaagttcagccacggactccactgctcctgatttcgtctacaagacagctaaagcaatgaaccgtagctcgaatgagcaggtggggatgttgatgaatgttacatggtcgttcaaggtcaaaagtaaccatagacacttcatcaggattcatttttctgatattttgagcaacttatcaaactccgactccgatttctatctctttgtaaatgggtattggcgagtagatgtaaagccttcagagcagcctaggttggcgagtccgttttttaaggatgtcgtgaatgtctctgatggttctggactcttgaatatcagtataggtaccaaggaggccaataaggatgctggttttctgaatggtctggagatgatggaggttttgagtaaatctggttctgattattcaaatagaagcagttcccgggttcacatcatcactggttgtgctgttgctgctgctgctgcatcagctttggtcttcagtttgctgtttatggtattcttgaagcggaggagatcgaagaagactaagccagaggttgagggcactgtatggtctcctttgccattgcacagaggtgggagttcagacaatagacctatctctcaataccacaactccccattacgcaacctacacttaggcttaacgattcccttcacagacattctaagcgctacaaacaacttcgacgagcagttgttgatcgggaaaggcgggtttggctacgtttacaaagctattcttcccgatggaaccaaagccgctatcaaacgaggcaaaaccggctcaggacaagggatcttagagtttcaaaccgagattcaagtcctctcaagaatccgacatagacacctcgtctcgctaacgggatactgcgaagaaaactccgaaatgatcctcgtctacgagtttatggagaaaggtacactcaaagaacatctatacggctcgaatctaccttcattaacatggaaacaaagactagagatatgcattggagcagctagaggtttagattatctccacagtagtggctcagaaggagcaatcattcacagagacgtcaaatcaacaaacatattactagacgagcacaatatagcaaaagtcgcagatttcggattatcgaaaattcataatcaagatgaaagcaatatcagcataaacatcaaaggaacattcggttacttggatccagaatatctccaaacacataaattaacagagaaatcagatgtttacgcattcggagtcgtcctcctcgaggtactgttcgcgagaccagctatagatccttatcttcctcacgaagaagtgaatctatcggaatgggtgatgttctgcaaatcaaaaggtacaatcgatgagatcttagatccgagtttgataggtcaaattgagacgaattcgttgaagaaattcatggaaattgctgagaaatgtttgaaagagtatggagatgagagaccgagtatgagggatgtgatttgggatcttgagtatgttcttcagctacagatgatgacgaatcgtcgagaggctcatgaagaagatagtacggcgattaattccggtggttcgttggttgctccgaggttgatggtgagtgattcgtttagtacgaactcgatatttcagaatggtgatgaatcgaagaacagatttggatttacagattcatcggagactcgagttttttcgcagttgaagatctctgatgcaagatga

SEQ ID NO: 97103 - protein, 834 aa, Arabidopsis thaliana
  peptide (1)..(834): Ceres Seq. ID no. 12736052
  misc_feature (17)..(834): Homolog of NCBI NO: 15237872 NR Description: receptor-protein kinase-like protein; protein id:
  misc_feature (349)..(828): Homolog of NCBI NO: 15239630 NR Description: receptor-protein kinase-like protein; protein id:
  misc_feature (12)..(426): Homolog of NCBI NO: 15239630 NR Description: receptor-protein kinase-like protein; protein id:
  misc_feature (33)..(834): Homolog of NCBI NO: 15231393 NR Description: receptor protein kinase -like; protein id:
  misc_feature (33)..(834): Homolog of NCBI NO: 15238498 NR Description: receptor-like protein kinase precursor - like;
  misc_feature (36)..(799): Homolog of NCBI NO: 7488962 NR Description: receptor-like protein kinase (EC 2.7.1.-)
  misc_feature (13)..(454): Homolog of NCBI NO: 15240228 NR Description: receptor-like protein kinase precursor - like; id: At5g61350.1 [Arabidopsis thaliana]
  misc_feature (452)..(799): Homolog of NCBI NO: 15240228 NR Description: receptor-like protein kinase precursor - like; id: At5g61350.1 [Arabidopsis thaliana]
  misc_feature (112)..(834): Homolog of NCBI NO: 37536416 NR Description: putative receptor-like protein kinase [Oryza
  misc_feature (140)..(801): Homolog of NCBI NO: 15234944 NR Description: putative receptor-like protein kinase; protein At4g39110.1 [Arabidopsis thaliana] >gi|7488247|pir||T08559
MENFCFQDSVSLFITIMVLVLLPRLSLSDTSTYTRPENFYVNCGSDSNVFYGGQTFVGDTNSSTNSVSFTNKGTEVINDQSSVAPEIYRTVRIFRHPSSYKFKLDSLGLHFVRLHFSVVFSRADLLTARFTVSATSGSNHHLKSFSPQNLTNTPRVEEFLLMMNSLEFEIRFVPDHSSLALINAIEVFSAPDDLEIPSASDKNLHTIYRLNVGGEKITPDNDTLGRTWLPDDDDFLYRKDSARNINSTQTPNYVGGLSSATDSTAPDFVYKTAKAMNRSSNEQVGMLMNVTWSFKVKSNHRHFIRIHFSDILSNLSNSDSDFYLFVNGYWRVDVKPSEQPRLASPFFKDVVNVSDGSGLLNISIGTKEANKDAGFLNGLEMMEVLSKSGSDYSNRSSSRVHIITGCAVAAAAASALVFSLLFMVFLKRRRSKKTKPEVEGTVWSPLPLHRGGSSDNRPISQYHNSPLRNLHLGLTIPFTDILSATNNFDEQLLIGKGGFGYVYKAILPDGTKAAIKRGKTGSGQGILEFQTEIQVLSRIRHRHLVSLTGYCEENSEMILVYEFMEKGTLKEHLYGSNLPSLTWKQRLEICIGAARGLDYLHSSGSEGAIIHRDVKSTNILLDEHNIAKVADFGLSKIHNQDESNISINIKGTFGYLDPEYLQTHKLTEKSDVYAFGVVLLEVLFARPAIDPYLPHEEVNLSEWVMFCKSKGTIDEILDPSLIGQIETNSLKKFMEIAEKCLKEYGDERPSMRDVIWDLEYVLQLQMMTNRREAHEEDSTAINSGGSLVAPRLMVSDSFSTNSIFQNGDESKNRFGFTDSSETRVFSQLKISDAR

SEQ ID NO: 97104 - protein, 818 aa, Arabidopsis thaliana
  peptide (1)..(818): Ceres Seq. ID no. 12736053
  misc_feature (1)..(818): Homolog of NCBI NO: 15237872 NR Description: receptor-protein kinase-like protein; protein id:
  misc_feature (333)..(812): Homolog of NCBI NO: 15239630 NR Description: receptor-protein kinase-like protein; protein id:
  misc_feature (1)..(410): Homolog of NCBI NO: 15239630 NR Description: receptor-protein kinase-like protein; protein id:
  misc_feature (17)..(818): Homolog of NCBI NO: 15231393 NR Description: receptor protein kinase -like; protein id:
  misc_feature (17)..(818): Homolog of NCBI NO: 15238498 NR Description: receptor-like protein kinase precursor - like;
  misc_feature (20)..(783): Homolog of NCBI NO: 7488962 NR Description: receptor-like protein kinase (EC 2.7.1.-)
  misc_feature (1)..(438): Homolog of NCBI NO: 15240228 NR Description: receptor-like protein kinase precursor - like; id: At5g61350.1 [Arabidopsis thaliana]
  misc_feature (436)..(783): Homolog of NCBI NO: 15240228 NR Description: receptor-like protein kinase precursor - like; id: At5g61350.1 [Arabidopsis thaliana]
  misc_feature (96)..(818): Homolog of NCBI NO: 37536416 NR Description: putative receptor-like protein kinase [Oryza
  misc_feature (124)..(785): Homolog of NCBI NO: 15234944 NR Description: putative receptor-like protein kinase; protein At4g39110.1 [Arabidopsis thaliana] >gi|7488247|pir||T08559
MVLVLLPRLSLSDTSTYTRPENFYVNCGSDSNVFYGGQTFVGDTNSSTNSVSFTNKGTEVINDQSSVAPEIYRTVRIFRHPSSYKFKLDSLGLHFVRLHFSVVFSRADLLTARFTVSATSGSNHHLKSFSPQNLTNTPRVEEFLLMMNSLEFEIRFVPDHSSLALINAIEVFSAPDDLEIPSASDKNLHTIYRLNVGGEKITPDNDTLGRTWLPDDDDFLYRKDSARNINSTQTPNYVGGLSSATDSTAPDFVYKTAKAMNRSSNEQVGMLMNVTWSFKVKSNHRHFIRIHFSDILSNLSNSDSDFYLFVNGYWRVDVKPSEQPRLASPFFKDVVNVSDGSGLLNISIGTKEANKDAGFLNGLEMMEVLSKSGSDYSNRSSSRVHIITGCAVAAAAASALVFSLLFMVFLKRRRSKKTKPEVEGTVWSPLPLHRGGSSDNRPISQYHNSPLRNLHLGLTIPFTDILSATNNFDEQLLIGKGGFGYVYKAILPDGTKAAIKRGKTGSGQGILEFQTEIQVLSRIRHRHLVSLTGYCEENSEMILVYEFMEKGTLKEHLYGSNLPSLTWKQRLEICIGAARGLDYLHSSGSEGAIIHRDVKSTNILLDEHNIAKVADFGLSKIHNQDESNISINIKGTFGYLDPEYLQTHKLTEKSDVYAFGVVLLEVLFARPAIDPYLPHEEVNLSEWVMFCKSKGTIDEILDPSLIGQIETNSLKKFMEIAEKCLKEYGDERPSMRDVIWDLEYVLQLQMMTNRREAHEEDSTAINSGGSLVAPRLMVSDSFSTNSIFQNGDESKNRFGFTDSSETRVFSQLKISDAR

SEQ ID NO: 97105 - protein, 673 aa, Arabidopsis thaliana
  peptide (1)..(673): Ceres Seq. ID no. 12736054
  misc_feature (1)..(673): Homolog of NCBI NO: 15237872 NR Description: receptor-protein kinase-like protein; protein id:
  misc_feature (188)..(667): Homolog of NCBI NO: 15239630 NR Description: receptor-protein kinase-like protein; protein id:
  misc_feature (1)..(265): Homolog of NCBI NO: 15239630 NR Description: receptor-protein kinase-like protein; protein id:
  misc_feature (1)..(673): Homolog of NCBI NO: 15231393 NR Description: receptor protein kinase -like; protein id:
  misc_feature (1)..(673): Homolog of NCBI NO: 15238498 NR Description: receptor-like protein kinase precursor - like;
  misc_feature (1)..(638): Homolog of NCBI NO: 7488962 NR Description: receptor-like protein kinase (EC 2.7.1.-)
  misc_feature (1)..(293): Homolog of NCBI NO: 15240228 NR Description: receptor-like protein kinase precursor - like; id: At5g61350.1 [Arabidopsis thaliana]
  misc_feature (291)..(638): Homolog of NCBI NO: 15240228 NR Description: receptor-like protein kinase precursor - like; id: At5g61350.1 [Arabidopsis thaliana]
  misc_feature (1)..(673): Homolog of NCBI NO: 37536416 NR Description: putative receptor-like protein kinase [Oryza
  misc_feature (1)..(640): Homolog of NCBI NO: 15234944 NR Description: putative receptor-like protein kinase; protein At4g39110.1 [Arabidopsis thaliana] >gi|7488247|pir||T08559
MMNSLEFEIRFVPDHSSLALINAIEVFSAPDDLEIPSASDKNLHTIYRLNVGGEKITPDNDTLGRTWLPDDDDFLYRKDSARNINSTQTPNYVGGLSSATDSTAPDFVYKTAKAMNRSSNEQVGMLMNVTWSFKVKSNHRHFIRIHFSDILSNLSNSDSDFYLFVNGYWRVDVKPSEQPRLASPFFKDVVNVSDGSGLLNISIGTKEANKDAGFLNGLEMMEVLSKSGSDYSNRSSSRVHIITGCAVAAAAASALVFSLLFMVFLKRRRSKKTKPEVEGTVWSPLPLHRGGSSDNRPISQYHNSPLRNLHLGLTIPFTDILSATNNFDEQLLIGKGGFGYVYKAILPDGTKAAIKRGKTGSGQGILEFQTEIQVLSRIRHRHLVSLTGYCEENSEMILVYEFMEKGTLKEHLYGSNLPSLTWKQRLEICIGAARGLDYLHSSGSEGAIIHRDVKSTNILLDEHNIAKVADFGLSKIHNQDESNISINIKGTFGYLDPEYLQTHKLTEKSDVYAFGVVLLEVLFARPAIDPYLPHEEVNLSEWVMFCKSKGTIDEILDPSLIGQIETNSLKKFMEIAEKCLKEYGDERPSMRDVIWDLEYVLQLQMMTNRREAHEEDSTAINSGGSLVAPRLMVSDSFSTNSIFQNGDESKNRFGFTDSSETRVFSQLKISDAR

SEQ ID NO: 97106 - DNA, 2322 bp, Arabidopsis thaliana
  misc_feature (1)..(2322): Ceres Seq. ID no. 12736079
  misc_feature: MA Experiment ID: 20000185 Result: Up-regulated in Transcription
  misc_feature: MA Experiment 20000185 PARAMETER Experiment Name: At_Roots__P Parameter: Age (day) Value: 7 vs. 21
  misc_feature: MA Experiment 20000185 PARAMETER Experiment Name: At_Roots__P Parameter: Organism Value: A. thaliana
  misc_feature: MA Experiment 20000185 PARAMETER Experiment Name: At_Roots__P Parameter: Tissue Value: Roots vs. Whole Plant
  misc_feature: MA Experiment ID: 20000439 Result: Up-regulated in Transcription
  misc_feature: MA Experiment 20000439 PARAMETER Experiment Name: At_Roots__P Parameter: Age (day) Value: 14 vs. 21
  misc_feature: MA Experiment 20000439 PARAMETER Experiment Name: At_Roots__P Parameter: Organism Value: A. thaliana
  misc_feature: MA Experiment 20000439 PARAMETER Experiment Name: At_Roots__P Parameter: Tissue Value: Roots vs. Whole Plant
  misc_feature: MA Experiment ID: 20001557 Result: Up-regulated in Transcription
  misc_feature: MA Experiment 20001557 PARAMETER Experiment Name: At_Drought_Soil_Dry_P Parameter: Age (day) Value: 27
  misc_feature: MA Experiment 20001557 PARAMETER Experiment Name: At_Drought_Soil_Dry_P Parameter: Organism Value: A. thaliana
  misc_feature: MA Experiment 20001557 PARAMETER Experiment Name: At_Drought_Soil_Dry_P Parameter: Plant Line Value: WS
  misc_feature: MA Experiment 20001557 PARAMETER Experiment Name: At_Drought_Soil_Dry_P Parameter: Post Timepoint (hr) Value: 3
  misc_feature: MA Experiment 20001557 PARAMETER Experiment Name: At_Drought_Soil_Dry_P Parameter: Post-Treatment Value: Re-Water vs. No Drought
  misc_feature: MA Experiment 20001557 PARAMETER Experiment Name: At_Drought_Soil_Dry_P Parameter: Timepoint (day) Value: 13
  misc_feature: MA Experiment 20001557 PARAMETER Experiment Name: At_Drought_Soil_Dry_P Parameter: Treatment Value: Drought vs. No Drought
atgaaaacacaatcagcttcaccgttcttcttcgtctccttcttcttcttcttcttcttcttctcttctctgtttcttctctcctctgctttaaactctgatggagttctcttactgagtttcaaatactctgttcttcttgatcctctctctttattacaatcatggaactacgaccacgacaatccttgttcatggcgaggtgtgttgtgtaataacgattcaagagttgttactttatctctcccaaactctaacctcgttggttcgattccttccgatctgggtttcctccaaaacctccaaagtcttaatctttccaataattcactcaatgggtcattaccggttgagtttttcgccgccgataagctccggtttcttgatttatcaaataacttgatctccggcgagatccctgtatcaatcggaggtttacacaacctccagacgttaaatctctccgataacatcttcaccgggaaactaccagctaacttagcgtctcttggaagcttaacggaggtttctctgaagaacaactacttctccggcgagtttcccggcggcggatggagatcggttcagtatctagacatttcttcaaatctaatcaacggttcactcccacctgatttctccggcgacaatctccgatacctgaatgtctcgtataaccaaatctccggagagattcctccgaatgttggtgccggttttcctcaaaacgccaccgttgatttctccttcaacaatttaaccggttcaatcccagattctccggtttaccttaaccagaaatcaatttcgttttccggaaacccgggtttatgcggaggtccgacccgaaacccgtgtcccattccttcatctccggccaccgtctcgccaccaacctctacacctgcactcgcagctatacctaaatcaatcgggtctaatcgagaaaccgaaccgaacaacaactcaaatcctcgaaccgggttaagaccaggagttataatcggaatcatagtcggagatatcgccggaatcggaatcctcgctcttatcttcttctacgtttataaatacaaaaacaacaagacagtggagaagaagaacaatcatagcctagaagctcatgaagctaaagacacaacttcgttatcaccatcatcatcaacaactacatcttcttcatctccagaacaatcaagcagatttgcaaaatggtcatgtctccgtaagaatcaagaaaccgatgaaaccgaagaagaagacgaagaaaatcaacggtcaggagagattggagagaataagaaagggactttagtaaccattgatggaggagagaaagagcttgaagttgaaactttgcttaaggcttctgcttacattttaggagccactggttcgagtataatgtacaagactgttcttgaggacggtacggttctcgcggttcgtcggttaggtgagaatggtttgagtcaacaacgccggtttaaagactttgaggcacatattcgagctattggtaaattggttcacccgaatttggtacgtcttcgtggattctattggggcaccgacgagaaattggtcatttacgattttgttcctaacggcagtctcgtcaacgcccgttacaggaaaggagggtcttcgccgtgccatttaccgtgggagactcggctcaagatagtaaaaggtttggctcgtgggcttgcttacctccacgacaagaaacatgtgcacggtaacttgaagcctagtaacatactcttgggccaagatatggagcccaagatcggagatttcgggctcgaaaggcttctcgccggggatactagctataaccgagctagtggatcatctcggattttcagtagcaagcgattgacagcatcctcgcgtgaatttggtaccatcgggcccacaccgagcccaagtccaagctccgttgggcccatatctccctattgcgcacccgagtcgctccgcaatctcaaaccaaacccgaaatgggatgtgtttgggtttggagtgatcctcctcgagctgctcacgggaaaaatagtgtcgatagacgaggtgggggtaggaaatgggctgaccgtagaggacgggaaccgggcgctaataatggctgatgtagcgatccgctccgaattggaaggcaaagaggactttttacttggccttttcaaattgggatatagttgtgcatctcaaattccacaaaagagaccgaccatgaaagaggcgttagtagtgtttgaaagatatcctattagctcatcggctaagagtccatcgtaccattacggacactattaa

SEQ ID NO: 97107 - protein, 773 aa, Arabidopsis thaliana
  peptide (1)..(773): Ceres Seq. ID no. 12736080
  misc_feature (18)..(772): Homolog of NCBI NO: 25387059 NR Description: receptor kinase-like protein [imported] -
  misc_feature (18)..(772): Homolog of NCBI NO: 30690913 NR Description: leucine rich repeat protein family [Arabidopsis
  misc_feature (18)..(772): Homolog of NCBI NO: 18086496 NR Description: AT4g37250/C7A10_110 [Arabidopsis thaliana]
  misc_feature (10)..(762): Homolog of NCBI NO: 15240265 NR Description: leucine-rich repeat transmembrane protein kinase, protein id: At5g67280.1, supported by cDNA: 110712., supported by
  misc_feature (10)..(762): Homolog of NCBI NO: 15809976 NR Description: AT5g67280/K3G17_4 [Arabidopsis thaliana]
  misc_feature (3)..(540): Homolog of NCBI NO: 18418404 NR Description: leucine-rich repeat transmembrane protein kinase, protein id: At4g34220.1, supported by cDNA: gi_14334871, by cDNA: gi_21281266 [Arabidopsis thaliana]
  misc_feature (627)..(756): Homolog of NCBI NO: 18418404 NR Description: leucine-rich repeat transmembrane protein kinase, protein id: At4g34220.1, supported by cDNA: gi_14334871, by cDNA: gi_21281266 [Arabidopsis thaliana]
  misc_feature (3)..(540): Homolog of NCBI NO: 7488258 NR Description: protein kinase homolog F28A23.20 - Arabidopsis
  misc_feature (627)..(749): Homolog of NCBI NO: 7488258 NR Description: protein kinase homolog F28A23.20 - Arabidopsis
  misc_feature (13)..(756): Homolog of NCBI NO: 15226084 NR Description: leucine-rich repeat transmembrane protein kinase, protein id: At2g15300.1 [Arabidopsis thaliana]
MKTQSASPFFFVSFFFFFFFFSSLFLLSSALNSDGVLLLSFKYSVLLDPLSLLQSWNYDHDNPCSWRGVLCNNDSRVVTLSLPNSNLVGSIPSDLGFLQNLQSLNLSNNSLNGSLPVEFFAADKLRFLDLSNNLISGEIPVSIGGLHNLQTLNLSDNIFTGKLPANLASLGSLTEVSLKNNYFSGEFPGGGWRSVQYLDISSNLINGSLPPDFSGDNLRYLNVSYNQISGEIPPNVGAGFPQNATVDFSFNNLTGSIPDSPVYLNQKSISFSGNPGLCGGPTRNPCPIPSSPATVSPPTSTPALAAIPKSIGSNRETEPNNNSNPRTGLRPGVIIGIIVGDIAGIGILALIFFYVYKYKNNKTVEKKNNHSLEAHEAKDTTSLSPSSSTTTSSSSPEQSSRFAKWSCLRKNQETDETEEEDEENQRSGEIGENKKGTLVTIDGGEKELEVETLLKASAYILGATGSSIMYKTVLEDGTVLAVRRLGENGLSQQRRFKDFEAHIRAIGKLVHPNLVRLRGFYWGTDEKLVIYDFVPNGSLVNARYRKGGSSPCHLPWETRLKIVKGLARGLAYLHDKKHVHGNLKPSNILLGQDMEPKIGDFGLERLLAGDTSYNRASGSSRIFSSKRLTASSREFGTIGPTPSPSPSSVGPISPYCAPESLRNLKPNPKWDVFGFGVILLELLTGKIVSIDEVGVGNGLTVEDGNRALIMADVAIRSELEGKEDFLLGLFKLGYSCASQIPQKRPTMKEALVVFERYPISSSAKSPSYHYGHY

SEQ ID NO: 97108 - DNA, 1640 bp, Arabidopsis thaliana
  misc_feature (1)..(1640): Ceres Seq. ID no. 12736097
  misc_feature: MA Experiment ID: 20000180 Result: Up-regulated in Transcription
  misc_feature: MA Experiment 20000180 PARAMETER Experiment Name: At_Germinating_Seeds_P Parameter: Age (hr) Value: 24 vs. 0
  misc_feature: MA Experiment 20000180 PARAMETER Experiment Name: At_Germinating_Seeds_P Parameter: Tissue Value: Germinating Seeds
  misc_feature: MA Experiment ID: 20000182 Result: Down-regulated in Transcription
  misc_feature: MA Experiment 20000182 PARAMETER Experiment Name: At_2mM_SA_P Parameter: Age (day) Value: 14
  misc_feature: MA Experiment 20000182 PARAMETER Experiment Name: At_2mM_SA_P Parameter: Organism Value: A. thaliana
  misc_feature: MA Experiment 20000182 PARAMETER Experiment Name: At_2mM_SA_P Parameter: Plant Line Value: WS
  misc_feature: MA Experiment 20000182 PARAMETER Experiment Name: At_2mM_SA_P Parameter: Timepoint (hr) Value: 6
  misc_feature: MA Experiment 20000182 PARAMETER Experiment Name: At_2mM_SA_P Parameter: Tissue Value: Aerial
  misc_feature: MA Experiment 20000182 PARAMETER Experiment Name: At_2mM_SA_P Parameter: Treatment Value: 2mM SA vs. No Treatment
  misc_feature: MA Experiment ID: 20000185 Result: Down-regulated in Transcription
  misc_feature: MA Experiment 20000185 PARAMETER Experiment Name: At_Roots__P Parameter: Age (day) Value: 7 vs. 21
  misc_feature: MA Experiment 20000185 PARAMETER Experiment Name: At_Roots__P Parameter: Organism Value: A. thaliana
  misc_feature: MA Experiment 20000185 PARAMETER Experiment Name: At_Roots__P Parameter: Tissue Value: Roots vs. Whole Plant
  misc_feature: MA Experiment ID: 20001248 Result: Down-regulated in Transcription
  misc_feature: MA Experiment 20001248 PARAMETER Experiment Name: At_Far-red-induction_P Parameter: Age (day) Value: 7
  misc_feature: MA Experiment 20001248 PARAMETER Experiment Name: At_Far-red-induction_P Parameter: Light Value: Far-red vs. White
  misc_feature: MA Experiment 20001248 PARAMETER Experiment Name: At_Far-red-induction_P Parameter: Organism Value: A. thaliana
  misc_feature: MA Experiment 20001248 PARAMETER Experiment Name: At_Far-red-induction_P Parameter: Plant Line Value: Columbia
  misc_feature: MA Experiment 20001248 PARAMETER Experiment Name: At_Far-red-induction_P Parameter: Timepoint (hr) Value: 4
  misc_feature: MA Experiment 20001248 PARAMETER Experiment Name: At_Far-red-induction_P Parameter: Tissue Value: Whole Plant
  misc_feature: MA Experiment ID: 20001451 Result: Down-regulated in Transcription
  misc_feature: MA Experiment 20001451 PARAMETER Experiment Name: At_Far-red-induction_P Parameter: Age (day) Value: 7
  misc_feature: MA Experiment 20001451 PARAMETER Experiment Name: At_Far-red-induction_P Parameter: Light Value: Far-red vs. White
  misc_feature: MA Experiment 20001451 PARAMETER Experiment Name: At_Far-red-induction_P Parameter: Organism Value: A. thaliana
  misc_feature: MA Experiment 20001451 PARAMETER Experiment Name: At_Far-red-induction_P Parameter: Plant Line Value: Columbia
  misc_feature: MA Experiment 20001451 PARAMETER Experiment Name: At_Far-red-induction_P Parameter: Timepoint (hr) Value: 24
  misc_feature: MA Experiment 20001451 PARAMETER Experiment Name: At_Far-red-induction_P Parameter: Tissue Value: Whole Plant
  misc_feature: MA Experiment ID: 20001557 Result: Down-regulated in Transcription
  misc_feature: MA Experiment 20001557 PARAMETER Experiment Name: At_Drought_Soil_Dry_P Parameter: Age (day) Value: 27
  misc_feature: MA Experiment 20001557 PARAMETER Experiment Name: At_Drought_Soil_Dry_P Parameter: Organism Value: A. thaliana
  misc_feature: MA Experiment 20001557 PARAMETER Experiment Name: At_Drought_Soil_Dry_P Parameter: Plant Line Value: WS
  misc_feature: MA Experiment 20001557 PARAMETER Experiment Name: At_Drought_Soil_Dry_P Parameter: Post Timepoint (hr) Value: 3
  misc_feature: MA Experiment 20001557 PARAMETER Experiment Name: At_Drought_Soil_Dry_P Parameter: Post-Treatment Value: Re-Water vs. No Drought
  misc_feature: MA Experiment 20001557 PARAMETER Experiment Name: At_Drought_Soil_Dry_P Parameter: Timepoint (day) Value: 13
  misc_feature: MA Experiment 20001557 PARAMETER Experiment Name: At_Drought_Soil_Dry_P Parameter: Treatment Value: Drought vs. No Drought
aaaccaaattcccatgaatcaaaaaaatcatcagcgaccactgtgactccacttgagcgccggagccgccgccgtcgccgtcgcgtcggaactccattttcacgttcctcttcaaacacaccgacgcgtaaccagtttcgtccatggccgttgtactttcctactgcaaaccttcgcctcctcttcgtcgattccatcgtcgctgcggaaatttgtggaagaaagaaaatgttaggagttcaagacgatcatcttcggttactgctatgttttggaagtccaataagcctgcggaagtaaaggaattcgatatatcacttagagattacactctaactgaatcaaacattgaggaagctttggaaaacaagccgaagcaaaaggtgatttcactatcagttgtttcttcaatatttgagataccacaagctgaatgggatgcatgtgcgttggattcttctcaacctgaaagctataatccatttctaagttatggatttctttccagtttagaagatactggttgtgccgttcgggaaacaggttggatgccattacacattgttgcaaaggatgaatgtgagagtattttgggtgttgttccactttatctcaaaagccattcttatggcgaatttgtttttgatcattcttgggctgatgcataccgaagttttggcggaagatattatcctaaacttcagtgttgtgttcctttcaccccagttactggtcctaggattcttatccgtgataatccttgcaaagagcaagtttttgatgctattgtttctgccatgacggaattggcatcaaagttacaagtttcatctttgcacattacatttccgtctggagctgagtgggacaaattgaaagagaaaggcttctcacaaaggattggaatgcagtaccactggaaaaatcgtgattataaaaattttgacgagttcttgatggacatgaagcaaagcaaaaggaaaaatatccgacaggaacgcaaaaagattggtacccagaatttgaaaatgagacggctacaaggagatgatataaaggctaggcactgggattccttctatgatttctacaggaacacaactgataacaaatggggcacaccttatctcacaagggatttctttcacgacatggcatcgaagttgggagacaaggtattgcttgttttagctgaagaaaacgaggaacctgttgcaggagcattgaatctcattggaggagatactctatttgggagactatggggatgtcgtcccgactcctattatcctagtctccattttgaagcatgctattaccaggcaattgaagcagcgatagagcttaatctgaaaacggtagaagctggagcgcagggtgagcataagattcagcgaggctaccttcccgttaaaacatatagttgccattacatattcgatgaaggtttcaggcaagccatagacgagtttttagtgcgcgaatcaaatcagatggattatgtcatcagactgatgcatgaagatggacccttcaaagagaaaatagaatagatgcatttatatcttggttatcgcaaacattcttgtatatcttaattcttaggtttatgcgtcaatgtacattttaatttggctgct

SEQ ID NO: 97109 - protein, 469 aa, Arabidopsis thaliana
  peptide (1)..(469): Ceres Seq. ID no. 12736098
  misc_feature (82)..(467): Pfam Name: Protein of unknown function, DUF482 Pfam Description: Protein of unknown function, DUF482
  misc_feature (1)..(469): Homolog of NCBI NO: 15227826 NR Description: hypothetical protein; protein id: At2g23390.1, by cDNA: gi_20453182 [Arabidopsis thaliana]
  misc_feature (82)..(465): Homolog of NCBI NO: 22968368 NR Description: hypothetical protein [Rhodospirillum rubrum]
  misc_feature (82)..(466): Homolog of NCBI NO: 23013014 NR Description: hypothetical protein [Magnetospirillum
  misc_feature (82)..(466): Homolog of NCBI NO: 22965051 NR Description: hypothetical protein [Rhodopseudomonas palustris]
  misc_feature (82)..(466): Homolog of NCBI NO: 39936202 NR Description: DUF482 [Rhodopseudomonas palustris]
  misc_feature (83)..(467): Homolog of NCBI NO: 16126395 NR Description: conserved hypothetical protein [Caulobacter
  misc_feature (110)..(466): Homolog of NCBI NO: 27380245 NR Description: blr5134 [Bradyrhizobium japonicum]
  misc_feature (77)..(466): Homolog of NCBI NO: 23502045 NR Description: conserved hypothetical protein [Brucella suis >gi|23348000|gb|AAN30087.1|AE014417_6 conserved hypothetical
  misc_feature (79)..(469): Homolog of NCBI NO: 23009174 NR Description: hypothetical protein [Magnetospirillum
  misc_feature (77)..(466): Homolog of NCBI NO: 17987101 NR Description: Hypothetical Cytosolic Protein [Brucella
MAVVLSYCKPSPPLRRFHRRCGNLWKKENVRSSRRSSSVTAMFWKSNKPAEVKEFDISLRDYTLTESNIEEALENKPKQKVISLSVVSSIFEIPQAEWDACALDSSQPESYNPFLSYGFLSSLEDTGCAVRETGWMPLHIVAKDECESILGVVPLYLKSHSYGEFVFDHSWADAYRSFGGRYYPKLQCCVPFTPVTGPRILIRDNPCKEQVFDAIVSAMTELASKLQVSSLHITFPSGAEWDKLKEKGFSQRIGMQYHWKNRDYKNFDEFLMDMKQSKRKNIRQERKKIGTQNLKMRRLQGDDIKARHWDSFYDFYRNTTDNKWGTPYLTRDFFHDMASKLGDKVLLVLAEENEEPVAGALNLIGGDTLFGRLWGCRPDSYYPSLHFEACYYQAIEAAIELNLKTVEAGAQGEHKIQRGYLPVKTYSCHYIFDEGFRQAIDEFLVRESNQMDYVIRLMHEDGPFKEKIE

SEQ ID NO: 97110 - protein, 428 aa, Arabidopsis thaliana
  peptide (1)..(428): Ceres Seq. ID no. 12736099
  misc_feature (41)..(426): Pfam Name: Protein of unknown function, DUF482 Pfam Description: Protein of unknown function, DUF482
  misc_feature (1)..(428): Homolog of NCBI NO: 15227826 NR Description: hypothetical protein; protein id: At2g23390.1, by cDNA: gi_20453182 [Arabidopsis thaliana]
  misc_feature (41)..(424): Homolog of NCBI NO: 22968368 NR Description: hypothetical protein [Rhodospirillum rubrum]
  misc_feature (41)..(425): Homolog of NCBI NO: 23013014 NR Description: hypothetical protein [Magnetospirillum
  misc_feature (41)..(425): Homolog of NCBI NO: 22965051 NR Description: hypothetical protein [Rhodopseudomonas palustris]
  misc_feature (41)..(425): Homolog of NCBI NO: 39936202 NR Description: DUF482 [Rhodopseudomonas palustris]
  misc_feature (42)..(426): Homolog of NCBI NO: 16126395 NR Description: conserved hypothetical protein [Caulobacter
  misc_feature (69)..(425): Homolog of NCBI NO: 27380245 NR Description: blr5134 [Bradyrhizobium japonicum]
  misc_feature (36)..(425): Homolog of NCBI NO: 23502045 NR Description: conserved hypothetical protein [Brucella suis >gi|23348000|gb|AAN30087.1|AE014417_6 conserved hypothetical
  misc_feature (38)..(428): Homolog of NCBI NO: 23009174 NR Description: hypothetical protein [Magnetospirillum
  misc_feature (36)..(425): Homolog of NCBI NO: 17987101 NR Description: Hypothetical Cytosolic Protein [Brucella
MFWKSNKPAEVKEFDISLRDYTLTESNIEEALENKPKQKVISLSVVSSIFEIPQAEWDACALDSSQPESYNPFLSYGFLSSLEDTGCAVRETGWMPLHIVAKDECESILGVVPLYLKSHSYGEFVFDHSWADAYRSFGGRYYPKLQCCVPFTPVTGPRILIRDNPCKEQVFDAIVSAMTELASKLQVSSLHITFPSGAEWDKLKEKGFSQRIGMQYHWKNRDYKNFDEFLMDMKQSKRKNIRQERKKIGTQNLKMRRLQGDDIKARHWDSFYDFYRNTTDNKWGTPYLTRDFFHDMASKLGDKVLLVLAEENEEPVAGALNLIGGDTLFGRLWGCRPDSYYPSLHFEACYYQAIEAAIELNLKTVEAGAQGEHKIQRGYLPVKTYSCHYIFDEGFRQAIDEFLVRESNQMDYVIRLMHEDGPFKEKIE

SEQ ID NO: 97111 - protein, 334 aa, Arabidopsis thaliana
  peptide (1)..(334): Ceres Seq. ID no. 12736100
  misc_feature (1)..(332): Pfam Name: Protein of unknown function, DUF482 Pfam Description: Protein of unknown function, DUF482
  misc_feature (1)..(334): Homolog of NCBI NO: 15227826 NR Description: hypothetical protein; protein id: At2g23390.1, by cDNA: gi_20453182 [Arabidopsis thaliana]
  misc_feature (1)..(330): Homolog of NCBI NO: 22968368 NR Description: hypothetical protein [Rhodospirillum rubrum]
  misc_feature (1)..(331): Homolog of NCBI NO: 23013014 NR Description: hypothetical protein [Magnetospirillum
  misc_feature (1)..(331): Homolog of NCBI NO: 22965051 NR Description: hypothetical protein [Rhodopseudomonas palustris]
  misc_feature (1)..(331): Homolog of NCBI NO: 39936202 NR Description: DUF482 [Rhodopseudomonas palustris]
  misc_feature (1)..(332): Homolog of NCBI NO: 16126395 NR Description: conserved hypothetical protein [Caulobacter
  misc_feature (1)..(331): Homolog of NCBI NO: 27380245 NR Description: blr5134 [Bradyrhizobium japonicum]
  misc_feature (1)..(331): Homolog of NCBI NO: 23502045 NR Description: conserved hypothetical protein [Brucella suis >gi|23348000|gb|AAN30087.1|AE014417_6 conserved hypothetical
  misc_feature (1)..(334): Homolog of NCBI NO: 23009174 NR Description: hypothetical protein [Magnetospirillum
  misc_feature (1)..(331): Homolog of NCBI NO: 17987101 NR Description: Hypothetical Cytosolic Protein [Brucella
MPLHIVAKDECESILGVVPLYLKSHSYGEFVFDHSWADAYRSFGGRYYPKLQCCVPFTPVTGPRILIRDNPCKEQVFDAIVSAMTELASKLQVSSLHITFPSGAEWDKLKEKGFSQRIGMQYHWKNRDYKNFDEFLMDMKQSKRKNIRQERKKIGTQNLKMRRLQGDDIKARHWDSFYDFYRNTTDNKWGTPYLTRDFFHDMASKLGDKVLLVLAEENEEPVAGALNLIGGDTLFGRLWGCRPDSYYPSLHFEACYYQAIEAAIELNLKTVEAGAQGEHKIQRGYLPVKTYSCHYIFDEGFRQAIDEFLVRESNQMDYVIRLMHEDGPFKEKIE

SEQ ID NO: 97112 - DNA, 1031 bp, Arabidopsis thaliana
  misc_feature (1)..(1031): Ceres Seq. ID no. 12736105
  misc_feature: MA Experiment ID: 20000314 Result: Up-regulated in Transcription
  misc_feature: MA Experiment 20000314 PARAMETER Experiment Name: At_14day_Shoots-Roots_Sub_P Parameter: Age (day) Value: 14
  misc_feature: MA Experiment 20000314 PARAMETER Experiment Name: At_14day_Shoots-Roots_Sub_P Parameter: Organism Value: A. thaliana
  misc_feature: MA Experiment 20000314 PARAMETER Experiment Name: At_14day_Shoots-Roots_Sub_P Parameter: Plant Line Value: WS
  misc_feature: MA Experiment 20000314 PARAMETER Experiment Name: At_14day_Shoots-Roots_Sub_P Parameter: Tissue Value: Roots vs. Whole Plant
ggcaaagccaaattaagttgtcacaacaatgttgtctcttctttcttctgattcttctctattatcactcctctttctctttctcatcccttgtctctttatcacaagctatataggcttccctgtgttcttgctaaaactcatcggactcatcaaaatcaaagctgctcgagacaacgagaaacgtgatgagggaacttatgttgtccgcgaggatgggttacaaagagaactaatgccgagacacgtggcattcatactggatgggaaccggagatgggccaaacgggccggattgacgacgtcacaaggccacgaggcgggagctaaacggcttatagatatcgccgagctctgcttcgagttgggggttcatacagtctcagcttttgctttctccacagagaattggggaagagacaagattgagattgataacttgatgtctttgatccaacactaccgcaataagtccaacatcaaattcttccacagatcggaagttcgcgtttctgttatcgggaataaaacgaagatccctgaatctctcctcaaagaaatccatgagatagaggaagctaccaaaggctacaagaataaacatctcatcatggcagtagattacagcgggaaatttgatatcatgcatgcttgcaagagtcttgtgaagaaatcagaaaaagggttgatccgagaggaagatgtagacgaggcattgatcgagagagagcttttgacaaattgtagtgacttcccaagtcctgatttaatgattaggacaagtggagaacagaggattagtaacttcttcttgtggcaacttgcttattccgagcttttcttctcgccggtattttggcctgatttcgataaggataagcttctagaggctcttgcttcgtatcagcgtagggaaagacgatttggttgtcgggtttgatccacctttcatcctctctattatgttttgttcatctgtaatttctaccaaacttcttgcgtatcattgtaatttgtgtcggtaaaaatcg

SEQ ID NO: 97113 - protein, 303 aa, Arabidopsis thaliana
  peptide (1)..(303): Ceres Seq. ID no. 12736106
  misc_feature (77)..(301): Pfam Name: Putative undecaprenyl diphosphate synthase Pfam Description: Putative undecaprenyl diphosphate synthase
  misc_feature (1)..(303): Homolog of NCBI NO: 18400264 NR Description: dehydrodolichyl diphosphate synthase (DEDOL-PP protein id: At2g23410.1, supported by cDNA: gi_6651293
  misc_feature (28)..(303): Homolog of NCBI NO: 7447521 NR Description: hypothetical protein At2g23410 [imported] -
  misc_feature (1)..(303): Homolog of NCBI NO: 18424144 NR Description: dehydrodolichyl diphosphate synthase (DEDOL-PP putative; protein id: At5g58780.1, supported by cDNA: gi_19699276 thaliana] >gi|19699277|gb|AAL91250.1| AT5g58780/mzn1_230
  misc_feature (1)..(303): Homolog of NCBI NO: 18424146 NR Description: dehydrodolichyl diphosphate synthase (DEDOL-PP putative; protein id: At5g58782.1, supported by cDNA: 11295.
  misc_feature (1)..(303): Homolog of NCBI NO: 21618322 NR Description: undecaprenyl pyrophosphate synthetase-like
  misc_feature (78)..(303): Homolog of NCBI NO: 8843798 NR Description: undecaprenyl pyrophosphate synthetase-like
  misc_feature (70)..(303): Homolog of NCBI NO: 8843799 NR Description: undecaprenyl pyrophosphate synthetase-like
  misc_feature (4)..(303): Homolog of NCBI NO: 8843800 NR Description: cis-prenyltransferase homolog-like; undecaprenyl
  misc_feature (67)..(303): Homolog of NCBI NO: 18424148 NR Description: dehydrodolichyl diphosphate synthase (DEDOL-PP
  misc_feature (65)..(302): Homolog of NCBI NO: 15237748 NR Description: dehydrodolichyl diphosphate synthase (DEDOL-PP putative; protein id: At5g58770.1 [Arabidopsis thaliana] contains similarity to unknown
MLSLLSSDSSLLSLLFLFLIPCLFITSYIGFPVFLLKLIGLIKIKAARDNEKRDEGTYVVREDGLQRELMPRHVAFILDGNRRWAKRAGLTTSQGHEAGAKRLIDIAELCFELGVHTVSAFAFSTENWGRDKIEIDNLMSLIQHYRNKSNIKFFHRSEVRVSVIGNKTKIPESLLKEIHEIEEATKGYKNKHLIMAVDYSGKFDIMHACKSLVKKSEKGLIREEDVDEALIERELLTNCSDFPSPDLMIRTSGEQRISNFFLWQLAYSELFFSPVFWPDFDKDKLLEALASYQRRERRFGCRV

SEQ ID NO: 97114 - protein, 234 aa, Arabidopsis thaliana
  peptide (1)..(234): Ceres Seq. ID no. 12736107
  misc_feature (8)..(232): Pfam Name: Putative undecaprenyl diphosphate synthase Pfam Description: Putative undecaprenyl diphosphate synthase
  misc_feature (1)..(234): Homolog of NCBI NO: 18400264 NR Description: dehydrodolichyl diphosphate synthase (DEDOL-PP protein id: At2g23410.1, supported by cDNA: gi_6651293
  misc_feature (1)..(234): Homolog of NCBI NO: 7447521 NR Description: hypothetical protein At2g23410 [imported] -
  misc_feature (1)..(234): Homolog of NCBI NO: 18424144 NR Description: dehydrodolichyl diphosphate synthase (DEDOL-PP putative; protein id: At5g58780.1, supported by cDNA: gi_19699276 thaliana] >gi|19699277|gb|AAL91250.1| AT5g58780/mzn1_230
  misc_feature (1)..(234): Homolog of NCBI NO: 18424146 NR Description: dehydrodolichyl diphosphate synthase (DEDOL-PP putative; protein id: At5g58782.1, supported by cDNA: 11295.
  misc_feature (1)..(234): Homolog of NCBI NO: 21618322 NR Description: undecaprenyl pyrophosphate synthetase-like
  misc_feature (9)..(234): Homolog of NCBI NO: 8843798 NR Description: undecaprenyl pyrophosphate synthetase-like
  misc_feature (1)..(234): Homolog of NCBI NO: 8843799 NR Description: undecaprenyl pyrophosphate synthetase-like
  misc_feature (1)..(234): Homolog of NCBI NO: 8843800 NR Description: cis-prenyltransferase homolog-like; undecaprenyl
  misc_feature (1)..(234): Homolog of NCBI NO: 18424148 NR Description: dehydrodolichyl diphosphate synthase (DEDOL-PP
  misc_feature (1)..(233): Homolog of NCBI NO: 15237748 NR Description: dehydrodolichyl diphosphate synthase (DEDOL-PP putative; protein id: At5g58770.1 [Arabidopsis thaliana] contains similarity to unknown
MPRHVAFILDGNRRWAKRAGLTTSQGHEAGAKRLIDIAELCFELGVHTVSAFAFSTENWGRDKIEIDNLMSLIQHYRNKSNIKFFHRSEVRVSVIGNKTKIPESLLKEIHEIEEATKGYKNKHLIMAVDYSGKFDIMHACKSLVKKSEKGLIREEDVDEALIERELLTNCSDFPSPDLMIRTSGEQRISNFFLWQLAYSELFFSPVFWPDFDKDKLLEALASYQRRERRFGCRV

SEQ ID NO: 97115 - protein, 165 aa, Arabidopsis thaliana
  peptide (1)..(165): Ceres Seq. ID no. 12736108
  misc_feature (1)..(163): Pfam Name: Putative undecaprenyl diphosphate synthase Pfam Description: Putative undecaprenyl diphosphate synthase
  misc_feature (1)..(165): Homolog of NCBI NO: 18400264 NR Description: dehydrodolichyl diphosphate synthase (DEDOL-PP protein id: At2g23410.1, supported by cDNA: gi_6651293
  misc_feature (1)..(165): Homolog of NCBI NO: 7447521 NR Description: hypothetical protein At2g23410 [imported] -
  misc_feature (1)..(165): Homolog of NCBI NO: 18424144 NR Description: dehydrodolichyl diphosphate synthase (DEDOL-PP putative; protein id: At5g58780.1, supported by cDNA: gi_19699276 thaliana] >gi|19699277|gb|AAL91250.1| AT5g58780/mzn1_230
  misc_feature (1)..(165): Homolog of NCBI NO: 18424146 NR Description: dehydrodolichyl diphosphate synthase (DEDOL-PP putative; protein id: At5g58782.1, supported by cDNA: 11295.
  misc_feature (1)..(165): Homolog of NCBI NO: 21618322 NR Description: undecaprenyl pyrophosphate synthetase-like
  misc_feature (1)..(165): Homolog of NCBI NO: 8843798 NR Description: undecaprenyl pyrophosphate synthetase-like
  misc_feature (1)..(165): Homolog of NCBI NO: 8843799 NR Description: undecaprenyl pyrophosphate synthetase-like
  misc_feature (1)..(165): Homolog of NCBI NO: 8843800 NR Description: cis-prenyltransferase homolog-like; undecaprenyl
  misc_feature (1)..(165): Homolog of NCBI NO: 18424148 NR Description: dehydrodolichyl diphosphate synthase (DEDOL-PP
  misc_feature (1)..(164): Homolog of NCBI NO: 15237748 NR Description: dehydrodolichyl diphosphate synthase (DEDOL-PP putative; protein id: At5g58770.1 [Arabidopsis thaliana] contains similarity to unknown
MSLIQHYRNKSNIKFFHRSEVRVSVIGNKTKIPESLLKEIHEIEEATKGYKNKHLIMAVDYSGKFDIMHACKSLVKKSEKGLIREEDVDEALIERELLTNCSDFPSPDLMIRTSGEQRISNFFLWQLAYSELFFSPVFWPDFDKDKLLEALASYQRRERRFGCRV

SEQ ID NO: 97116 - DNA, 2466 bp, Arabidopsis thaliana
  misc_feature (1)..(2466): Ceres Seq. ID no. 12736111
  misc_feature: MA Experiment ID: 20000184 Result: Down-regulated in Transcription
  misc_feature: MA Experiment 20000184 PARAMETER Experiment Name: At_Shoots__P Parameter: Age (day) Value: 7
  misc_feature: MA Experiment 20000184 PARAMETER Experiment Name: At_Shoots__P Parameter: Tissue Value: Shoots vs. Whole Plant
  misc_feature: MA Experiment ID: 20000234 Result: Down-regulated in Transcription
  misc_feature: MA Experiment 20000234 PARAMETER Experiment Name: At_Siliques_P Parameter: Age (day) Value: 21
  misc_feature: MA Experiment 20000234 PARAMETER Experiment Name: At_Siliques_P Parameter: Organism Value: A. thaliana
  misc_feature: MA Experiment 20000234 PARAMETER Experiment Name: At_Siliques_P Parameter: Plant Line Value: WS
  misc_feature: MA Experiment 20000234 PARAMETER Experiment Name: At_Siliques_P Parameter: Tissue Value: Less Than 5mm Siliques vs. Whole Plant
  misc_feature: MA Experiment ID: 20000235 Result: Down-regulated in Transcription
  misc_feature: MA Experiment 20000235 PARAMETER Experiment Name: At_Siliques_P Parameter: Age (day) Value: 21
  misc_feature: MA Experiment 20000235 PARAMETER Experiment Name: At_Siliques_P Parameter: Organism Value: A. thaliana
  misc_feature: MA Experiment 20000235 PARAMETER Experiment Name: At_Siliques_P Parameter: Plant Line Value: WS
  misc_feature: MA Experiment 20000235 PARAMETER Experiment Name: At_Siliques_P Parameter: Tissue Value: 5-10mm Siliques vs. Whole Plant
  misc_feature: MA Experiment ID: 20000265 Result: Down-regulated in Transcription
  misc_feature: MA Experiment 20000265 PARAMETER Experiment Name: At_Open_Flower_P Parameter: Age (day) Value: 21
  misc_feature: MA Experiment 20000265 PARAMETER Experiment Name: At_Open_Flower_P Parameter: Plant Line Value: WS
  misc_feature: MA Experiment 20000265 PARAMETER Experiment Name: At_Open_Flower_P Parameter: Tissue Value: Closed Flower vs. Whole Plant
  misc_feature: MA Experiment ID: 20000438 Result: Down-regulated in Transcription
  misc_feature: MA Experiment 20000438 PARAMETER Experiment Name: At_Shoots__P Parameter: Age (day) Value: 14
  misc_feature: MA Experiment 20000438 PARAMETER Experiment Name: At_Shoots__P Parameter: Tissue Value: Shoots vs. Whole Plant
  misc_feature: MA Experiment ID: 20000794 Result: Up-regulated in Transcription
  misc_feature: MA Experiment 20000794 PARAMETER Experiment Name: At_Petals_P Parameter: Age (day) Value: 23-25 days
  misc_feature: MA Experiment 20000794 PARAMETER Experiment Name: At_Petals_P Parameter: Plant Line Value: WS
  misc_feature: MA Experiment 20000794 PARAMETER Experiment Name: At_Petals_P Parameter: Tissue Value: Petals vs. Whole plant
  misc_feature: MA Experiment ID: 20001905 Result: Up-regulated in Transcription
  misc_feature: MA Experiment 20001905 PARAMETER Experiment Name: At_Drought_Reproduction_P Parameter: Age (day) Value: 40
  misc_feature: MA Experiment 20001905 PARAMETER Experiment Name: At_Drought_Reproduction_P Parameter: Organism Value: A. thaliana
  misc_feature: MA Experiment 20001905 PARAMETER Experiment Name: At_Drought_Reproduction_P Parameter: Plant Line Value: WS
  misc_feature: MA Experiment 20001905 PARAMETER Experiment Name: At_Drought_Reproduction_P Parameter: Timepoint (day) Value: 10
  misc_feature: MA Experiment 20001905 PARAMETER Experiment Name: At_Drought_Reproduction_P Parameter: Tissue Value: Rosettes
  misc_feature: MA Experiment 20001905 PARAMETER Experiment Name: At_Drought_Reproduction_P Parameter: Treatment Value: Drought vs. No Drought
  misc_feature: MA Experiment ID: 20001906 Result: Up-regulated in Transcription
  misc_feature: MA Experiment 20001906 PARAMETER Experiment Name: At_Drought_Reproduction_P Parameter: Age (day) Value: 35
  misc_feature: MA Experiment 20001906 PARAMETER Experiment Name: At_Drought_Reproduction_P Parameter: Organism Value: A. thaliana
  misc_feature: MA Experiment 20001906 PARAMETER Experiment Name: At_Drought_Reproduction_P Parameter: Plant Line Value: WS
  misc_feature: MA Experiment 20001906 PARAMETER Experiment Name: At_Drought_Reproduction_P Parameter: Timepoint (day) Value: 5
  misc_feature: MA Experiment 20001906 PARAMETER Experiment Name: At_Drought_Reproduction_P Parameter: Tissue Value: Siliques
  misc_feature: MA Experiment 20001906 PARAMETER Experiment Name: At_Drought_Reproduction_P Parameter: Treatment Value: Drought vs. No Drought
  misc_feature: MA Experiment ID: 20001908 Result: Up-regulated in Transcription
  misc_feature: MA Experiment 20001908 PARAMETER Experiment Name: At_Drought_Reproduction_P Parameter: Age (day) Value: 40
  misc_feature: MA Experiment 20001908 PARAMETER Experiment Name: At_Drought_Reproduction_P Parameter: Organism Value: A. thaliana
  misc_feature: MA Experiment 20001908 PARAMETER Experiment Name: At_Drought_Reproduction_P Parameter: Plant Line Value: WS
  misc_feature: MA Experiment 20001908 PARAMETER Experiment Name: At_Drought_Reproduction_P Parameter: Timepoint (day) Value: 10
  misc_feature: MA Experiment 20001908 PARAMETER Experiment Name: At_Drought_Reproduction_P Parameter: Tissue Value: Siliques
  misc_feature: MA Experiment 20001908 PARAMETER Experiment Name: At_Drought_Reproduction_P Parameter: Treatment Value: Drought vs. No Drought
aattcaaacgggagatttcgttttccgatcatcaccgatcaacttcttcgccggagaacaaataagtttcaaagcttcttttgacgattaaagtagaataaacagaaattgaatccatgaagaagataaagagaaacctcagagaagaagaagaaggaaggtgatgaatgttgagatcgatttttgatttcaatcaacgttcaacgaagatggtgatgatttctcataagttggatttgattttggttttcataatcgtaatcggaggatctattttccgacgagtttctgctaatttcaccgtaccttgtaacggaagatgcggtggattgactctgccttatcctttcgggttttcaaacggttgttcgatccgattcgattgctctgcggcggagaaaccgatgatcggagacttttccgttcaaaacgtgacggaaaacagtatatttgtcggtctctctcacaattgtactcggaagattgaagatatgaatccgcttttcggcgagaatttcgcaccaacgtcggagaacagtttcttgatggagaattgtaaccgtaccaccgatggttgctctatcaagcagaagtttctggagaatgtgctgaaactcaaaagttgtgatgctactggaaacataagttgtttttctttagatagtaattcgagttcgaagaactcagctaagtttttcagtatgaagacattaaggaacagctcgtgtagtttgttgttctcgtcgatagctttcgagtctgtaggtgtgaatgcgggtatagcgttagagtttgagcgagttcggttaggttggtggcttaagggaggttgcgagagcggaacttgcgcggctaacaccgattgtacagacgttgaaactcctcatggatatgcaggacaccggtgctcatgtcttgacggtttccacggtgacggatacaccaacccttgccagagagcactaccggagtgccgtggttccaagctcgtctggagacattgtagatctaatcttattactattgtaggaggaactgttggtggagcgtttttactagctgccttggcttttttcttcttttgtaagcggagacggtctactcctttgagaagtcatttaagcgcaaagcgtcttttgtctgaagctgcagggaactcgagtgtcgcctttttcccttacaaggaaatcgagaaagcgacagatggtttctctgaaaagcagaagttaggaataggtgcatatggtacggtctatagaggaaagctccaaaatgatgaatgggttgctatcaaaagacttagacatagagattcagaaagtcttgaccaagtcatgaatgagatcaagcttctttcctctgtgagtcacccgaatcttgtccgtctcttaggatgttgtatagaacaaggcgatccagttctcgtttatgagtacatgccgaatggaactctatctgaacatctacaaagagatagagggagtggtcttccatggaccttgcgtctcactgttgctactcaaacagctaaagcaatcgcgtatctccactcttcaatgaacccaccgatctatcaccgtgacatcaaatctaccaatatccttcttgattatgatttcaactccaaagttgcggatttcggactctctagactgggaatgacggaatcttctcacatatcaacggctcctcaagggactcctggttatcttgacccgcagtaccatcaatgctttcatctctctgataagagcgacgtctacagctttggagtcgtccttgccgagattataacgggattgaaagtcgttgatttcacacgtccacataccgaaatcaacctagcggctcttgctgttgacaaaatcgggtcaggttgtatcgatgagataatagacccgattcttgacttggatctcgacgcatggactctctcatccatacacacggtggctgagcttgcatttcgatgcttagccttccacagtgacatgagaccgacaatgaccgaagtagcggacgagcttgaacagataagactcagtggttggattccaagcatgagcttggattcaccagccggttctctccgttcatctgatcgaggaagcgaaagatcagttaaacaatcatcaataggaagcagaagagtcgttatccctcagaaacaacctgattgcctcgcatccgtcgaagagattagcgatagctcacccatctcagttcaagatccttggttaagtgcacaaagctcaccgtctacaaatacattgctcggtaacattccaagatgatagtatgatctcaaaacacgattaccactttcttgtttatataagtccctcttttgtgtagctttcacaatcattcagtgtttataatgctaagtagagagattaacaatggtgaaaacaggtttatacatgagttataatgtaaacgatcttgaaacaagatctttcaacc

SEQ ID NO: 97117 - protein, 708 aa, Arabidopsis thaliana; identical to SEQ ID NO: 74444
  peptide (1)..(708): Ceres Seq. ID no. 12736112
  misc_feature (48)..(705): Homolog of NCBI NO: 34902300 NR Description: Putative protein kinase [Oryza sativa (japonica group)] >gi|24308627|gb|AAN52750.1| Putative protein kinase
  misc_feature (51)..(625): Homolog of NCBI NO: 9758129 NR Description: contains similarity to protein
  misc_feature (51)..(625): Homolog of NCBI NO: 26450415 NR Description: unknown protein [Arabidopsis thaliana]
  misc_feature (182)..(625): Homolog of NCBI NO: 30698255 NR Description: protein kinase family [Arabidopsis thaliana]
  misc_feature (15)..(262): Homolog of NCBI NO: 18411489 NR Description: Expressed protein; protein id: At4g00955.1, by cDNA: 93818. [Arabidopsis thaliana]
  misc_feature (202)..(644): Homolog of NCBI NO: 15408726 NR Description: P0443D08.8 [Oryza sativa (japonica
  misc_feature (296)..(634): Homolog of NCBI NO: 25402857 NR Description: protein F15H18.11 [imported] - Arabidopsis >gi|6714300|gb|AAF25996.1|AC013354_15 F15H18.11 [Arabidopsis
  misc_feature (283)..(624): Homolog of NCBI NO: 34911340 NR Description: P0034C09.1 [Oryza sativa (japonica
  misc_feature (333)..(634): Homolog of NCBI NO: 15221764 NR Description: wall-associated kinase, putative; protein id:
  misc_feature (328)..(648): Homolog of NCBI NO: 15408730 NR Description: P0443D08.12 [Oryza sativa (japonica

SEQ ID NO: 97118 - protein, 694 aa, Arabidopsis thaliana; identical to SEQ ID NO: 74445
  peptide (1)..(694): Ceres Seq. ID no. 12736113
  misc_feature (34)..(691): Homolog of NCBI NO: 34902300 NR Description: Putative protein kinase [Oryza sativa (japonica group)] >gi|24308627|gb|AAN52750.1| Putative protein kinase
  misc_feature (37)..(611): Homolog of NCBI NO: 9758129 NR Description: contains similarity to protein
  misc_feature (37)..(611): Homolog of NCBI NO: 26450415 NR Description: unknown protein [Arabidopsis thaliana]
  misc_feature (168)..(611): Homolog of NCBI NO: 30698255 NR Description: protein kinase family [Arabidopsis thaliana]
  misc_feature (1)..(248): Homolog of NCBI NO: 18411489 NR Description: Expressed protein; protein id: At4g00955.1, by cDNA: 93818. [Arabidopsis thaliana]
  misc_feature (188)..(630): Homolog of NCBI NO: 15408726 NR Description: P0443D08.8 [Oryza sativa (japonica
  misc_feature (282)..(620): Homolog of NCBI NO: 25402857 NR Description: protein F15H18.11 [imported] - Arabidopsis >gi|6714300|gb|AAF25996.1|AC013354_15 F15H18.11 [Arabidopsis
  misc_feature (269)..(610): Homolog of NCBI NO: 34911340 NR Description: P0034C09.1 [Oryza sativa (japonica
  misc_feature (319)..(620): Homolog of NCBI NO: 15221764 NR Description: wall-associated kinase, putative; protein id:
  misc_feature (314)..(634): Homolog of NCBI NO: 15408730 NR Description: P0443D08.12 [Oryza sativa (japonica

SEQ ID NO: 97119 - protein, 692 aa, Arabidopsis thaliana; identical to SEQ ID NO: 74446
  peptide (1)..(692): Ceres Seq. ID no. 12736114
  misc_feature (32)..(689): Homolog of NCBI NO: 34902300 NR Description: Putative protein kinase [Oryza sativa (japonica group)] >gi|24308627|gb|AAN52750.1| Putative protein kinase
  misc_feature (35)..(609): Homolog of NCBI NO: 9758129 NR Description: contains similarity to protein
  misc_feature (35)..(609): Homolog of NCBI NO: 26450415 NR Description: unknown protein [Arabidopsis thaliana]
  misc_feature (166)..(609): Homolog of NCBI NO: 30698255 NR Description: protein kinase family [Arabidopsis thaliana]
  misc_feature (1)..(246): Homolog of NCBI NO: 18411489 NR Description: Expressed protein; protein id: At4g00955.1, by cDNA: 93818. [Arabidopsis thaliana]
  misc_feature (186)..(628): Homolog of NCBI NO: 15408726 NR Description: P0443D08.8 [Oryza sativa (japonica
  misc_feature (280)..(618): Homolog of NCBI NO: 25402857 NR Description: protein F15H18.11 [imported] - Arabidopsis >gi|6714300|gb|AAF25996.1|AC013354_15 F15H18.11 [Arabidopsis
  misc_feature (267)..(608): Homolog of NCBI NO: 34911340 NR Description: P0034C09.1 [Oryza sativa (japonica
  misc_feature (317)..(618): Homolog of NCBI NO: 15221764 NR Description: wall-associated kinase, putative; protein id:
  misc_feature (312)..(632): Homolog of NCBI NO: 15408730 NR Description: P0443D08.12 [Oryza sativa (japonica

SEQ ID NO: 97120 - DNA, 540 bp, Arabidopsis thaliana
  misc_feature (1)..(540): Ceres Seq. ID no. 12736123
  misc_feature: MA Experiment ID: 20001451 Result: Up-regulated in Transcription
  misc_feature: MA Experiment 20001451 PARAMETER Experiment Name: At_Far-red-induction_P Parameter: Age (day) Value: 7
  misc_feature: MA Experiment 20001451 PARAMETER Experiment Name: At_Far-red-induction_P Parameter: Light Value: Far-red vs. White
  misc_feature: MA Experiment 20001451 PARAMETER Experiment Name: At_Far-red-induction_P Parameter: Organism Value: A. thaliana
  misc_feature: MA Experiment 20001451 PARAMETER Experiment Name: At_Far-red-induction_P Parameter: Plant Line Value: Columbia
  misc_feature: MA Experiment 20001451 PARAMETER Experiment Name: At_Far-red-induction_P Parameter: Timepoint (hr) Value: 24
  misc_feature: MA Experiment 20001451 PARAMETER Experiment Name: At_Far-red-induction_P Parameter: Tissue Value: Whole Plant
atgggaggaatacccgctgcgcttgctgctgacatattctcttgtaagatttctgctgttgtcttcttggcagctttcatgcctgacacaagaaacccacctgcttatgttttcgaaaagctgatcagaagtattccacgagaagaatggttggacaccgcgttcggaaggtacgggaatccagattgtcctcttgagtcagctcttttgggaccaaagttcatggccaagaaagtgtatcaacggtctccaatagaagatcttgaactggcgaaaatgttggtaagggtaaacccgttggttacgaataatctggcaggggcaagaagctttactggggaaggatatggatcggttacacgtatttatatcataagtggagaggataatatattacctgaggactaccagcgttggatgatccgcaacttcccggtgaaagaagtaatggagatcaaagatgcagatcatatggcaatgttctccaagcctaaggaactatgtgctcttctcttggagattgcagataaatacgcctaa

SEQ ID NO: 97121 - protein, 179 aa, Arabidopsis thaliana
  peptide (1)..(179): Ceres Seq. ID no. 12736124
  misc_feature (1)..(173): Pfam Name: alpha/beta hydrolase fold Pfam Description: alpha/beta hydrolase fold
  misc_feature (1)..(179): Homolog of NCBI NO: 15227857 NR Description: putative acetone-cyanohydrin lyase; protein id:
  misc_feature (1)..(179): Homolog of NCBI NO: 15227859 NR Description: putative acetone-cyanohydrin lyase; protein id:
  misc_feature (1)..(178): Homolog of NCBI NO: 15227850 NR Description: putative acetone-cyanohydrin lyase; protein id:
  misc_feature (1)..(178): Homolog of NCBI NO: 30682119 NR Description: hydrolase, alpha/beta fold family [Arabidopsis
  misc_feature (1)..(178): Homolog of NCBI NO: 28393451 NR Description: putative acetone-cyanohydrin lyase [Arabidopsis
  misc_feature (1)..(179): Homolog of NCBI NO: 15227851 NR Description: putative acetone-cyanohydrin lyase; protein id:
  misc_feature (1)..(178): Homolog of NCBI NO: 15235445 NR Description: hydroxynitrile lyase like protein; protein id: [Arabidopsis thaliana] >gi|25407792|pir||H85438 hydroxynitrile
  misc_feature (1)..(179): Homolog of NCBI NO: 15227865 NR Description: putative acetone-cyanohydrin lyase; protein id:
  misc_feature (1)..(178): Homolog of NCBI NO: 40549303 NR Description: salicylic acid-binding protein 2 [Nicotiana
  misc_feature (2)..(178): Homolog of NCBI NO: 27754457 NR Description: putative acetone-cyanohydrin lyase [Arabidopsis
MGGIPAALAADIFSCKISAVVFLAAFMPDTRNPPAYVFEKLIRSIPREEWLDTAFGRYGNPDCPLESALLGPKFMAKKVYQRSPIEDLELAKMLVRVNPLVTNNLAGARSFTGEGYGSVTRIYIISGEDNILPEDYQRWMIRNFPVKEVMEIKDADHMAMFSKPKELCALLLEIADKYA

SEQ ID NO: 97122 - protein, 153 aa, Arabidopsis thaliana
  peptide (1)..(153): Ceres Seq. ID no. 12736125
  misc_feature (1)..(147): Pfam Name: alpha/beta hydrolase fold Pfam Description: alpha/beta hydrolase fold
  misc_feature (1)..(153): Homolog of NCBI NO: 15227857 NR Description: putative acetone-cyanohydrin lyase; protein id:
  misc_feature (1)..(153): Homolog of NCBI NO: 15227859 NR Description: putative acetone-cyanohydrin lyase; protein id:
  misc_feature (1)..(152): Homolog of NCBI NO: 15227850 NR Description: putative acetone-cyanohydrin lyase; protein id:
  misc_feature (1)..(152): Homolog of NCBI NO: 30682119 NR Description: hydrolase, alpha/beta fold family [Arabidopsis
  misc_feature (1)..(152): Homolog of NCBI NO: 28393451 NR Description: putative acetone-cyanohydrin lyase [Arabidopsis
  misc_feature (1)..(153): Homolog of NCBI NO: 15227851 NR Description: putative acetone-cyanohydrin lyase; protein id:
  misc_feature (1)..(152): Homolog of NCBI NO: 15235445 NR Description: hydroxynitrile lyase like protein; protein id: [Arabidopsis thaliana] >gi|25407792|pir||H85438 hydroxynitrile
  misc_feature (1)..(153): Homolog of NCBI NO: 15227865 NR Description: putative acetone-cyanohydrin lyase; protein id:
  misc_feature (1)..(152): Homolog of NCBI NO: 40549303 NR Description: salicylic acid-binding protein 2 [Nicotiana
  misc_feature (1)..(152): Homolog of NCBI NO: 27754457 NR Description: putative acetone-cyanohydrin lyase [Arabidopsis
MPDTRNPPAYVFEKLIRSIPREEWLDTAFGRYGNPDCPLESALLGPKFMAKKVYQRSPIEDLELAKMLVRVNPLVTNNLAGARSFTGEGYGSVTRIYIISGEDNILPEDYQRWMIRNFPVKEVMEIKDADHMAMFSKPKELCALLLEIADKYA

SEQ ID NO: 97123 - protein, 105 aa, Arabidopsis thaliana
  peptide (1)..(105): Ceres Seq. ID no. 12736126
  misc_feature (1)..(99): Pfam Name: alpha/beta hydrolase fold Pfam Description: alpha/beta hydrolase fold
  misc_feature (1)..(105): Homolog of NCBI NO: 15227857 NR Description: putative acetone-cyanohydrin lyase; protein id:
  misc_feature (1)..(105): Homolog of NCBI NO: 15227859 NR Description: putative acetone-cyanohydrin lyase; protein id:
  misc_feature (1)..(104): Homolog of NCBI NO: 15227850 NR Description: putative acetone-cyanohydrin lyase; protein id:
  misc_feature (1)..(104): Homolog of NCBI NO: 30682119 NR Description: hydrolase, alpha/beta fold family [Arabidopsis
  misc_feature (1)..(104): Homolog of NCBI NO: 28393451 NR Description: putative acetone-cyanohydrin lyase [Arabidopsis
  misc_feature (1)..(105): Homolog of NCBI NO: 15227851 NR Description: putative acetone-cyanohydrin lyase; protein id:
  misc_feature (1)..(104): Homolog of NCBI NO: 15235445 NR Description: hydroxynitrile lyase like protein; protein id: [Arabidopsis thaliana] >gi|25407792|pir||H85438 hydroxynitrile
  misc_feature (1)..(105): Homolog of NCBI NO: 15227865 NR Description: putative acetone-cyanohydrin lyase; protein id:
  misc_feature (1)..(104): Homolog of NCBI NO: 40549303 NR Description: salicylic acid-binding protein 2 [Nicotiana
  misc_feature (1)..(104): Homolog of NCBI NO: 27754457 NR Description: putative acetone-cyanohydrin lyase [Arabidopsis
MAKKVYQRSPIEDLELAKMLVRVNPLVTNNLAGARSFTGEGYGSVTRIYIISGEDNILPEDYQRWMIRNFPVKEVMEIKDADHMAMFSKPKELCALLLEIADKYA

SEQ ID NO: 97124 - DNA, 819 bp, Arabidopsis thaliana
  misc_feature (1)..(819): Ceres Seq. ID no. 12736127
  misc_feature: MA Experiment ID: 20001450 Result: Down-regulated in Transcription
  misc_feature: MA Experiment 20001450 PARAMETER Experiment Name: At_Far-red-induction_P Parameter: Age (day) Value: 7
  misc_feature: MA Experiment 20001450 PARAMETER Experiment Name: At_Far-red-induction_P Parameter: Light Value: Far-red vs. White
  misc_feature: MA Experiment 20001450 PARAMETER Experiment Name: At_Far-red-induction_P Parameter: Organism Value: A. thaliana
  misc_feature: MA Experiment 20001450 PARAMETER Experiment Name: At_Far-red-induction_P Parameter: Plant Line Value: Columbia
  misc_feature: MA Experiment 20001450 PARAMETER Experiment Name: At_Far-red-induction_P Parameter: Timepoint (hr) Value: 8
  misc_feature: MA Experiment 20001450 PARAMETER Experiment Name: At_Far-red-induction_P Parameter: Tissue Value: Whole Plant
atgtatgaaaacgggataagctttataatctctttacttatatgtggatgtgtgaagagtgaggagatgatgaagcaacatttcgtgctagtacatggttcgtgcctcggcgcgtggtgctggtacaaggtgaagccgctgctcgaggcttcgggccatcgtgtaaccgccttagacctagctgcttgtggtatagacacaaggtcgatcactgacatttccacatgcgaacaatattctgagccgttgattcagctaatgacttcattgccgaatgatgagaaggttgtgctcgtgggtcatagctatggaggtttgactttagccatagccatggataagtttcccgacaaaatctctgtctctgtcttcgtaacttctttcatgcccgacaccaaaaactcaccatcgttcgtcctggaaaagtttgcaagcaccatgacaccagaagattggatgggctctgagctcgagccgtatgtggtcttcagcgctgagttcacgaagcaccgtatcctccaactttctcctattgaagatcttgagcttagattgcttctaaagaggcctggttcattatttcttaatgatttatcgaggatgaagaacttttctgaaaaagggtatggatctgttcctcgagcttacattgtgagcaaagatgaccacaccatctcggaagaatatcaacgatggatgatcgataactatccgccgaatttagtgatagagatggaagggacggatcatttgccattgttttgcaaacctcaactactaagtgaccatctattggcaatcgccgacaaattctcttaa

SEQ ID NO: 97125 - protein, 272 aa, Arabidopsis thaliana
  peptide (1)..(272): Ceres Seq. ID no. 12736128
  misc_feature (53)..(266): Pfam Name: alpha/beta hydrolase fold Pfam Description: alpha/beta hydrolase fold
  misc_feature (1)..(272): Homolog of NCBI NO: 15227861 NR Description: putative acetone-cyanohydrin lyase; protein id:
  misc_feature (20)..(272): Homolog of NCBI NO: 21554666 NR Description: putative acetone-cyanohydrin lyase [Arabidopsis
  misc_feature (20)..(271): Homolog of NCBI NO: 15227863 NR Description: putative acetone-cyanohydrin lyase; protein id: supported by cDNA: 26006., supported by cDNA: gi_13605602,
  misc_feature (20)..(271): Homolog of NCBI NO: 15227867 NR Description: putative acetone-cyanohydrin lyase; protein id:
  misc_feature (20)..(271): Homolog of NCBI NO: 27754457 NR Description: putative acetone-cyanohydrin lyase [Arabidopsis
  misc_feature (20)..(272): Homolog of NCBI NO: 15227865 NR Description: putative acetone-cyanohydrin lyase; protein id:
  misc_feature (23)..(272): Homolog of NCBI NO: 14279437 NR Description: ethylene-induced esterase [Citrus sinensis]
  misc_feature (26)..(272): Homolog of NCBI NO: 40549303 NR Description: salicylic acid-binding protein 2 [Nicotiana
  misc_feature (26)..(271): Homolog of NCBI NO: 15235445 NR Description: hydroxynitrile lyase like protein; protein id: [Arabidopsis thaliana] >gi|25407792|pir||H85438 hydroxynitrile
  misc_feature (21)..(272): Homolog of NCBI NO: 15227859 NR Description: putative acetone-cyanohydrin lyase; protein id:
MYENGISFIISLLICGCVKSEEMMKQHFVLVHGSCLGAWCWYKVKPLLEASGHRVTALDLAACGIDTRSITDISTCEQYSEPLIQLMTSLPNDEKVVLVGHSYGGLTLAIAMDKFPDKISVSVFVTSFMPDTKNSPSFVLEKFASTMTPEDWMGSELEPYVVFSAEFTKHRILQLSPIEDLELRLLLKRPGSLFLNDLSRMKNFSEKGYGSVPRAYIVSKDDHTISEEYQRWMIDNYPPNLVIEMEGTDHLPLFCKPQLLSDHLLAIADKFS

SEQ ID NO: 97126 - protein, 250 aa, Arabidopsis thaliana
  peptide (1)..(250): Ceres Seq. ID no. 12736129
  misc_feature (31)..(244): Pfam Name: alpha/beta hydrolase fold Pfam Description: alpha/beta hydrolase fold
  misc_feature (1)..(250): Homolog of NCBI NO: 15227861 NR Description: putative acetone-cyanohydrin lyase; protein id:
  misc_feature (1)..(250): Homolog of NCBI NO: 21554666 NR Description: putative acetone-cyanohydrin lyase [Arabidopsis
  misc_feature (1)..(249): Homolog of NCBI NO: 15227863 NR Description: putative acetone-cyanohydrin lyase; protein id: supported by cDNA: 26006., supported by cDNA: gi_13605602,
  misc_feature (1)..(249): Homolog of NCBI NO: 15227867 NR Description: putative acetone-cyanohydrin lyase; protein id:
  misc_feature (1)..(249): Homolog of NCBI NO: 27754457 NR Description: putative acetone-cyanohydrin lyase [Arabidopsis
  misc_feature (1)..(250): Homolog of NCBI NO: 15227865 NR Description: putative acetone-cyanohydrin lyase; protein id:
  misc_feature (1)..(250): Homolog of NCBI NO: 14279437 NR Description: ethylene-induced esterase [Citrus sinensis]
  misc_feature (4)..(250): Homolog of NCBI NO: 40549303 NR Description: salicylic acid-binding protein 2 [Nicotiana
  misc_feature (4)..(249): Homolog of NCBI NO: 15235445 NR Description: hydroxynitrile lyase like protein; protein id: [Arabidopsis thaliana] >gi|25407792|pir||H85438 hydroxynitrile
  misc_feature (1)..(250): Homolog of NCBI NO: 15227859 NR Description: putative acetone-cyanohydrin lyase; protein id:
MMKQHFVLVHGSCLGAWCWYKVKPLLEASGHRVTALDLAACGIDTRSITDISTCEQYSEPLIQLMTSLPNDEKVVLVGHSYGGLTLAIAMDKFPDKISVSVFVTSFMPDTKNSPSFVLEKFASTMTPEDWMGSELEPYVVFSAEFTKHRILQLSPIEDLELRLLLKRPGSLFLNDLSRMKNFSEKGYGSVPRAYIVSKDDHTISEEYQRWMIDNYPPNLVIEMEGTDHLPLFCKPQLLSDHLLAIADKFS

SEQ ID NO: 97127 - protein, 249 aa, Arabidopsis thaliana
  peptide (1)..(249): Ceres Seq. ID no. 12736130
  misc_feature (30)..(243): Pfam Name: alpha/beta hydrolase fold Pfam Description: alpha/beta hydrolase fold
  misc_feature (1)..(249): Homolog of NCBI NO: 15227861 NR Description: putative acetone-cyanohydrin lyase; protein id:
  misc_feature (1)..(249): Homolog of NCBI NO: 21554666 NR Description: putative acetone-cyanohydrin lyase [Arabidopsis
  misc_feature (1)..(248): Homolog of NCBI NO: 15227863 NR Description: putative acetone-cyanohydrin lyase; protein id: supported by cDNA: 26006., supported by cDNA: gi_13605602,
  misc_feature (1)..(248): Homolog of NCBI NO: 15227867 NR Description: putative acetone-cyanohydrin lyase; protein id:
  misc_feature (1)..(248): Homolog of NCBI NO: 27754457 NR Description: putative acetone-cyanohydrin lyase [Arabidopsis
  misc_feature (1)..(249): Homolog of NCBI NO: 15227865 NR Description: putative acetone-cyanohydrin lyase; protein id:
  misc_feature (1)..(249): Homolog of NCBI NO: 14279437 NR Description: ethylene-induced esterase [Citrus sinensis]
  misc_feature (3)..(249): Homolog of NCBI NO: 40549303 NR Description: salicylic acid-binding protein 2 [Nicotiana
  misc_feature (3)..(248): Homolog of NCBI NO: 15235445 NR Description: hydroxynitrile lyase like protein; protein id: [Arabidopsis thaliana] >gi|25407792|pir||H85438 hydroxynitrile
  misc_feature (1)..(249): Homolog of NCBI NO: 15227859 NR Description: putative acetone-cyanohydrin lyase; protein id:
MKQHFVLVHGSCLGAWCWYKVKPLLEASGHRVTALDLAACGIDTRSITDISTCEQYSEPLIQLMTSLPNDEKVVLVGHSYGGLTLAIAMDKFPDKISVSVFVTSFMPDTKNSPSFVLEKFASTMTPEDWMGSELEPYVVFSAEFTKHRILQLSPIEDLELRLLLKRPGSLFLNDLSRMKNFSEKGYGSVPRAYIVSKDDHTISEEYQRWMIDNYPPNLVIEMEGTDHLPLFCKPQLLSDHLLAIADKFS

SEQ ID NO: 97128 - DNA, 1626 bp, Arabidopsis thaliana
  misc_feature (1)..(1626): Ceres Seq. ID no. 12736131
  misc_feature: MA Experiment ID: 20000180 Result: Up-regulated in Transcription
  misc_feature: MA Experiment 20000180 PARAMETER Experiment Name: At_Germinating_Seeds_P Parameter: Age (hr) Value: 24 vs. 0
  misc_feature: MA Experiment 20000180 PARAMETER Experiment Name: At_Germinating_Seeds_P Parameter: Tissue Value: Germinating Seeds
  misc_feature: MA Experiment ID: 20000184 Result: Up-regulated in Transcription
  misc_feature: MA Experiment 20000184 PARAMETER Experiment Name: At_Shoots__P Parameter: Age (day) Value: 7
  misc_feature: MA Experiment 20000184 PARAMETER Experiment Name: At_Shoots__P Parameter: Tissue Value: Shoots vs. Whole Plant
atgaagcagaaacatctactgcttctaggattcttattagcttattgcttcagctctgtttttgtgataaacgcagaggacccctaccttttcttcacttggactgttacttatggaaccagatcgcctttaggtgttcctcaacaggttattcttattaatggccagttccctggtcctccaattgaaggtgtaacaaacaataatatcgttgttaatgtcattaacaagcttgacgaacctttcctcatcacctggaacggaattaaacagaggaagatgtcgtggcaagacggtgttttgggaacaaactgtccgatccaaccaaaatcgagttggacttaccattttcaacttaaggaccaaatcggtacttatgcatactttgcttcaacgtcgatgcatagagcaagtggtgcttttggtgcacttaacgttaaccagaggtcagtcatcttcgttccttaccctaaaccagacgctgacttcactctcctcgtcagtgattggtacaagatgggacataaggaactgcaaaggaggctcgactcaagtcgtgctcttcctcctccggatggtcttctcatcaacggtgcttctaaaggtttagtctttaccggtcaacatggcaagatatataggtttcggatatcgaatgttgggatatcgacatcgattaactttaggatacaaggacacatgatgactctcgtcgaagtagaaggttctcacactctgcaagaggtctatgaatcgcttgacatacacgttggccagtctgtgaccgtgttggtcacattgaaggctccagtgaaggactacttcatcgtggcttcaactcggtttaccaaacctatactaaccaccacaggaatcctcagctaccaaggttccaaaatcagaccatcacatccccttcccattggtcctacttaccatatccattggtccatgaaacaagcaagaaccatcaggctaaatttgacggcgaatgcagcaaggccaaatccacaaggatcctttcactacggtactataccgataaatcgaacttttgttttagccaacggaagagccatgatcaatgggaaacttcggtacacagtgaaccgtgtgtcctacgttaacccagcaactccattgaaattagccgactggttcaacattcccggggtgttcaatttcaaaaccattatgaacattcccacaccaggaccctccattctcggaacttcggtctttgatgtggctctccatgagtacgtcgaattcgtgttccagaacaacgagggatctatacaatcttggcaccttgacggcactagtgcatatgttgttggatacgggtcgggcacatggaacatggctaagaggagaggttataatttggttgatgctgtttcaaggcacacttttcaggtttatccaatgtcgtggacgagcatattggtatcattagacaataagggaatgtggaatttgaggtcacaaatatggtcaaggagatacttaggacaagaactctatgttcgtgtatggaacaacgagaagtctctttacactgaatccgagcctcctgttaatgttctcttttgcggcaaggccaaacatccccgcttgatttag

SEQ ID NO: 97129 - protein, 541 aa, Arabidopsis thaliana
  peptide (1)..(541): Ceres Seq. ID no. 12736132
  misc_feature (1)..(541): Homolog of NCBI NO: 18400335 NR Description: pectinesterase (pectin methylesterase) family; id: At2g23630.1 [Arabidopsis thaliana] >gi|7432991|pir||T01152
  misc_feature (1)..(538): Homolog of NCBI NO: 15235448 NR Description: pectinesterase (pectin methylesterase) family; id: At4g37160.1 [Arabidopsis thaliana] >gi|25285553|pir||A85439
  misc_feature (5)..(535): Homolog of NCBI NO: 9758142 NR Description: pectinesterase like protein [Arabidopsis thaliana]
  misc_feature (5)..(535): Homolog of NCBI NO: 18425129 NR Description: pectinesterase (pectin methylesterase) family; id: At5g66920.1, supported by cDNA: 116979., supported by cDNA: [Arabidopsis thaliana] >gi|20453070|gb|AAM19780.1|
  misc_feature (5)..(535): Homolog of NCBI NO: 21536987 NR Description: pectinesterase-like protein [Arabidopsis thaliana]
  misc_feature (13)..(535): Homolog of NCBI NO: 33146556 NR Description: putative pollen-specific protein NTP303 precursor
  misc_feature (206)..(535): Homolog of NCBI NO: 34394659 NR Description: putative PS60 [Oryza sativa (japonica
  misc_feature (12)..(212): Homolog of NCBI NO: 34394659 NR Description: putative PS60 [Oryza sativa (japonica
  misc_feature (10)..(539): Homolog of NCBI NO: 16648889 NR Description: Unknown protein [Arabidopsis thaliana]
  misc_feature (10)..(539): Homolog of NCBI NO: 18400509 NR Description: pectinesterase (pectin methylesterase), putative; id: At1g41830.1, supported by cDNA: gi_16648888 [Arabidopsis
MKQKHLLLLGFLLAYCFSSVFVINAEDPYLFFTWTVTYGTRSPLGVPQQVILINGQFPGPPIEGVTNNNIVVNVINKLDEPFLITWNGIKQRKMSWQDGVLGTNCPIQPKSSWTYHFQLKDQIGTYAYFASTSMHRASGAFGALNVNQRSVIFVPYPKPDADFTLLVSDWYKMGHKELQRRLDSSRALPPPDGLLINGASKGLVFTGQHGKIYRFRISNVGISTSINFRIQGHMMTLVEVEGSHTLQEVYESLDIHVGQSVTVLVTLKAPVKDYFIVASTRFTKPILTTTGILSYQGSKIRPSHPLPIGPTYHIHWSMKQARTIRLNLTANAARPNPQGSFHYGTIPINRTFVLANGRAMINGKLRYTVNRVSYVNPATPLKLADWFNIPGVFNFKTIMNIPTPGPSILGTSVFDVALHEYVEFVFQNNEGSIQSWHLDGTSAYVVGYGSGTWNMAKRRGYNLVDAVSRHTFQVYPMSWTSILVSLDNKGMWNLRSQIWSRRYLGQELYVRVWNNEKSLYTESEPPVNVLFCGKAKHPRLI

SEQ ID NO: 97130 - protein, 448 aa, Arabidopsis thaliana
  peptide (1)..(448): Ceres Seq. ID no. 12736133
  misc_feature (1)..(448): Homolog of NCBI NO: 18400335 NR Description: pectinesterase (pectin methylesterase) family; id: At2g23630.1 [Arabidopsis thaliana] >gi|7432991|pir||T01152
  misc_feature (1)..(445): Homolog of NCBI NO: 15235448 NR Description: pectinesterase (pectin methylesterase) family; id: At4g37160.1 [Arabidopsis thaliana] >gi|25285553|pir||A85439
  misc_feature (1)..(442): Homolog of NCBI NO: 9758142 NR Description: pectinesterase like protein [Arabidopsis thaliana]
  misc_feature (1)..(442): Homolog of NCBI NO: 18425129 NR Description: pectinesterase (pectin methylesterase) family; id: At5g66920.1, supported by cDNA: 116979., supported by cDNA: [Arabidopsis thaliana] >gi|20453070|gb|AAM19780.1|
  misc_feature (1)..(442): Homolog of NCBI NO: 21536987 NR Description: pectinesterase-like protein [Arabidopsis thaliana]
  misc_feature (1)..(442): Homolog of NCBI NO: 33146556 NR Description: putative pollen-specific protein NTP303 precursor
  misc_feature (113)..(442): Homolog of NCBI NO: 34394659 NR Description: putative PS60 [Oryza sativa (japonica
  misc_feature (1)..(119): Homolog of NCBI NO: 34394659 NR Description: putative PS60 [Oryza sativa (japonica
  misc_feature (1)..(446): Homolog of NCBI NO: 16648889 NR Description: Unknown protein [Arabidopsis thaliana]
  misc_feature (1)..(446): Homolog of NCBI NO: 25285550 NR Description: probable pectinesterase [imported] - Arabidopsis >gi|9802764|gb|AAF99833.1|AC008046_5 Putative pectinesterase
MSWQDGVLGTNCPIQPKSSWTYHFQLKDQIGTYAYFASTSMHRASGAFGALNVNQRSVIFVPYPKPDADFTLLVSDWYKMGHKELQRRLDSSRALPPPDGLLINGASKGLVFTGQHGKIYRFRISNVGISTSINFRIQGHMMTLVEVEGSHTLQEVYESLDIHVGQSVTVLVTLKAPVKDYFIVASTRFTKPILTTTGILSYQGSKIRPSHPLPIGPTYHIHWSMKQARTIRLNLTANAARPNPQGSFHYGTIPINRTFVLANGRAMINGKLRYTVNRVSYVNPATPLKLADWFNIPGVFNFKTIMNIPTPGPSILGTSVFDVALHEYVEFVFQNNEGSIQSWHLDGTSAYVVGYGSGTWNMAKRRGYNLVDAVSRHTFQVYPMSWTSILVSLDNKGMWNLRSQIWSRRYLGQELYVRVWNNEKSLYTESEPPVNVLFCGKAKHPRLI

SEQ ID NO: 97131 - protein, 408 aa, Arabidopsis thaliana
  peptide (1)..(408): Ceres Seq. ID no. 12736134
  misc_feature (1)..(408): Homolog of NCBI NO: 18400335 NR Description: pectinesterase (pectin methylesterase) family; id: At2g23630.1 [Arabidopsis thaliana] >gi|7432991|pir||T01152
  misc_feature (1)..(405): Homolog of NCBI NO: 15235448 NR Description: pectinesterase (pectin methylesterase) family; id: At4g37160.1 [Arabidopsis thaliana] >gi|25285553|pir||A85439
  misc_feature (1)..(402): Homolog of NCBI NO: 9758142 NR Description: pectinesterase like protein [Arabidopsis thaliana]
  misc_feature (1)..(402): Homolog of NCBI NO: 18425129 NR Description: pectinesterase (pectin methylesterase) family; id: At5g66920.1, supported by cDNA: 116979., supported by cDNA: [Arabidopsis thaliana] >gi|20453070|gb|AAM19780.1|
  misc_feature (1)..(402): Homolog of NCBI NO: 21536987 NR Description: pectinesterase-like protein [Arabidopsis thaliana]
  misc_feature (1)..(402): Homolog of NCBI NO: 33146556 NR Description: putative pollen-specific protein NTP303 precursor
  misc_feature (73)..(402): Homolog of NCBI NO: 34394659 NR Description: putative PS60 [Oryza sativa (japonica
  misc_feature (1)..(79): Homolog of NCBI NO: 34394659 NR Description: putative PS60 [Oryza sativa (japonica
  misc_feature (1)..(406): Homolog of NCBI NO: 16648889 NR Description: Unknown protein [Arabidopsis thaliana]
  misc_feature (1)..(406): Homolog of NCBI NO: 18400509 NR Description: pectinesterase (pectin methylesterase), putative; id: At1g41830.1, supported by cDNA: gi_16648888 [Arabidopsis
MHRASGAFGALNVNQRSVIFVPYPKPDADFTLLVSDWYKMGHKELQRRLDSSRALPPPDGLLINGASKGLVFTGQHGKIYRFRISNVGISTSINFRIQGHMMTLVEVEGSHTLQEVYESLDIHVGQSVTVLVTLKAPVKDYFIVASTRFTKPILTTTGILSYQGSKIRPSHPLPIGPTYHIHWSMKQARTIRLNLTANAARPNPQGSFHYGTIPINRTFVLANGRAMINGKLRYTVNRVSYVNPATPLKLADWFNIPGVFNFKTIMNIPTPGPSILGTSVFDVALHEYVEFVFQNNEGSIQSWHLDGTSAYVVGYGSGTWNMAKRRGYNLVDAVSRHTFQVYPMSWTSILVSLDNKGMWNLRSQIWSRRYLGQELYVRVWNNEKSLYTESEPPVNVLFCGKAKHPRLI

SEQ ID NO: 97132 - DNA, 1839 bp, Arabidopsis thaliana
  misc_feature (1)..(1839): Ceres Seq. ID no. 12736149
  misc_feature: MA Experiment ID: 20000234 Result: Down-regulated in Transcription
  misc_feature: MA Experiment 20000234 PARAMETER Experiment Name: At_Siliques_P Parameter: Age (day) Value: 21
  misc_feature: MA Experiment 20000234 PARAMETER Experiment Name: At_Siliques_P Parameter: Organism Value: A. thaliana
  misc_feature: MA Experiment 20000234 PARAMETER Experiment Name: At_Siliques_P Parameter: Plant Line Value: WS
  misc_feature: MA Experiment 20000234 PARAMETER Experiment Name: At_Siliques_P Parameter: Tissue Value: Less Than 5mm Siliques vs. Whole Plant
  misc_feature: MA Experiment ID: 20000235 Result: Down-regulated in Transcription
  misc_feature: MA Experiment 20000235 PARAMETER Experiment Name: At_Siliques_P Parameter: Age (day) Value: 21
  misc_feature: MA Experiment 20000235 PARAMETER Experiment Name: At_Siliques_P Parameter: Organism Value: A. thaliana
  misc_feature: MA Experiment 20000235 PARAMETER Experiment Name: At_Siliques_P Parameter: Plant Line Value: WS
  misc_feature: MA Experiment 20000235 PARAMETER Experiment Name: At_Siliques_P Parameter: Tissue Value: 5-10mm Siliques vs. Whole Plant
  misc_feature: MA Experiment ID: 20000794 Result: Down-regulated in Transcription
  misc_feature: MA Experiment 20000794 PARAMETER Experiment Name: At_Petals_P Parameter: Age (day) Value: 23-25 days
  misc_feature: MA Experiment 20000794 PARAMETER Experiment Name: At_Petals_P Parameter: Plant Line Value: WS
  misc_feature: MA Experiment 20000794 PARAMETER Experiment Name: At_Petals_P Parameter: Tissue Value: Petals vs. Whole plant
atgatctcgttttcatttcatctcctcgtcttcatcctcctaagtctctcttccttcgcaacagcacaacagccttatgtcggaatatcaacaactgattgctctgtttccgacaacacaacctctgttttcggctactcttgtaatggtctcaacaaaacttgccaagcttacgtcattttccgatctactccttctttctccaccgtcacctcaatctcttccctcttctctgtcgacccatctctcgtctcctccctcaatgacgcttcaccttcaacttctttcccttctggtcaacaagtcattatccctttaacttgttcttgcaccggtgacgattcacaatccaatattacatacacaatccaaccaaacgattcgtatttcgccattgctaacgacactcttcaggggctttcgacatgtcaagctttggcaaaacagaacaatgtttcttctcaatctttgtttcctggtatgaggatcgttgttccgatccgttgtgcgtgtcccacggctaaacagatcaacgaagatggcgtgaagtatctgatgagttatactgtggtttttgaagacactatcgcgatcatcagcgatagattcggggttgagacgagcaagactttaaaagctaacgaaatgtcttttgagaattctgaagttttccctttcacaacaatcctgatccctttggtgaatcctcctgcaaatactaactctctcattcctcctcctcctcctcctcctccacaatcggtttctcctcctccattgtcgccggatggtaggaaatcgaagaagaaaacatgggtctatgctcttgccggagtactaggaggagcattggttttgagtgtgatcggtgcagccatattttgcctgtctaagaagaaaacgaaaacgcaaacgcaagaggaaacgggaaacctcgatagcttcatgggcaagaaaccaccgatgtctgatcaagaattcgatccgctagatggtttgtcaggtatggtggtagaatccttaaaagtttacaaatttcacgagctgcaatcagctacaagcgatttcacatcgtctagctcgattggaggatcagggtacatcggaaaaatcaacggcgatggcgcaatgatcaagaaaatcgaaggaaacgcatcggaggaagtcaacttattgtctaaactaaaccatcttaacatcatccgtctctctggattctgtttccatgaaggagattggtacttagtctacgaacacgcttcaaacggaagcttaagtgaatggatccacacgacgaaatcgttactaagcttgacacaaaaactacaaatcgctttggatatagcaacagggctaaactatctacacaacttcgctgatcctccatacgttcacagagatttgaacagcaacaatgtgttcctcgacctcgagtttcgagcaaagattggtagtttaggttcagcaagatcaacgactgaagatttcgtgttgaccaagcacgtggaaggaacaagagggtacttagctccggagtatttggaacatggtttagtttcaactaagcttgatgtctatgcttttggagttgtcttgttggagattgttactggtaaagaagcttctgaattgaagaaagagatcgatgaaggtaaagctattgatgagattttgattcatggaagattgttacctgaaggattaacaagttttgttgagagattagtggtggattgtttaaagaaagatcatttgaatcgtccatcgatggatgaaaatgttatgtctttgtctaagatcttggcggctacgcagaactgggaagaatcgtcgtactaa

SEQ ID NO: 97133 - protein, 612 aa, Arabidopsis thaliana
  peptide (1)..(612): Ceres Seq. ID no. 12736150
  misc_feature (107)..(573): Homolog of NCBI NO: 15226133 NR Description: putative protein kinase; protein id: At2g33580.1, by cDNA: gi_13877682 [Arabidopsis thaliana]
  misc_feature (1)..(494): Homolog of NCBI NO: 15226133 NR Description: putative protein kinase; protein id: At2g33580.1, by cDNA: gi_13877682 [Arabidopsis thaliana]
  misc_feature (120)..(554): Homolog of NCBI NO: 5441881 NR Description: Similar to putative receptor kinase. (AC002332)
  misc_feature (238)..(606): Homolog of NCBI NO: 37651074 NR Description: Nod-factor receptor 5 [Lotus corniculatus var.
  misc_feature (54)..(240): Homolog of NCBI NO: 37651074 NR Description: Nod-factor receptor 5 [Lotus corniculatus var.
  misc_feature (235)..(598): Homolog of NCBI NO: 37651070 NR Description: SYM10 protein [Pisum sativum]
  misc_feature (32)..(237): Homolog of NCBI NO: 37651070 NR Description: SYM10 protein [Pisum sativum]
  misc_feature (235)..(598): Homolog of NCBI NO: 37651066 NR Description: SYM10 protein [Pisum sativum]
  misc_feature (32)..(237): Homolog of NCBI NO: 37651066 NR Description: SYM10 protein [Pisum sativum]
  misc_feature (9)..(365): Homolog of NCBI NO: 5441881 NR Description: Similar to putative receptor kinase. (AC002332)
MISFSFHLLVFILLSLSSFATAQQPYVGISTTDCSVSDNTTSVFGYSCNGLNKTCQAYVIFRSTPSFSTVTSISSLFSVDPSLVSSLNDASPSTSFPSGQQVIIPLTCSCTGDDSQSNITYTIQPNDSYFAIANDTLQGLSTCQALAKQNNVSSQSLFPGMRIVVPIRCACPTAKQINEDGVKYLMSYTVVFEDTIAIISDRFGVETSKTLKANEMSFENSEVFPFTTILIPLVNPPANTNSLIPPPPPPPPQSVSPPPLSPDGRKSKKKTWVYALAGVLGGALVLSVIGAAIFCLSKKKTKTQTQEETGNLDSFMGKKPPMSDQEFDPLDGLSGMVVESLKVYKFHELQSATSDFTSSSSIGGSGYIGKINGDGAMIKKIEGNASEEVNLLSKLNHLNIIRLSGFCFHEGDWYLVYEHASNGSLSEWIHTTKSLLSLTQKLQIALDIATGLNYLHNFADPPYVHRDLNSNNVFLDLEFRAKIGSLGSARSTTEDFVLTKHVEGTRGYLAPEYLEHGLVSTKLDVYAFGVVLLEIVTGKEASELKKEIDEGKAIDEILIHGRLLPEGLTSFVERLVVDCLKKDHLNRPSMDENVMSLSKILAATQNWEESSY

SEQ ID NO: 97134 - protein, 452 aa, Arabidopsis thaliana
  peptide (1)..(452): Ceres Seq. ID no. 12736151
  misc_feature (1)..(413): Homolog of NCBI NO: 15226133 NR Description: putative protein kinase; protein id: At2g33580.1, by cDNA: gi_13877682 [Arabidopsis thaliana]
  misc_feature (1)..(334): Homolog of NCBI NO: 15226133 NR Description: putative protein kinase; protein id: At2g33580.1, by cDNA: gi_13877682 [Arabidopsis thaliana]
  misc_feature (1)..(394): Homolog of NCBI NO: 5441881 NR Description: Similar to putative receptor kinase. (AC002332)
  misc_feature (78)..(446): Homolog of NCBI NO: 37651074 NR Description: Nod-factor receptor 5 [Lotus corniculatus var.
  misc_feature (1)..(80): Homolog of NCBI NO: 37651074 NR Description: Nod-factor receptor 5 [Lotus corniculatus var.
  misc_feature (75)..(438): Homolog of NCBI NO: 37651070 NR Description: SYM10 protein [Pisum sativum]
  misc_feature (1)..(77): Homolog of NCBI NO: 37651070 NR Description: SYM10 protein [Pisum sativum]
  misc_feature (75)..(438): Homolog of NCBI NO: 37651066 NR Description: SYM10 protein [Pisum sativum]
  misc_feature (1)..(77): Homolog of NCBI NO: 37651066 NR Description: SYM10 protein [Pisum sativum]
  misc_feature (1)..(205): Homolog of NCBI NO: 5441881 NR Description: Similar to putative receptor kinase. (AC002332)
MRIVVPIRCACPTAKQINEDGVKYLMSYTVVFEDTIAIISDRFGVETSKTLKANEMSFENSEVFPFTTILIPLVNPPANTNSLIPPPPPPPPQSVSPPPLSPDGRKSKKKTWVYALAGVLGGALVLSVIGAAIFCLSKKKTKTQTQEETGNLDSFMGKKPPMSDQEFDPLDGLSGMVVESLKVYKFHELQSATSDFTSSSSIGGSGYIGKINGDGAMIKKIEGNASEEVNLLSKLNHLNIIRLSGFCFHEGDWYLVYEHASNGSLSEWIHTTKSLLSLTQKLQIALDIATGLNYLHNFADPPYVHRDLNSNNVFLDLEFRAKIGSLGSARSTTEDFVLTKHVEGTRGYLAPEYLEHGLVSTKLDVYAFGVVLLEIVTGKEASELKKEIDEGKAIDEILIHGRLLPEGLTSFVERLVVDCLKKDHLNRPSMDENVMSLSKILAATQNWEESSY

SEQ ID NO: 97135 - protein, 427 aa, Arabidopsis thaliana
  peptide (1)..(427): Ceres Seq. ID no. 12736152
  misc_feature (1)..(388): Homolog of NCBI NO: 15226133 NR Description: putative protein kinase; protein id: At2g33580.1, by cDNA: gi_13877682 [Arabidopsis thaliana]
  misc_feature (1)..(309): Homolog of NCBI NO: 15226133 NR Description: putative protein kinase; protein id: At2g33580.1, by cDNA: gi_13877682 [Arabidopsis thaliana]
  misc_feature (1)..(369): Homolog of NCBI NO: 5441881 NR Description: Similar to putative receptor kinase. (AC002332)
  misc_feature (53)..(421): Homolog of NCBI NO: 37651074 NR Description: Nod-factor receptor 5 [Lotus corniculatus var.
  misc_feature (1)..(55): Homolog of NCBI NO: 37651074 NR Description: Nod-factor receptor 5 [Lotus corniculatus var.
  misc_feature (50)..(413): Homolog of NCBI NO: 37651070 NR Description: SYM10 protein [Pisum sativum]
  misc_feature (1)..(52): Homolog of NCBI NO: 37651070 NR Description: SYM10 protein [Pisum sativum]
  misc_feature (50)..(413): Homolog of NCBI NO: 37651066 NR Description: SYM10 protein [Pisum sativum]
  misc_feature (1)..(52): Homolog of NCBI NO: 37651066 NR Description: SYM10 protein [Pisum sativum]
  misc_feature (1)..(180): Homolog of NCBI NO: 5441881 NR Description: Similar to putative receptor kinase. (AC002332)
MSYTVVFEDTIAIISDRFGVETSKTLKANEMSFENSEVFPFTTILIPLVNPPANTNSLIPPPPPPPPQSVSPPPLSPDGRKSKKKTWVYALAGVLGGALVLSVIGAAIFCLSKKKTKTQTQEETGNLDSFMGKKPPMSDQEFDPLDGLSGMVVESLKVYKFHELQSATSDFTSSSSIGGSGYIGKINGDGAMIKKIEGNASEEVNLLSKLNHLNIIRLSGFCFHEGDWYLVYEHASNGSLSEWIHTTKSLLSLTQKLQIALDIATGLNYLHNFADPPYVHRDLNSNNVFLDLEFRAKIGSLGSARSTTEDFVLTKHVEGTRGYLAPEYLEHGLVSTKLDVYAFGVVLLEIVTGKEASELKKEIDEGKAIDEILIHGRLLPEGLTSFVERLVVDCLKKDHLNRPSMDENVMSLSKILAATQNWEESSY

SEQ ID NO: 97136 - DNA, 588 bp, Arabidopsis thaliana
  misc_feature (1)..(588): Ceres Seq. ID no. 12736153
  misc_feature: MA Experiment ID: 20000227 Result: Down-regulated in Transcription
  misc_feature: MA Experiment 20000227 PARAMETER Experiment Name: At_Root-Tips-vs-Tops_P Parameter: Tissue Value: Root Tips vs. Root Tops
  misc_feature: MA Experiment ID: 20000234 Result: Down-regulated in Transcription
  misc_feature: MA Experiment 20000234 PARAMETER Experiment Name: At_Siliques_P Parameter: Age (day) Value: 21
  misc_feature: MA Experiment 20000234 PARAMETER Experiment Name: At_Siliques_P Parameter: Organism Value: A. thaliana
  misc_feature: MA Experiment 20000234 PARAMETER Experiment Name: At_Siliques_P Parameter: Plant Line Value: WS
  misc_feature: MA Experiment 20000234 PARAMETER Experiment Name: At_Siliques_P Parameter: Tissue Value: Less Than 5mm Siliques vs. Whole Plant
  misc_feature: MA Experiment ID: 20000235 Result: Down-regulated in Transcription
  misc_feature: MA Experiment 20000235 PARAMETER Experiment Name: At_Siliques_P Parameter: Age (day) Value: 21
  misc_feature: MA Experiment 20000235 PARAMETER Experiment Name: At_Siliques_P Parameter: Organism Value: A. thaliana
  misc_feature: MA Experiment 20000235 PARAMETER Experiment Name: At_Siliques_P Parameter: Plant Line Value: WS
  misc_feature: MA Experiment 20000235 PARAMETER Experiment Name: At_Siliques_P Parameter: Tissue Value: 5-10mm Siliques vs. Whole Plant
  misc_feature: MA Experiment ID: 20000264 Result: Down-regulated in Transcription
  misc_feature: MA Experiment 20000264 PARAMETER Experiment Name: At_Open_Flower_P Parameter: Age (day) Value: 21
  misc_feature: MA Experiment 20000264 PARAMETER Experiment Name: At_Open_Flower_P Parameter: Plant Line Value: WS
  misc_feature: MA Experiment 20000264 PARAMETER Experiment Name: At_Open_Flower_P Parameter: Tissue Value: Open Flower vs. Whole Plant
  misc_feature: MA Experiment ID: 20000265 Result: Down-regulated in Transcription
  misc_feature: MA Experiment 20000265 PARAMETER Experiment Name: At_Open_Flower_P Parameter: Age (day) Value: 21
  misc_feature: MA Experiment 20000265 PARAMETER Experiment Name: At_Open_Flower_P Parameter: Plant Line Value: WS
  misc_feature: MA Experiment 20000265 PARAMETER Experiment Name: At_Open_Flower_P Parameter: Tissue Value: Closed Flower vs. Whole Plant
  misc_feature: MA Experiment ID: 20000268 Result: Down-regulated in Transcription
  misc_feature: MA Experiment 20000268 PARAMETER Experiment Name: At_100mM_NaCl__P Parameter: Age (day) Value: 14
  misc_feature: MA Experiment 20000268 PARAMETER Experiment Name: At_100mM_NaCl__P Parameter: Organism Value: A. thaliana
  misc_feature: MA Experiment 20000268 PARAMETER Experiment Name: At_100mM_NaCl__P Parameter: Plant Line Value: WS
  misc_feature: MA Experiment 20000268 PARAMETER Experiment Name: At_100mM_NaCl__P Parameter: Timepoint (hr) Value: 6
  misc_feature: MA Experiment 20000268 PARAMETER Experiment Name: At_100mM_NaCl__P Parameter: Tissue Value: Whole Plant
  misc_feature: MA Experiment 20000268 PARAMETER Experiment Name: At_100mM_NaCl__P Parameter: Treatment Value: 100mM NaCl vs. No Treatment
  misc_feature: MA Experiment ID: 20000286 Result: Down-regulated in Transcription
  misc_feature: MA Experiment 20000286 PARAMETER Experiment Name: At_Open_Flower_P Parameter: Age (day) Value: 21
  misc_feature: MA Experiment 20000286 PARAMETER Experiment Name: At_Open_Flower_P Parameter: Plant Line Value: WS
  misc_feature: MA Experiment 20000286 PARAMETER Experiment Name: At_Open_Flower_P Parameter: Tissue Value: Half Open vs. Whole Plant
  misc_feature: MA Experiment ID: 20000438 Result: Down-regulated in Transcription
  misc_feature: MA Experiment 20000438 PARAMETER Experiment Name: At_Shoots__P Parameter: Age (day) Value: 14
  misc_feature: MA Experiment 20000438 PARAMETER Experiment Name: At_Shoots__P Parameter: Tissue Value: Shoots vs. Whole Plant
  misc_feature: MA Experiment ID: 20000439 Result: Down-regulated in Transcription
  misc_feature: MA Experiment 20000439 PARAMETER Experiment Name: At_Roots__P Parameter: Age (day) Value: 14 vs. 21
  misc_feature: MA Experiment 20000439 PARAMETER Experiment Name: At_Roots__P Parameter: Organism Value: A. thaliana
  misc_feature: MA Experiment 20000439 PARAMETER Experiment Name: At_Roots__P Parameter: Tissue Value: Roots vs. Whole Plant
  misc_feature: MA Experiment ID: 20000460 Result: Up-regulated in Transcription
  misc_feature: MA Experiment 20000460 PARAMETER Experiment Name: At_10percent_PEG_P Parameter: Age (day) Value: 12
  misc_feature: MA Experiment 20000460 PARAMETER Experiment Name: At_10percent_PEG_P Parameter: Organism Value: A. thaliana
  misc_feature: MA Experiment 20000460 PARAMETER Experiment Name: At_10percent_PEG_P Parameter: Plant Line Value: WS
  misc_feature: MA Experiment 20000460 PARAMETER Experiment Name: At_10percent_PEG_P Parameter: Timepoint (day) Value: 12
  misc_feature: MA Experiment 20000460 PARAMETER Experiment Name: At_10percent_PEG_P Parameter: Tissue Value: Whole Plant
  misc_feature: MA Experiment 20000460 PARAMETER Experiment Name: At_10percent_PEG_P Parameter: Treatment Value: 10percent PEG vs. No Treatment
  misc_feature: MA Experiment ID: 20000495 Result: Down-regulated in Transcription
  misc_feature: MA Experiment 20000495 PARAMETER Experiment Name: At_Guard_Cells_P Parameter: Harvest Date Value: 8/2/2002
  misc_feature: MA Experiment 20000495 PARAMETER Experiment Name: At_Guard_Cells_P Parameter: Organism Value: A. thaliana
  misc_feature: MA Experiment 20000495 PARAMETER Experiment Name: At_Guard_Cells_P Parameter: Tissue Value: Guard Cells vs. Leaves
  misc_feature: MA Experiment ID: 20000794 Result: Down-regulated in Transcription
  misc_feature: MA Experiment 20000794 PARAMETER Experiment Name: At_Petals_P Parameter: Age (day) Value: 23-25 days
  misc_feature: MA Experiment 20000794 PARAMETER Experiment Name: At_Petals_P Parameter: Plant Line Value: WS
  misc_feature: MA Experiment 20000794 PARAMETER Experiment Name: At_Petals_P Parameter: Tissue Value: Petals vs. Whole plant
  misc_feature: MA Experiment ID: 20001247 Result: Up-regulated in Transcription
  misc_feature: MA Experiment 20001247 PARAMETER Experiment Name: At_Far-red-induction_P Parameter: Age (day) Value: 7
  misc_feature: MA Experiment 20001247 PARAMETER Experiment Name: At_Far-red-induction_P Parameter: Light Value: Far-red vs. White
  misc_feature: MA Experiment 20001247 PARAMETER Experiment Name: At_Far-red-induction_P Parameter: Organism Value: A. thaliana
  misc_feature: MA Experiment 20001247 PARAMETER Experiment Name: At_Far-red-induction_P Parameter: Plant Line Value: Columbia
  misc_feature: MA Experiment 20001247 PARAMETER Experiment Name: At_Far-red-induction_P Parameter: Timepoint (hr) Value: 1
  misc_feature: MA Experiment 20001247 PARAMETER Experiment Name: At_Far-red-induction_P Parameter: Tissue Value: Whole Plant
  misc_feature: MA Experiment ID: 20001905 Result: Up-regulated in Transcription
  misc_feature: MA Experiment 20001905 PARAMETER Experiment Name: At_Drought_Reproduction_P Parameter: Age (day) Value: 40
  misc_feature: MA Experiment 20001905 PARAMETER Experiment Name: At_Drought_Reproduction_P Parameter: Organism Value: A. thaliana
  misc_feature: MA Experiment 20001905 PARAMETER Experiment Name: At_Drought_Reproduction_P Parameter: Plant Line Value: WS
  misc_feature: MA Experiment 20001905 PARAMETER Experiment Name: At_Drought_Reproduction_P Parameter: Timepoint (day) Value: 10
  misc_feature: MA Experiment 20001905 PARAMETER Experiment Name: At_Drought_Reproduction_P Parameter: Tissue Value: Rosettes
  misc_feature: MA Experiment 20001905 PARAMETER Experiment Name: At_Drought_Reproduction_P Parameter: Treatment Value: Drought vs. No Drought
atgttccttttgattctccttgtgttctgtataacagtttttgcctttgttgttactaacaaaggagctggtgaagctattgaaggaaaaggttataaagagtataaacttggtgattactctacttggttacagaaacgtgttgagaatggtaaaaattggaataagattaggagttgtcttgtggagagcaaagtttgttctaagcttgaagccaagtttgttaatgttcctgtcaatagtttctacaaggaacatcttactgctcttcagtctggttgctgcaaaccttcagatgaatgtggtttcgagtacgtaaacccaacaacctggaccaagaacacaacgggaacacacactaatccagactgccaaacctgggacaacgcaaaagaaaagctctgcttcgattgtcaatcttgtaaagcgggtctactcgacaacgtcaaaagcgcttggaagaaagttgcaatcgttaacatcgtcttccttgtcttcctcatcattgtctactctgttggttgctgtgctttcaggaacaacaagagggatgacagttattcccgtacctacggatataagccttga

SEQ ID NO: 97137 - protein, 195 aa, Arabidopsis thaliana; identical to SEQ ID NO: 22951
  peptide (1)..(195): Ceres Seq. ID no. 12736154
  misc_feature (1)..(167): Pfam Name: Tetraspanin family Pfam Description: Tetraspanin family
  misc_feature (1)..(195): Homolog of NCBI NO: 20197174 NR Description: hypothetical protein [Arabidopsis thaliana]
  misc_feature (1)..(195): Homolog of NCBI NO: 30682205 NR Description: senescence-associated protein family [Arabidopsis
  misc_feature (1)..(193): Homolog of NCBI NO: 15234743 NR Description: senescence-associated protein homolog; protein
  misc_feature (1)..(188): Homolog of NCBI NO: 3551954 NR Description: senescence-associated protein 5 [Hemerocallis
  misc_feature (1)..(183): Homolog of NCBI NO: 15234374 NR Description: senescence-associated protein -like; protein id: supported by cDNA: 39831., supported by cDNA: gi_17065395, by cDNA: gi_20148628 [Arabidopsis thaliana]
  misc_feature (1)..(193): Homolog of NCBI NO: 21537169 NR Description: senescence-associated protein-like protein
  misc_feature (1)..(185): Homolog of NCBI NO: 29367553 NR Description: senescence-associated protein-like protein [Oryza
  misc_feature (3)..(182): Homolog of NCBI NO: 18394621 NR Description: expressed protein; protein id: At1g18520.1, by cDNA: 37937. [Arabidopsis thaliana]
  misc_feature (3)..(182): Homolog of NCBI NO: 21593310 NR Description: unknown [Arabidopsis thaliana]
  misc_feature (1)..(191): Homolog of NCBI NO: 15224802 NR Description: putative senescence-associated protein 5; protein

SEQ ID NO: 97138 - DNA, 1401 bp, Arabidopsis thaliana
  misc_feature (1)..(1401): Ceres Seq. ID no. 12736163
  misc_feature: MA Experiment ID: 20000185 Result: Down-regulated in Transcription
  misc_feature: MA Experiment 20000185 PARAMETER Experiment Name: At_Roots__P Parameter: Age (day) Value: 7 vs. 21
  misc_feature: MA Experiment 20000185 PARAMETER Experiment Name: At_Roots__P Parameter: Organism Value: A. thaliana
  misc_feature: MA Experiment 20000185 PARAMETER Experiment Name: At_Roots__P Parameter: Tissue Value: Roots vs. Whole Plant
  misc_feature: MA Experiment ID: 20000234 Result: Up-regulated in Transcription
  misc_feature: MA Experiment 20000234 PARAMETER Experiment Name: At_Siliques_P Parameter: Age (day) Value: 21
  misc_feature: MA Experiment 20000234 PARAMETER Experiment Name: At_Siliques_P Parameter: Organism Value: A. thaliana
  misc_feature: MA Experiment 20000234 PARAMETER Experiment Name: At_Siliques_P Parameter: Plant Line Value: WS
  misc_feature: MA Experiment 20000234 PARAMETER Experiment Name: At_Siliques_P Parameter: Tissue Value: Less Than 5mm Siliques vs. Whole Plant
  misc_feature: MA Experiment ID: 20000264 Result: Up-regulated in Transcription
  misc_feature: MA Experiment 20000264 PARAMETER Experiment Name: At_Open_Flower_P Parameter: Age (day) Value: 21
  misc_feature: MA Experiment 20000264 PARAMETER Experiment Name: At_Open_Flower_P Parameter: Plant Line Value: WS
  misc_feature: MA Experiment 20000264 PARAMETER Experiment Name: At_Open_Flower_P Parameter: Tissue Value: Open Flower vs. Whole Plant
  misc_feature: MA Experiment ID: 20000265 Result: Up-regulated in Transcription
  misc_feature: MA Experiment 20000265 PARAMETER Experiment Name: At_Open_Flower_P Parameter: Age (day) Value: 21
  misc_feature: MA Experiment 20000265 PARAMETER Experiment Name: At_Open_Flower_P Parameter: Plant Line Value: WS
  misc_feature: MA Experiment 20000265 PARAMETER Experiment Name: At_Open_Flower_P Parameter: Tissue Value: Closed Flower vs. Whole Plant
  misc_feature: MA Experiment ID: 20000286 Result: Up-regulated in Transcription
  misc_feature: MA Experiment 20000286 PARAMETER Experiment Name: At_Open_Flower_P Parameter: Age (day) Value: 21
  misc_feature: MA Experiment 20000286 PARAMETER Experiment Name: At_Open_Flower_P Parameter: Plant Line Value: WS
  misc_feature: MA Experiment 20000286 PARAMETER Experiment Name: At_Open_Flower_P Parameter: Tissue Value: Half Open vs. Whole Plant
  misc_feature: MA Experiment ID: 20000438 Result: Down-regulated in Transcription
  misc_feature: MA Experiment 20000438 PARAMETER Experiment Name: At_Shoots__P Parameter: Age (day) Value: 14
  misc_feature: MA Experiment 20000438 PARAMETER Experiment Name: At_Shoots__P Parameter: Tissue Value: Shoots vs. Whole Plant
  misc_feature: MA Experiment ID: 20000439 Result: Down-regulated in Transcription
  misc_feature: MA Experiment 20000439 PARAMETER Experiment Name: At_Roots__P Parameter: Age (day) Value: 14 vs. 21
  misc_feature: MA Experiment 20000439 PARAMETER Experiment Name: At_Roots__P Parameter: Organism Value: A. thaliana
  misc_feature: MA Experiment 20000439 PARAMETER Experiment Name: At_Roots__P Parameter: Tissue Value: Roots vs. Whole Plant
  misc_feature: MA Experiment ID: 20000794 Result: Up-regulated in Transcription
  misc_feature: MA Experiment 20000794 PARAMETER Experiment Name: At_Petals_P Parameter: Age (day) Value: 23-25 days
  misc_feature: MA Experiment 20000794 PARAMETER Experiment Name: At_Petals_P Parameter: Plant Line Value: WS
  misc_feature: MA Experiment 20000794 PARAMETER Experiment Name: At_Petals_P Parameter: Tissue Value: Petals vs. Whole plant
  misc_feature: MA Experiment ID: 20001757 Result: Down-regulated in Transcription
  misc_feature: MA Experiment 20001757 PARAMETER Experiment Name: At_50mM_NH4NO3_L-to-H_P Parameter: Timepoint (hr) Value: 6
  misc_feature: MA Experiment 20001757 PARAMETER Experiment Name: At_50mM_NH4NO3_L-to-H_P Parameter: Tissue Value: Leaf
  misc_feature: MA Experiment 20001757 PARAMETER Experiment Name: At_50mM_NH4NO3_L-to-H_P Parameter: Treatment Value: 50mM NH4NO3 vs 100mM Mannitol
atgattcggacaagtttttgtatattagtagttttggcaattagtagtttttcgatgatggaagctcgggatctagctagcaaaggaaagacaaatattgaatatatggcgttgaattgtcgaaaacataccgcagttttgacagaatttggagcagttggtgatggaaagacctcgaacacaaaagcgttcaaagaagccataaccaagcttgctccaaaggcagccgacggtggagtgcaactcattgttccaccaggaaaatggctaaccggaagtttcaacctcaccagccattttactttgttcatccaaaaaggtgcaactattcttgcttctcaggatgaatctgaatatccagtggttgcacctttgccatcatacggacaaggaagagatgcagcaggaccaacatttgctagtctaatctctggcacaaacctaactgatgttgttatcaccggtaacaacggaacgatcaacgggcaaggaaagtactggtgggtgaagtatcgcagtggtggatttaaggggatcacaagaccttacacaatcgagatcatcttctctcaaaacgttcagatctcgaacatcacaatcatcgattcgcctgcatggaatattcatcctgtatattgcaacaatgtcatcgtcaaaggcgttaccattcttgctcctatcgattctcctaataccgatggaatcaaccctgattcatgcaccaacacattgatagaagactgttacgtagtctcgggagacgattgcatcgccgtgaagagcggttgggatcagtttggtatcaaagtcggcatgccaactcaacaattgtctatccgacggctcacatgcatctctcccgacagcgctggaatagcactcggaagtgaaatgtccggtggaatcaaagacgttagaatcgaagacattacattacttcagacacaatccgctatccgaatcaaaaccgcggttggtcgtggtggttatgttaaggatattttcgccaggaggttcacaatgaaaacaatgaaatacgttttctggatgagcggtgcttataaccaacaccccgcttccggttttgatcccaaggctatgcccgtgattacgaatatcaactaccgtgacatgaccgcggataatgtcacgcaacctgcgaggctcgatgggttcaagaacgatcctttcacaaagatatgtatgtcgaatataaagattgatttggctgctgagccgaagaagttgttgtggaattgtacaagcatctctggagtttcgagcaaggttacacctaaaccgtgtagtttgttgccggagaaaggagcaccggtggactgtgcttttccggttgataagattcctattgaatctgttgtcctgaacaaatgctctgcttag

SEQ ID NO: 97139 - protein, 466 aa, Arabidopsis thaliana
  peptide (1)..(466): Ceres Seq. ID no. 12736164
  misc_feature (78)..(435): Pfam Name: Glycosyl hydrolases family 28 Pfam Description: Glycosyl hydrolases family 28
  misc_feature (1)..(466): Homolog of NCBI NO: 15224072 NR Description: polygalacturonase, putative; protein id: [Arabidopsis thaliana] >gi|25412169|pir||B84630 probable
  misc_feature (1)..(464): Homolog of NCBI NO: 15229058 NR Description: polygalacturonase, putative; protein id:
  misc_feature (2)..(465): Homolog of NCBI NO: 30692538 NR Description: polygalacturonase-like protein [Fragaria x
  misc_feature (34)..(464): Homolog of NCBI NO: 15236514 NR Description: polygalacturonase, putative; protein id:
  misc_feature (7)..(465): Homolog of NCBI NO: 15233124 NR Description: polygalacturonase, putative; protein id:
  misc_feature (5)..(465): Homolog of NCBI NO: 34897760 NR Description: ESTs AU029388(E30287),D49277(S16474) correspond a region of the predicted gene.~Similar to Arabidopsis thaliana
  misc_feature (291)..(466): Homolog of NCBI NO: 11357746 NR Description: hypothetical protein F2K15.30 - Arabidopsis >gi|6723387|emb|CAB66396.1| putative protein [Arabidopsis
  misc_feature (1)..(154): Homolog of NCBI NO: 11357746 NR Description: hypothetical protein F2K15.30 - Arabidopsis >gi|6723387|emb|CAB66396.1| putative protein [Arabidopsis
  misc_feature (2)..(447): Homolog of NCBI NO: 18412253 NR Description: polygalacturonase, putative; protein id: supported by cDNA: gi_13358184 [Arabidopsis thaliana] AT3g62110 [Arabidopsis thaliana] >gi|23397166|gb|AAN31866.1|
  misc_feature (2)..(447): Homolog of NCBI NO: 11263971 NR Description: hypothetical protein T17J13.70 - Arabidopsis >gi|6899921|emb|CAB71871.1| putative protein [Arabidopsis
MIRTSFCILVVLAISSFSMMEARDLASKGKTNIEYMALNCRKHTAVLTEFGAVGDGKTSNTKAFKEAITKLAPKAADGGVQLIVPPGKWLTGSFNLTSHFTLFIQKGATILASQDESEYPVVAPLPSYGQGRDAAGPTFASLISGTNLTDVVITGNNGTINGQGKYWWVKYRSGGFKGITRPYTIEIIFSQNVQISNITIIDSPAWNIHPVYCNNVIVKGVTILAPIDSPNTDGINPDSCTNTLIEDCYVVSGDDCIAVKSGWDQFGIKVGMPTQQLSIRRLTCISPDSAGIALGSEMSGGIKDVRIEDITLLQTQSAIRIKTAVGRGGYVKDIFARRFTMKTMKYVFWMSGAYNQHPASGFDPKAMPVITNINYRDMTADNVTQPARLDGFKNDPFTKICMSNIKIDLAAEPKKLLWNCTSISGVSSKVTPKPCSLLPEKGAPVDCAFPVDKIPIESVVLNKCSA

SEQ ID NO: 97140 - protein, 448 aa, Arabidopsis thaliana
  peptide (1)..(448): Ceres Seq. ID no. 12736165
  misc_feature (60)..(417): Pfam Name: Glycosyl hydrolases family 28 Pfam Description: Glycosyl hydrolases family 28
  misc_feature (1)..(448): Homolog of NCBI NO: 15224072 NR Description: polygalacturonase, putative; protein id: [Arabidopsis thaliana] >gi|25412169|pir||B84630 probable
  misc_feature (1)..(446): Homolog of NCBI NO: 15229058 NR Description: polygalacturonase, putative; protein id:
  misc_feature (1)..(447): Homolog of NCBI NO: 30692538 NR Description: polygalacturonase-like protein [Fragaria x
  misc_feature (16)..(446): Homolog of NCBI NO: 15236514 NR Description: polygalacturonase, putative; protein id:
  misc_feature (1)..(447): Homolog of NCBI NO: 15233124 NR Description: polygalacturonase, putative; protein id:
  misc_feature (1)..(447): Homolog of NCBI NO: 34897760 NR Description: ESTs AU029388(E30287),D49277(S16474) correspond a region of the predicted gene.~Similar to Arabidopsis thaliana
  misc_feature (273)..(448): Homolog of NCBI NO: 11357746 NR Description: hypothetical protein F2K15.30 - Arabidopsis >gi|6723387|emb|CAB66396.1| putative protein [Arabidopsis
  misc_feature (1)..(136): Homolog of NCBI NO: 11357746 NR Description: hypothetical protein F2K15.30 - Arabidopsis >gi|6723387|emb|CAB66396.1| putative protein [Arabidopsis
  misc_feature (1)..(429): Homolog of NCBI NO: 18412253 NR Description: polygalacturonase, putative; protein id: supported by cDNA: gi_13358184 [Arabidopsis thaliana] AT3g62110 [Arabidopsis thaliana] >gi|23397166|gb|AAN31866.1|
  misc_feature (1)..(429): Homolog of NCBI NO: 11263971 NR Description: hypothetical protein T17J13.70 - Arabidopsis >gi|6899921|emb|CAB71871.1| putative protein [Arabidopsis
MMEARDLASKGKTNIEYMALNCRKHTAVLTEFGAVGDGKTSNTKAFKEAITKLAPKAADGGVQLIVPPGKWLTGSFNLTSHFTLFIQKGATILASQDESEYPVVAPLPSYGQGRDAAGPTFASLISGTNLTDVVITGNNGTINGQGKYWWVKYRSGGFKGITRPYTIEIIFSQNVQISNITIIDSPAWNIHPVYCNNVIVKGVTILAPIDSPNTDGINPDSCTNTLIEDCYVVSGDDCIAVKSGWDQFGIKVGMPTQQLSIRRLTCISPDSAGIALGSEMSGGIKDVRIEDITLLQTQSAIRIKTAVGRGGYVKDIFARRFTMKTMKYVFWMSGAYNQHPASGFDPKAMPVITNINYRDMTADNVTQPARLDGFKNDPFTKICMSNIKIDLAAEPKKLLWNCTSISGVSSKVTPKPCSLLPEKGAPVDCAFPVDKIPIESVVLNKCSA

SEQ ID NO: 97141 - protein, 447 aa, Arabidopsis thaliana
  peptide (1)..(447): Ceres Seq. ID no. 12736166
  misc_feature (59)..(416): Pfam Name: Glycosyl hydrolases family 28 Pfam Description: Glycosyl hydrolases family 28
  misc_feature (1)..(447): Homolog of NCBI NO: 15224072 NR Description: polygalacturonase, putative; protein id: [Arabidopsis thaliana] >gi|25412169|pir||B84630 probable
  misc_feature (1)..(445): Homolog of NCBI NO: 15229058 NR Description: polygalacturonase, putative; protein id:
  misc_feature (1)..(446): Homolog of NCBI NO: 30692538 NR Description: polygalacturonase-like protein [Fragaria x
  misc_feature (15)..(445): Homolog of NCBI NO: 15236514 NR Description: polygalacturonase, putative; protein id:
  misc_feature (1)..(446): Homolog of NCBI NO: 15233124 NR Description: polygalacturonase, putative; protein id:
  misc_feature (1)..(446): Homolog of NCBI NO: 34897760 NR Description: ESTs AU029388(E30287),D49277(S16474) correspond a region of the predicted gene.~Similar to Arabidopsis thaliana
  misc_feature (272)..(447): Homolog of NCBI NO: 11357746 NR Description: hypothetical protein F2K15.30 - Arabidopsis >gi|6723387|emb|CAB66396.1| putative protein [Arabidopsis
  misc_feature (1)..(135): Homolog of NCBI NO: 11357746 NR Description: hypothetical protein F2K15.30 - Arabidopsis >gi|6723387|emb|CAB66396.1| putative protein [Arabidopsis
  misc_feature (1)..(428): Homolog of NCBI NO: 18412253 NR Description: polygalacturonase, putative; protein id: supported by cDNA: gi_13358184 [Arabidopsis thaliana] AT3g62110 [Arabidopsis thaliana] >gi|23397166|gb|AAN31866.1|
  misc_feature (1)..(428): Homolog of NCBI NO: 11263971 NR Description: hypothetical protein T17J13.70 - Arabidopsis >gi|6899921|emb|CAB71871.1| putative protein [Arabidopsis
MEARDLASKGKTNIEYMALNCRKHTAVLTEFGAVGDGKTSNTKAFKEAITKLAPKAADGGVQLIVPPGKWLTGSFNLTSHFTLFIQKGATILASQDESEYPVVAPLPSYGQGRDAAGPTFASLISGTNLTDVVITGNNGTINGQGKYWWVKYRSGGFKGITRPYTIEIIFSQNVQISNITIIDSPAWNIHPVYCNNVIVKGVTILAPIDSPNTDGINPDSCTNTLIEDCYVVSGDDCIAVKSGWDQFGIKVGMPTQQLSIRRLTCISPDSAGIALGSEMSGGIKDVRIEDITLLQTQSAIRIKTAVGRGGYVKDIFARRFTMKTMKYVFWMSGAYNQHPASGFDPKAMPVITNINYRDMTADNVTQPARLDGFKNDPFTKICMSNIKIDLAAEPKKLLWNCTSISGVSSKVTPKPCSLLPEKGAPVDCAFPVDKIPIESVVLNKCSA

SEQ ID NO: 97142 - DNA, 756 bp, Arabidopsis thaliana
  misc_feature (1)..(756): Ceres Seq. ID no. 12736171
  misc_feature: MA Experiment ID: 20000306 Result: Up-regulated in Transcription
  misc_feature: MA Experiment 20000306 PARAMETER Experiment Name: At_Germinating_Seeds_Sub_P Parameter: Age (hr) Value: 6 vs. 0
  misc_feature: MA Experiment 20000306 PARAMETER Experiment Name: At_Germinating_Seeds_Sub_P Parameter: Organism Value: A. thaliana
  misc_feature: MA Experiment 20000306 PARAMETER Experiment Name: At_Germinating_Seeds_Sub_P Parameter: Plant Line Value: WS
  misc_feature: MA Experiment 20000306 PARAMETER Experiment Name: At_Germinating_Seeds_Sub_P Parameter: Tissue Value: Germinating Seeds
  misc_feature: MA Experiment ID: 20000307 Result: Up-regulated in Transcription
  misc_feature: MA Experiment 20000307 PARAMETER Experiment Name: At_Germinating_Seeds_Sub_P Parameter: Age (hr) Value: 24 vs. 0
  misc_feature: MA Experiment 20000307 PARAMETER Experiment Name: At_Germinating_Seeds_Sub_P Parameter: Organism Value: A. thaliana
  misc_feature: MA Experiment 20000307 PARAMETER Experiment Name: At_Germinating_Seeds_Sub_P Parameter: Plant Line Value: WS
  misc_feature: MA Experiment 20000307 PARAMETER Experiment Name: At_Germinating_Seeds_Sub_P Parameter: Tissue Value: Germinating Seeds
  misc_feature: MA Experiment ID: 20000355 Result: Up-regulated in Transcription
  misc_feature: MA Experiment 20000355 PARAMETER Experiment Name: At_Siliques_Sub_P Parameter: Age (day) Value: 21
  misc_feature: MA Experiment 20000355 PARAMETER Experiment Name: At_Siliques_Sub_P Parameter: Organism Value: A. thaliana
  misc_feature: MA Experiment 20000355 PARAMETER Experiment Name: At_Siliques_Sub_P Parameter: Plant Line Value: WS
  misc_feature: MA Experiment 20000355 PARAMETER Experiment Name: At_Siliques_Sub_P Parameter: Tissue Value: Less Than 5mm Siliques vs. Whole Plant
  misc_feature: MA Experiment ID: 20000440 Result: Up-regulated in Transcription
  misc_feature: MA Experiment 20000440 PARAMETER Experiment Name: At_Closed-Flower__Sub_P Parameter: Tissue Value: Closed Flower vs. Whole Plant
atggttaatgagcaaaagagatttgctttgtttcttgctacgagcgattcaacgttcgtgaagaaagcgtatggaggctatttcaacgtgtttgtttcgacttttggtgaagatggtgagcaatgggatctgtttcgagtgatcgacggcgagtttcctgacgataaggatctggataagtacgatggttttgttattagtggaagccttaacgatgcttttggtgatgatgattggatcgttaagctttgttctctttgccaaaagcttgacgacatgaagaagaaggttcttggtatctgctttggccaccagatactaagtagaatcaaaggagggaaagtcggaagggcgagtagaggtttggatatgggactaagaagcataacaatggttacagacgcggtgaagccaggtggttactttggaagccagattccgaaatcactagccattataaaatgccatcaagatgaagttcttgaactccctgaatcagccacattgcttgcttattcagacaaatacaacgttgagatgtgttcgtatggaaaccacttgctaggcatccaaggccatcctgagtacaacaaagagattcttttcgagatcattgatcgtgtcgtcaatttgaagttgatggagcaagattttgcggataaggcgaaggcaacgatggaaaacgcggaaccagatcggaagcaatggcagactctctgcaaaaactttctcaaaggaagatccgagcaagtttaa

SEQ ID NO: 97143 - protein, 251 aa, Arabidopsis thaliana
  peptide (1)..(251): Ceres Seq. ID no. 12736172
  misc_feature (19)..(208): Pfam Name: Glutamine amidotransferase class-I Pfam Description: Glutamine amidotransferase class-I
  misc_feature (1)..(251): Homolog of NCBI NO: 15224079 NR Description: unknown protein; protein id: At2g23970.1
  misc_feature (1)..(246): Homolog of NCBI NO: 15234767 NR Description: putative protein; protein id: At4g30550.1, by cDNA: 29388., supported by cDNA: gi_17381293 [Arabidopsis >gi|25407659|pir||D85357 hypothetical protein AT4g30550
  misc_feature (1)..(246): Homolog of NCBI NO: 17381294 NR Description: AT4g30550/F17I23_110 [Arabidopsis thaliana]
  misc_feature (1)..(246): Homolog of NCBI NO: 21555885 NR Description: unknown [Arabidopsis thaliana]
  misc_feature (4)..(247): Homolog of NCBI NO: 15234763 NR Description: putative protein; protein id: At4g30530.1, by cDNA: 37987., supported by cDNA: gi_15294151, supported by gi_20147268 [Arabidopsis thaliana] >gi|25407655|pir||B85357
  misc_feature (4)..(247): Homolog of NCBI NO: 21593315 NR Description: defense-related protein [Arabidopsis thaliana]
  misc_feature (4)..(247): Homolog of NCBI NO: 14009290 NR Description: defense-related protein [Brassica carinata]
  misc_feature (1)..(247): Homolog of NCBI NO: 15234765 NR Description: putative protein; protein id: At4g30540.1
  misc_feature (4)..(209): Homolog of NCBI NO: 15224078 NR Description: unknown protein; protein id: At2g23960.1
  misc_feature (8)..(247): Homolog of NCBI NO: 13174241 NR Description: putative glutamine synthetase [Oryza sativa]
MVNEQKRFALFLATSDSTFVKKAYGGYFNVFVSTFGEDGEQWDLFRVIDGEFPDDKDLDKYDGFVISGSLNDAFGDDDWIVKLCSLCQKLDDMKKKVLGICFGHQILSRIKGGKVGRASRGLDMGLRSITMVTDAVKPGGYFGSQIPKSLAIIKCHQDEVLELPESATLLAYSDKYNVEMCSYGNHLLGIQGHPEYNKEILFEIIDRVVNLKLMEQDFADKAKATMENAEPDRKQWQTLCKNFLKGRSEQV

SEQ ID NO: 97144 - protein, 159 aa, Arabidopsis thaliana
  peptide (1)..(159): Ceres Seq. ID no. 12736173
  misc_feature (1)..(116): Pfam Name: Glutamine amidotransferase class-I Pfam Description: Glutamine amidotransferase class-I
  misc_feature (1)..(159): Homolog of NCBI NO: 15224079 NR Description: unknown protein; protein id: At2g23970.1
  misc_feature (1)..(154): Homolog of NCBI NO: 15234767 NR Description: putative protein; protein id: At4g30550.1, by cDNA: 29388., supported by cDNA: gi_17381293 [Arabidopsis >gi|25407659|pir||D85357 hypothetical protein AT4g30550
  misc_feature (1)..(154): Homolog of NCBI NO: 17381294 NR Description: AT4g30550/F17I23_110 [Arabidopsis thaliana]
  misc_feature (1)..(154): Homolog of NCBI NO: 21555885 NR Description: unknown [Arabidopsis thaliana]
  misc_feature (1)..(155): Homolog of NCBI NO: 15234763 NR Description: putative protein; protein id: At4g30530.1, by cDNA: 37987., supported by cDNA: gi_15294151, supported by gi_20147268 [Arabidopsis thaliana] >gi|25407655|pir||B85357
  misc_feature (1)..(155): Homolog of NCBI NO: 21593315 NR Description: defense-related protein [Arabidopsis thaliana]
  misc_feature (1)..(155): Homolog of NCBI NO: 14009290 NR Description: defense-related protein [Brassica carinata]
  misc_feature (1)..(155): Homolog of NCBI NO: 15234765 NR Description: putative protein; protein id: At4g30540.1
  misc_feature (1)..(117): Homolog of NCBI NO: 15224078 NR Description: unknown protein; protein id: At2g23960.1
  misc_feature (1)..(155): Homolog of NCBI NO: 13174241 NR Description: putative glutamine synthetase [Oryza sativa]
MKKKVLGICFGHQILSRIKGGKVGRASRGLDMGLRSITMVTDAVKPGGYFGSQIPKSLAIIKCHQDEVLELPESATLLAYSDKYNVEMCSYGNHLLGIQGHPEYNKEILFEIIDRVVNLKLMEQDFADKAKATMENAEPDRKQWQTLCKNFLKGRSEQV

SEQ ID NO: 97145 - protein, 128 aa, Arabidopsis thaliana
  peptide (1)..(128): Ceres Seq. ID no. 12736174
  misc_feature (1)..(85): Pfam Name: Glutamine amidotransferase class-I Pfam Description: Glutamine amidotransferase class-I
  misc_feature (1)..(128): Homolog of NCBI NO: 15224079 NR Description: unknown protein; protein id: At2g23970.1
  misc_feature (1)..(123): Homolog of NCBI NO: 15234767 NR Description: putative protein; protein id: At4g30550.1, by cDNA: 29388., supported by cDNA: gi_17381293 [Arabidopsis >gi|25407659|pir||D85357 hypothetical protein AT4g30550
  misc_feature (1)..(123): Homolog of NCBI NO: 17381294 NR Description: AT4g30550/F17I23_110 [Arabidopsis thaliana]
  misc_feature (1)..(123): Homolog of NCBI NO: 21555885 NR Description: unknown [Arabidopsis thaliana]
  misc_feature (1)..(124): Homolog of NCBI NO: 15234763 NR Description: putative protein; protein id: At4g30530.1, by cDNA: 37987., supported by cDNA: gi_15294151, supported by gi_20147268 [Arabidopsis thaliana] >gi|25407655|pir||B85357
  misc_feature (1)..(124): Homolog of NCBI NO: 21593315 NR Description: defense-related protein [Arabidopsis thaliana]
  misc_feature (1)..(124): Homolog of NCBI NO: 14009290 NR Description: defense-related protein [Brassica carinata]
  misc_feature (1)..(124): Homolog of NCBI NO: 15234765 NR Description: putative protein; protein id: At4g30540.1
  misc_feature (1)..(86): Homolog of NCBI NO: 15224078 NR Description: unknown protein; protein id: At2g23960.1
  misc_feature (1)..(124): Homolog of NCBI NO: 13174241 NR Description: putative glutamine synthetase [Oryza sativa]
MGLRSITMVTDAVKPGGYFGSQIPKSLAIIKCHQDEVLELPESATLLAYSDKYNVEMCSYGNHLLGIQGHPEYNKEILFEIIDRVVNLKLMEQDFADKAKATMENAEPDRKQWQTLCKNFLKGRSEQV

SEQ ID NO: 97146 - DNA, 2943 bp, Arabidopsis thaliana
  misc_feature (1)..(2943): Ceres Seq. ID no. 12736184
  misc_feature: MA Experiment ID: 20000184 Result: Up-regulated in Transcription
  misc_feature: MA Experiment 20000184 PARAMETER Experiment Name: At_Shoots__P Parameter: Age (day) Value: 7
  misc_feature: MA Experiment 20000184 PARAMETER Experiment Name: At_Shoots__P Parameter: Tissue Value: Shoots vs. Whole Plant
atggattattgttctttgttggttgtctcgttcttgatcactgttatgaccgttcttgcttctaaagagaacgatcatgagctaataaaaaatcctcaaaactctctaagcagttggatttcttcttcttcttcttcgtcttctatgctcgttgatgtttgtaattggtctggtgtgaagtgtaacaaagagagcactcaagtaatcgagcttgatatcagtggtagagatctcggcggcgaaatctcaccgtcgatcgctaatctaaccggtttaacggttcttgatctttcgagaaacttcttcgttggaaaaatcccacctgagataggttcattgcatgaaacattgaagcagctaagtctctctgagaatcttttacatggaaacattccacaagagcttggtttgcttaaccgtcttgtttatctcgatcttggaagcaaccggttaaacggttcaatcccggttcagctcttttgcaacggctcttcttcatctctacaatacatagacctttccaacaactctttaaccggagagatccctttaaattaccattgtcacctcaaagaacttcggtttcttcttctctggtccaacaagctcaccggtactgtcccgtcttctctctcaaactctacgaatctcaagtggatggatttggagtcaaatatgttaagtggagagttaccttctcaagtcataagcaagatgccacaacttcagtttctttacctttcttataaccatttcgttagccacaacaataacacaaacctcgaaccttttttcgcctctctcgccaattcctctgacctacaagagcttgagttagccggaaacagcctcggaggagagattacttcttccgtaaggcacctctctgtaaatcttgtgcagattcatcttgatcaaaaccgtatccatggctctatacctccagagatatcaaaccttttgaacctaactcttctaaacttgtcgagtaacctcttgtccggtcctatcccgcgtgagctctgtaagctaagcaagctcgaaagggtttatctctcgaataatcacctaaccggcgaaatccctatggaactcggggatattcctcgccttggtcttcttgatgtttctagaaacaatctttctggttcaatccctgatagtttcggaaacctttctcagctgagaagacttcttctgtacggaaaccatctctctggtactgtccctcaaagcctcggcaaatgtatcaatcttgagattcttgatctctctcacaacaacctcacagggaccatacctgttgaagttgtctccaatctcagaaacctgaagctgtatctcaacctctctagcaaccacttaagcggtccaatacctttggagctaagcaaaatggatatggttctctccgttgatctgtcttccaacgaactctcagggaagattccgcctcagctcggaagctgcattgcattagagcatctgaatctttcaagaaacggtttctccagtacgcttccttcatcattaggccaacttccatatctgaaagagctagatgtgtcttttaacagattaaccggagctataccgccttcttttcaacagtcttcgactctcaagcacttgaatttctccttcaacttgctctctggtaatgtatctgacaaaggatcattctctaagctgactattgagtcttttcttggagattctctcttgtgtggctctataaaaggcatgcaagcctgcaagaagaaacacaagtacccttctgttcttctaccggttctgttatcgttgatcgcaactcctgttctgtgtgtgttcgggtaccctttggtccaaagatcaagatttggaaagaatctaacagtgtatgccaaagaagaggtggaagacgaggaaaaacagaaccaaaatgacccgaagtacccgagaatatcgtatcagcagctcatagcagctactggaggtttcaatgcttctagcttgattggttcagggagatttggtcatgtttataagggagttctcagaaacaacacgaaggtcgcggtaaaagtacttgatccaaagaccgcactggagttctcggggagtttcaaaagagaatgtcagatcttgaagagaacaagacacaggaacttgatcaggatcatcactacgtgcagcaaacctggtttcaacgctcttgttctgccactgatgccaaatggaagcttggagaggcacttatacccgggagagtactcgagcaagaacttagatttgattcagttggtgaatatatgcagcgatgttgctgaaggaatagcttacttgcatcactattcacctgtaaaagttgttcactgtgatctcaaaccgagcaatatccttcttgatgatgaaatgaccgctctggttacggattttgggatttcaagattggttcaaggtgttgaagaaacagtttctacagatgattcagtgtcatttggctcaacagatggattgttatgtggatcagtcggttacattgcaccagaatacgggatggggaaacgcgcatcgacacatggagatgtgtacagttttggtgttctcctgctagagattgtaagcggaaggagaccaacagatgttcttgtcaatgaaggttcaagcttacatgagtttatgaagtcgcattaccccgattctctagagggaatcatcgaacaagcgttgagtagatggaaaccgcaagggaaaccagaaaaatgtgagaagctatggagagaagtcatattggaaatgattgagttaggattggtatgtactcaatacaatccttcaactaggcctgacatgcttgatgtcgcacacgaaatgggacggcttaaagaatatttatttgcttgtccttctctattgcatttttcatctcaagaaacacaaggagaagctagttcataa

SEQ ID NO: 97147 - protein, 980 aa, Arabidopsis thaliana
  peptide (1)..(980): Ceres Seq. ID no. 12736185
  misc_feature (71)..(958): Homolog of NCBI NO: 37533018 NR Description: putative receptor protein kinase [Oryza sativa
  misc_feature (22)..(960): Homolog of NCBI NO: 2130082 NR Description: protein kinase Xa21 (EC 2.7.1.-), receptor type
  misc_feature (56)..(975): Homolog of NCBI NO: 34895882 NR Description: putative protein kinase Xa21 [Oryza sativa
  misc_feature (67)..(953): Homolog of NCBI NO: 34915440 NR Description: putative protein kinase Xa21, receptor type
  misc_feature (92)..(541): Homolog of NCBI NO: 38346890 NR Description: OSJNBb0015G09.9 [Oryza sativa (japonica
  misc_feature (642)..(958): Homolog of NCBI NO: 38346890 NR Description: OSJNBb0015G09.9 [Oryza sativa (japonica
  misc_feature (64)..(960): Homolog of NCBI NO: 34914440 NR Description: putative protein kinase Xa21 [Oryza sativa
  misc_feature (71)..(960): Homolog of NCBI NO: 7434424 NR Description: protein kinase Xa21 (EC 2.7.1.-) A1, receptor
  misc_feature (71)..(972): Homolog of NCBI NO: 30421165 NR Description: putative receptor kinase [Hordeum vulgare]
  misc_feature (68)..(962): Homolog of NCBI NO: 34911420 NR Description: putative leucine rich repeat containing protein
MDYCSLLVVSFLITVMTVLASKENDHELIKNPQNSLSSWISSSSSSSSMLVDVCNWSGVKCNKESTQVIELDISGRDLGGEISPSIANLTGLTVLDLSRNFFVGKIPPEIGSLHETLKQLSLSENLLHGNIPQELGLLNRLVYLDLGSNRLNGSIPVQLFCNGSSSSLQYIDLSNNSLTGEIPLNYHCHLKELRFLLLWSNKLTGTVPSSLSNSTNLKWMDLESNMLSGELPSQVISKMPQLQFLYLSYNHFVSHNNNTNLEPFFASLANSSDLQELELAGNSLGGEITSSVRHLSVNLVQIHLDQNRIHGSIPPEISNLLNLTLLNLSSNLLSGPIPRELCKLSKLERVYLSNNHLTGEIPMELGDIPRLGLLDVSRNNLSGSIPDSFGNLSQLRRLLLYGNHLSGTVPQSLGKCINLEILDLSHNNLTGTIPVEVVSNLRNLKLYLNLSSNHLSGPIPLELSKMDMVLSVDLSSNELSGKIPPQLGSCIALEHLNLSRNGFSSTLPSSLGQLPYLKELDVSFNRLTGAIPPSFQQSSTLKHLNFSFNLLSGNVSDKGSFSKLTIESFLGDSLLCGSIKGMQACKKKHKYPSVLLPVLLSLIATPVLCVFGYPLVQRSRFGKNLTVYAKEEVEDEEKQNQNDPKYPRISYQQLIAATGGFNASSLIGSGRFGHVYKGVLRNNTKVAVKVLDPKTALEFSGSFKRECQILKRTRHRNLIRIITTCSKPGFNALVLPLMPNGSLERHLYPGEYSSKNLDLIQLVNICSDVAEGIAYLHHYSPVKVVHCDLKPSNILLDDEMTALVTDFGISRLVQGVEETVSTDDSVSFGSTDGLLCGSVGYIAPEYGMGKRASTHGDVYSFGVLLLEIVSGRRPTDVLVNEGSSLHEFMKSHYPDSLEGIIEQALSRWKPQGKPEKCEKLWREVILEMIELGLVCTQYNPSTRPDMLDVAHEMGRLKEYLFACPSLLHFSSQETQGEASS

SEQ ID NO: 97148 - protein, 965 aa, Arabidopsis thaliana
  peptide (1)..(965): Ceres Seq. ID no. 12736186
  misc_feature (56)..(943): Homolog of NCBI NO: 37533018 NR Description: putative receptor protein kinase [Oryza sativa
  misc_feature (7)..(945): Homolog of NCBI NO: 2130082 NR Description: protein kinase Xa21 (EC 2.7.1.-), receptor type
  misc_feature (41)..(960): Homolog of NCBI NO: 34895882 NR Description: putative protein kinase Xa21 [Oryza sativa
  misc_feature (52)..(938): Homolog of NCBI NO: 34915440 NR Description: putative protein kinase Xa21, receptor type
  misc_feature (77)..(526): Homolog of NCBI NO: 38346890 NR Description: OSJNBb0015G09.9 [Oryza sativa (japonica
  misc_feature (627)..(943): Homolog of NCBI NO: 38346890 NR Description: OSJNBb0015G09.9 [Oryza sativa (japonica
  misc_feature (49)..(945): Homolog of NCBI NO: 34914440 NR Description: putative protein kinase Xa21 [Oryza sativa
  misc_feature (56)..(945): Homolog of NCBI NO: 7434424 NR Description: protein kinase Xa21 (EC 2.7.1.-) A1, receptor
  misc_feature (56)..(957): Homolog of NCBI NO: 30421165 NR Description: putative receptor kinase [Hordeum vulgare]
  misc_feature (53)..(947): Homolog of NCBI NO: 34911420 NR Description: putative leucine rich repeat containing protein
MTVLASKENDHELIKNPQNSLSSWISSSSSSSSMLVDVCNWSGVKCNKESTQVIELDISGRDLGGEISPSIANLTGLTVLDLSRNFFVGKIPPEIGSLHETLKQLSLSENLLHGNIPQELGLLNRLVYLDLGSNRLNGSIPVQLFCNGSSSSLQYIDLSNNSLTGEIPLNYHCHLKELRFLLLWSNKLTGTVPSSLSNSTNLKWMDLESNMLSGELPSQVISKMPQLQFLYLSYNHFVSHNNNTNLEPFFASLANSSDLQELELAGNSLGGEITSSVRHLSVNLVQIHLDQNRIHGSIPPEISNLLNLTLLNLSSNLLSGPIPRELCKLSKLERVYLSNNHLTGEIPMELGDIPRLGLLDVSRNNLSGSIPDSFGNLSQLRRLLLYGNHLSGTVPQSLGKCINLEILDLSHNNLTGTIPVEVVSNLRNLKLYLNLSSNHLSGPIPLELSKMDMVLSVDLSSNELSGKIPPQLGSCIALEHLNLSRNGFSSTLPSSLGQLPYLKELDVSFNRLTGAIPPSFQQSSTLKHLNFSFNLLSGNVSDKGSFSKLTIESFLGDSLLCGSIKGMQACKKKHKYPSVLLPVLLSLIATPVLCVFGYPLVQRSRFGKNLTVYAKEEVEDEEKQNQNDPKYPRISYQQLIAATGGFNASSLIGSGRFGHVYKGVLRNNTKVAVKVLDPKTALEFSGSFKRECQILKRTRHRNLIRIITTCSKPGFNALVLPLMPNGSLERHLYPGEYSSKNLDLIQLVNICSDVAEGIAYLHHYSPVKVVHCDLKPSNILLDDEMTALVTDFGISRLVQGVEETVSTDDSVSFGSTDGLLCGSVGYIAPEYGMGKRASTHGDVYSFGVLLLEIVSGRRPTDVLVNEGSSLHEFMKSHYPDSLEGIIEQALSRWKPQGKPEKCEKLWREVILEMIELGLVCTQYNPSTRPDMLDVAHEMGRLKEYLFACPSLLHFSSQETQGEASS

SEQ ID NO: 97149 - protein, 932 aa, Arabidopsis thaliana; identical to SEQ ID NO: 87907
  peptide (1)..(932): Ceres Seq. ID no. 12736187
  misc_feature (23)..(910): Homolog of NCBI NO: 37533018 NR Description: putative receptor protein kinase [Oryza sativa
  misc_feature (1)..(912): Homolog of NCBI NO: 2130082 NR Description: protein kinase Xa21 (EC 2.7.1.-), receptor type
  misc_feature (8)..(927): Homolog of NCBI NO: 34895882 NR Description: putative protein kinase Xa21 [Oryza sativa
  misc_feature (19)..(905): Homolog of NCBI NO: 34915440 NR Description: putative protein kinase Xa21, receptor type
  misc_feature (44)..(493): Homolog of NCBI NO: 38346890 NR Description: OSJNBb0015G09.9 [Oryza sativa (japonica
  misc_feature (594)..(910): Homolog of NCBI NO: 38346890 NR Description: OSJNBb0015G09.9 [Oryza sativa (japonica
  misc_feature (16)..(912): Homolog of NCBI NO: 34914440 NR Description: putative protein kinase Xa21 [Oryza sativa
  misc_feature (23)..(912): Homolog of NCBI NO: 7434424 NR Description: protein kinase Xa21 (EC 2.7.1.-) A1, receptor
  misc_feature (23)..(924): Homolog of NCBI NO: 30421165 NR Description: putative receptor kinase [Hordeum vulgare]
  misc_feature (20)..(914): Homolog of NCBI NO: 34911420 NR Description: putative leucine rich repeat containing protein

SEQ ID NO: 97150 - DNA, 1664 bp, Arabidopsis thaliana
  misc_feature (1)..(1664): Ceres Seq. ID no. 12736192
  misc_feature: MA Experiment ID: 20000184 Result: Down-regulated in Transcription
  misc_feature: MA Experiment 20000184 PARAMETER Experiment Name: At_Shoots__P Parameter: Age (day) Value: 7
  misc_feature: MA Experiment 20000184 PARAMETER Experiment Name: At_Shoots__P Parameter: Tissue Value: Shoots vs. Whole Plant
  misc_feature: MA Experiment ID: 20000234 Result: Down-regulated in Transcription
  misc_feature: MA Experiment 20000234 PARAMETER Experiment Name: At_Siliques_P Parameter: Age (day) Value: 21
  misc_feature: MA Experiment 20000234 PARAMETER Experiment Name: At_Siliques_P Parameter: Organism Value: A. thaliana
  misc_feature: MA Experiment 20000234 PARAMETER Experiment Name: At_Siliques_P Parameter: Plant Line Value: WS
  misc_feature: MA Experiment 20000234 PARAMETER Experiment Name: At_Siliques_P Parameter: Tissue Value: Less Than 5mm Siliques vs. Whole Plant
  misc_feature: MA Experiment ID: 20000235 Result: Down-regulated in Transcription
  misc_feature: MA Experiment 20000235 PARAMETER Experiment Name: At_Siliques_P Parameter: Age (day) Value: 21
  misc_feature: MA Experiment 20000235 PARAMETER Experiment Name: At_Siliques_P Parameter: Organism Value: A. thaliana
  misc_feature: MA Experiment 20000235 PARAMETER Experiment Name: At_Siliques_P Parameter: Plant Line Value: WS
  misc_feature: MA Experiment 20000235 PARAMETER Experiment Name: At_Siliques_P Parameter: Tissue Value: 5-10mm Siliques vs. Whole Plant
  misc_feature: MA Experiment ID: 20000265 Result: Down-regulated in Transcription
  misc_feature: MA Experiment 20000265 PARAMETER Experiment Name: At_Open_Flower_P Parameter: Age (day) Value: 21
  misc_feature: MA Experiment 20000265 PARAMETER Experiment Name: At_Open_Flower_P Parameter: Plant Line Value: WS
  misc_feature: MA Experiment 20000265 PARAMETER Experiment Name: At_Open_Flower_P Parameter: Tissue Value: Closed Flower vs. Whole Plant
  misc_feature: MA Experiment ID: 20000286 Result: Down-regulated in Transcription
  misc_feature: MA Experiment 20000286 PARAMETER Experiment Name: At_Open_Flower_P Parameter: Age (day) Value: 21
  misc_feature: MA Experiment 20000286 PARAMETER Experiment Name: At_Open_Flower_P Parameter: Plant Line Value: WS
  misc_feature: MA Experiment 20000286 PARAMETER Experiment Name: At_Open_Flower_P Parameter: Tissue Value: Half Open vs. Whole Plant
aagacgataacaacaaaatgtctcttttctccttccccatctccactgagttgcttccatggcttctcctacttttgattcctccacttcttatcttctttcttcttcgttcccctaaaaatcttccaccaggtccaccaagattacctatcttaggaaacatccaccagctcggatccctccctcaccgcagtctcagagatctctctctcaaatatggcccagtcatcaccgtctatctcggcagcgtccgtaccgtggttgttcactctccggagacggcggaggaagttctaaaacttcacgactccgagtgttgtactcgtccaaagctatctatcaccaaaagctttttctatgatggacttggtctagggtttactaaatggggtgattactacagagatgtgcggaaactctgtgttcttgaacttttctccgttaaacgagccaactcgttccggaacataagagaggaggagctgagtcgactcgttaactcgttttctgactcggcgtcatctggatcttccgttgaccttaccgcaaatttggctaagttcgtcgcgagctttacgtgtcgaatggcgtttggattgagttttcaaggaagtggaatggataacgagacgtttctggagctgttcacggaggcgaacagagtgatcggaaaattcgcggcggcggatatattccccgggtttggctggatcttggatcggatcagtggtcttgattctagccggaggaagagttttcaagatcttgatacgttttaccagaaagctattgttgaccatcgggagaagaagaaaactgaagaccgtgaagatctcattgacgtcttgctcaagttacagagtcaagaaaccaaacttggttcttcaagaatcaccgatacacatatcagagctattattatggatttgtttgtagcaggagtagacacatctgttatcactttggattggacaatggcagagctttcaagacatccaagagtaatgaagaaagtacaagccgagattcgtgaacacgtaggagacaaaggtatagtgacatacgatgatctcgaggctctagtctacatgaaaatggtgatcaaggagacttggaggttacacgcaccgagtcctattctgattccaagagaagcaatgactaacttcaagatcaagggttatgatatttaccctggaacgcgtattcatgtcaatgcttgggctattggacgtaaccctgatgtatggaaggatcctgatgagtttataccagagagatttgttgatagcaatgtggaaactaaagggacaagttttgagctgttgccgtttgggagtggacgcagaggttgtcccgcaatgtacgtgggattaagtacggtggagtacacattggcgaatcttttgtatcattttgattggaaagcgactgaggaagtgagtgttgaagaagcacctggtctcactagccacaggaagcatcctcttcaccttgttcctgttaatgtcatcaaccgcaagctttagagtgcggaaagcacaaacatttagttttcgacgaataaggcttaataatgtttctgtttattgaatagtcgatactttctgtttagctttcaaacaataattctcattacatgaataaaactttggcttatctat

SEQ ID NO: 97151 - protein, 508 aa, Arabidopsis thaliana
  peptide (1)..(508): Ceres Seq. ID no. 12736193
  misc_feature (42)..(499): Pfam Name: Cytochrome P450 Pfam Description: Cytochrome P450
  misc_feature (6)..(508): Homolog of NCBI NO: 15224099 NR Description: cytochrome p450 family; protein id: At2g24180.1, by cDNA: gi_15450907, supported by cDNA: gi_17978702, supported cDNA: gi_3164137 [Arabidopsis thaliana]
  misc_feature (20)..(505): Homolog of NCBI NO: 15231542 NR Description: cytochrome p450 family; protein id: At3g26330.1
  misc_feature (20)..(507): Homolog of NCBI NO: 30696845 NR Description: cytochrome P450 71B10 [Arabidopsis thaliana]
  misc_feature (17)..(500): Homolog of NCBI NO: 15231539 NR Description: cytochrome p450 family; protein id: At3g26310.1 thaliana] >gi|13878378|sp|Q9LIP5|C72W_ARATH Cytochrome P450 71B35
  misc_feature (20)..(501): Homolog of NCBI NO: 13878390 NR Description: Cytochrome P450 71B10 >gi|8777359|dbj|BAA96949.1|
  misc_feature (20)..(505): Homolog of NCBI NO: 9294291 NR Description: cytochrome p450 [Arabidopsis thaliana]
  misc_feature (20)..(501): Homolog of NCBI NO: 28393289 NR Description: putative cytochrome p450 [Arabidopsis thaliana]
  misc_feature (20)..(505): Homolog of NCBI NO: 15231538 NR Description: cytochrome p450 family; protein id: At3g26300.1 thaliana] >gi|13878379|sp|Q9LIP6|C72V_ARATH Cytochrome P450 71B34
  misc_feature (42)..(505): Homolog of NCBI NO: 15231541 NR Description: cytochrome p450 family; protein id: At3g26320.1 thaliana] >gi|13878377|sp|Q9LIP4|C72X_ARATH Cytochrome P450 71B36
  misc_feature (23)..(504): Homolog of NCBI NO: 16507125 NR Description: cytochrome P450 [Citrus sinensis]
DDNNKMSLFSFPISTELLPWLLLLLIPPLLIFFLLRSPKNLPPGPPRLPILGNIHQLGSLPHRSLRDLSLKYGPVITVYLGSVRTVVVHSPETAEEVLKLHDSECCTRPKLSITKSFFYDGLGLGFTKWGDYYRDVRKLCVLELFSVKRANSFRNIREEELSRLVNSFSDSASSGSSVDLTANLAKFVASFTCRMAFGLSFQGSGMDNETFLELFTEANRVIGKFAAADIFPGFGWILDRISGLDSSRRKSFQDLDTFYQKAIVDHREKKKTEDREDLIDVLLKLQSQETKLGSSRITDTHIRAIIMDLFVAGVDTSVITLDWTMAELSRHPRVMKKVQAEIREHVGDKGIVTYDDLEALVYMKMVIKETWRLHAPSPILIPREAMTNFKIKGYDIYPGTRIHVNAWAIGRNPDVWKDPDEFIPERFVDSNVETKGTSFELLPFGSGRRGCPAMYVGLSTVEYTLANLLYHFDWKATEEVSVEEAPGLTSHRKHPLHLVPVNVINRKL

SEQ ID NO: 97152 - protein, 503 aa, Arabidopsis thaliana
  peptide (1)..(503): Ceres Seq. ID no. 12736194
  misc_feature (37)..(494): Pfam Name: Cytochrome P450 Pfam Description: Cytochrome P450
  misc_feature (1)..(503): Homolog of NCBI NO: 15224099 NR Description: cytochrome p450 family; protein id: At2g24180.1, by cDNA: gi_15450907, supported by cDNA: gi_17978702, supported cDNA: gi_3164137 [Arabidopsis thaliana]
  misc_feature (15)..(500): Homolog of NCBI NO: 15231542 NR Description: cytochrome p450 family; protein id: At3g26330.1
  misc_feature (15)..(502): Homolog of NCBI NO: 30696845 NR Description: cytochrome P450 71B10 [Arabidopsis thaliana]
  misc_feature (12)..(495): Homolog of NCBI NO: 15231539 NR Description: cytochrome p450 family; protein id: At3g26310.1 thaliana] >gi|13878378|sp|Q9LIP5|C72W_ARATH Cytochrome P450 71B35
  misc_feature (15)..(496): Homolog of NCBI NO: 13878390 NR Description: Cytochrome P450 71B10 >gi|8777359|dbj|BAA96949.1|
  misc_feature (15)..(500): Homolog of NCBI NO: 9294291 NR Description: cytochrome p450 [Arabidopsis thaliana]
  misc_feature (15)..(496): Homolog of NCBI NO: 28393289 NR Description: putative cytochrome p450 [Arabidopsis thaliana]
  misc_feature (15)..(500): Homolog of NCBI NO: 15231538 NR Description: cytochrome p450 family; protein id: At3g26300.1 thaliana] >gi|13878379|sp|Q9LIP6|C72V_ARATH Cytochrome P450 71B34
  misc_feature (37)..(500): Homolog of NCBI NO: 15231541 NR Description: cytochrome p450 family; protein id: At3g26320.1 thaliana] >gi|13878377|sp|Q9LIP4|C72X_ARATH Cytochrome P450 71B36
  misc_feature (18)..(499): Homolog of NCBI NO: 16507125 NR Description: cytochrome P450 [Citrus sinensis]
MSLFSFPISTELLPWLLLLLIPPLLIFFLLRSPKNLPPGPPRLPILGNIHQLGSLPHRSLRDLSLKYGPVITVYLGSVRTVVVHSPETAEEVLKLHDSECCTRPKLSITKSFFYDGLGLGFTKWGDYYRDVRKLCVLELFSVKRANSFRNIREEELSRLVNSFSDSASSGSSVDLTANLAKFVASFTCRMAFGLSFQGSGMDNETFLELFTEANRVIGKFAAADIFPGFGWILDRISGLDSSRRKSFQDLDTFYQKAIVDHREKKKTEDREDLIDVLLKLQSQETKLGSSRITDTHIRAIIMDLFVAGVDTSVITLDWTMAELSRHPRVMKKVQAEIREHVGDKGIVTYDDLEALVYMKMVIKETWRLHAPSPILIPREAMTNFKIKGYDIYPGTRIHVNAWAIGRNPDVWKDPDEFIPERFVDSNVETKGTSFELLPFGSGRRGCPAMYVGLSTVEYTLANLLYHFDWKATEEVSVEEAPGLTSHRKHPLHLVPVNVINRKL

SEQ ID NO: 97153 - protein, 314 aa, Arabidopsis thaliana
  peptide (1)..(314): Ceres Seq. ID no. 12736195
  misc_feature (1)..(305): Pfam Name: Cytochrome P450 Pfam Description: Cytochrome P450
  misc_feature (1)..(314): Homolog of NCBI NO: 15224099 NR Description: cytochrome p450 family; protein id: At2g24180.1, by cDNA: gi_15450907, supported by cDNA: gi_17978702, supported cDNA: gi_3164137 [Arabidopsis thaliana]
  misc_feature (1)..(311): Homolog of NCBI NO: 15231542 NR Description: cytochrome p450 family; protein id: At3g26330.1
  misc_feature (1)..(313): Homolog of NCBI NO: 30696845 NR Description: cytochrome P450 71B10 [Arabidopsis thaliana]
  misc_feature (1)..(306): Homolog of NCBI NO: 15231539 NR Description: cytochrome p450 family; protein id: At3g26310.1 thaliana] >gi|13878378|sp|Q9LIP5|C72W_ARATH Cytochrome P450 71B35
  misc_feature (1)..(307): Homolog of NCBI NO: 13878390 NR Description: Cytochrome P450 71B10 >gi|8777359|dbj|BAA96949.1|
  misc_feature (1)..(311): Homolog of NCBI NO: 9294291 NR Description: cytochrome p450 [Arabidopsis thaliana]
  misc_feature (1)..(307): Homolog of NCBI NO: 28393289 NR Description: putative cytochrome p450 [Arabidopsis thaliana]
  misc_feature (1)..(311): Homolog of NCBI NO: 15231538 NR Description: cytochrome p450 family; protein id: At3g26300.1 thaliana] >gi|13878379|sp|Q9LIP6|C72V_ARATH Cytochrome P450 71B34
  misc_feature (1)..(311): Homolog of NCBI NO: 15231541 NR Description: cytochrome p450 family; protein id: At3g26320.1 thaliana] >gi|13878377|sp|Q9LIP4|C72X_ARATH Cytochrome P450 71B36
  misc_feature (1)..(310): Homolog of NCBI NO: 16507125 NR Description: cytochrome P450 [Citrus sinensis]
MAFGLSFQGSGMDNETFLELFTEANRVIGKFAAADIFPGFGWILDRISGLDSSRRKSFQDLDTFYQKAIVDHREKKKTEDREDLIDVLLKLQSQETKLGSSRITDTHIRAIIMDLFVAGVDTSVITLDWTMAELSRHPRVMKKVQAEIREHVGDKGIVTYDDLEALVYMKMVIKETWRLHAPSPILIPREAMTNFKIKGYDIYPGTRIHVNAWAIGRNPDVWKDPDEFIPERFVDSNVETKGTSFELLPFGSGRRGCPAMYVGLSTVEYTLANLLYHFDWKATEEVSVEEAPGLTSHRKHPLHLVPVNVINRKL

SEQ ID NO: 97154 - DNA, 1470 bp, Arabidopsis thaliana
  misc_feature (1)..(1470): Ceres Seq. ID no. 12736233
  misc_feature: MA Experiment ID: 20000173 Result: Up-regulated in Transcription
  misc_feature: MA Experiment 20000173 PARAMETER Experiment Name: At_42deg_Heat_P Parameter: Age (day) Value: 14
  misc_feature: MA Experiment 20000173 PARAMETER Experiment Name: At_42deg_Heat_P Parameter: Organism Value: A. thaliana
  misc_feature: MA Experiment 20000173 PARAMETER Experiment Name: At_42deg_Heat_P Parameter: Plant Line Value: WS
  misc_feature: MA Experiment 20000173 PARAMETER Experiment Name: At_42deg_Heat_P Parameter: Temperature (deg C) Value: 42 vs. 22
  misc_feature: MA Experiment 20000173 PARAMETER Experiment Name: At_42deg_Heat_P Parameter: Timepoint (hr) Value: 6
  misc_feature: MA Experiment 20000173 PARAMETER Experiment Name: At_42deg_Heat_P Parameter: Tissue Value: Aerial
  misc_feature: MA Experiment ID: 20000179 Result: Down-regulated in Transcription
  misc_feature: MA Experiment 20000179 PARAMETER Experiment Name: At_Germinating_Seeds_P Parameter: Age (hr) Value: 6 vs. 0
  misc_feature: MA Experiment 20000179 PARAMETER Experiment Name: At_Germinating_Seeds_P Parameter: Tissue Value: Germinating Seeds
  misc_feature: MA Experiment ID: 20000180 Result: Down-regulated in Transcription
  misc_feature: MA Experiment 20000180 PARAMETER Experiment Name: At_Germinating_Seeds_P Parameter: Age (hr) Value: 24 vs. 0
  misc_feature: MA Experiment 20000180 PARAMETER Experiment Name: At_Germinating_Seeds_P Parameter: Tissue Value: Germinating Seeds
  misc_feature: MA Experiment ID: 20000709 Result: Up-regulated in Transcription
  misc_feature: MA Experiment 20000709 PARAMETER Experiment Name: At_15mM_NH4NO3_L-to-H_P Parameter: Age (hr) Value: 14
  misc_feature: MA Experiment 20000709 PARAMETER Experiment Name: At_15mM_NH4NO3_L-to-H_P Parameter: Organism Value: A. thaliana
  misc_feature: MA Experiment 20000709 PARAMETER Experiment Name: At_15mM_NH4NO3_L-to-H_P Parameter: Plant Line Value: WS
  misc_feature: MA Experiment 20000709 PARAMETER Experiment Name: At_15mM_NH4NO3_L-to-H_P Parameter: Timepoint (hr) Value: 4
  misc_feature: MA Experiment 20000709 PARAMETER Experiment Name: At_15mM_NH4NO3_L-to-H_P Parameter: Tissue Value: Aerial
  misc_feature: MA Experiment 20000709 PARAMETER Experiment Name: At_15mM_NH4NO3_L-to-H_P Parameter: Treatment Value: 15mM NH4NO3 vs. 30mM Mannitol
  misc_feature: MA Experiment ID: 20001557 Result: Up-regulated in Transcription
  misc_feature: MA Experiment 20001557 PARAMETER Experiment Name: At_Drought_Soil_Dry_P Parameter: Age (day) Value: 27
  misc_feature: MA Experiment 20001557 PARAMETER Experiment Name: At_Drought_Soil_Dry_P Parameter: Organism Value: A. thaliana
  misc_feature: MA Experiment 20001557 PARAMETER Experiment Name: At_Drought_Soil_Dry_P Parameter: Plant Line Value: WS
  misc_feature: MA Experiment 20001557 PARAMETER Experiment Name: At_Drought_Soil_Dry_P Parameter: Post Timepoint (hr) Value: 3
  misc_feature: MA Experiment 20001557 PARAMETER Experiment Name: At_Drought_Soil_Dry_P Parameter: Post-Treatment Value: Re-Water vs. No Drought
  misc_feature: MA Experiment 20001557 PARAMETER Experiment Name: At_Drought_Soil_Dry_P Parameter: Timepoint (day) Value: 13
  misc_feature: MA Experiment 20001557 PARAMETER Experiment Name: At_Drought_Soil_Dry_P Parameter: Treatment Value: Drought vs. No Drought
  misc_feature: MA Experiment ID: 20001558 Result: Up-regulated in Transcription
  misc_feature: MA Experiment 20001558 PARAMETER Experiment Name: At_Drought_Soil_Dry_P Parameter: Age (day) Value: 27
  misc_feature: MA Experiment 20001558 PARAMETER Experiment Name: At_Drought_Soil_Dry_P Parameter: Organism Value: A. thaliana
  misc_feature: MA Experiment 20001558 PARAMETER Experiment Name: At_Drought_Soil_Dry_P Parameter: Plant Line Value: WS
  misc_feature: MA Experiment 20001558 PARAMETER Experiment Name: At_Drought_Soil_Dry_P Parameter: Post Timepoint (hr) Value: 6
  misc_feature: MA Experiment 20001558 PARAMETER Experiment Name: At_Drought_Soil_Dry_P Parameter: Post-Treatment Value: Re-Water vs. No Drought
  misc_feature: MA Experiment 20001558 PARAMETER Experiment Name: At_Drought_Soil_Dry_P Parameter: Timepoint (day) Value: 13
  misc_feature: MA Experiment 20001558 PARAMETER Experiment Name: At_Drought_Soil_Dry_P Parameter: Treatment Value: Drought vs. No Drought
aaagccatccctaatcctcgaattcttcctctctgagtttttattctgagatagagaaagatgtcaggtttagcttgtaattcgtgtaacaaagacttcgaagacgacgctgagcagaagtttcactacaaatccgaatggcaccgttacaatctcaagcgcaagatagctggtgttcctggagtaacagaggcactatttgaagctagacaagctgctatagctcaagagaaggttaaagctgttgaagcaccgatgctttatagttgtggaatctgtaacaaaggttacaggagttccaaggctcatgagcagcatcttaagtcgaagagtcatgttttgaaggcttcgacgagtactggagaggaggataaagcgatcatcaagcagcttccgcctcgtcgtgttgagaagaataacactgctcaattgaagggttcgattgaggaggaagagagtgaagatgaatggattgaggttgattcggatgaggatttggatgcggaaatgaatgaggatggtgaagaagaagatatggatgaagatggtattgaatttgagttggatccggcttgttgtttgatgtgtgataagaagcataagactatagagaaatgtatggttcatatgcataagtttcatgggttcttcattcctgatattgagtacttgaaggatcctaaagggtttctgacctacctcggtctaaaggtcaagagagacttcgtgtgtctgtactgcaatgaattgtgccatccatttagtagtttggaagctgttcgtaagcatatggacgccaaaggtcattgcaaagtgcattatggtgatggtggtgatgaagaagatgcagaacttgaagagttctatgactacagcagcagctatgtcaatggagacgaaaatcagatggttgtgtccggtgagtcagtgaacactgtagagctttttggtgggtctgagcttgtgatcaccaagagaaccgataacaaagtaacgtctaggactcttgggtctcgagaattcatgcgctactacaaacagaagccagcaccgtcttctcagaagcatattgtcaactctctaacctccaggtacaagatgatgggtctagcaacagtgcagtcaaaggaggccatagtgaggatgaaggtgatgagagagatgaacaaaagaggagcgaaaagcagtgtcaggctcggaatgaagagcaacgtcatcaggaatctgcccaacaatgtcacctattagtcttgctcctcgattttcaggtctctcctctttgtttgattttgtgaccagagttttggtgagtaaatctatctaagtttttcactagtactcaagtatcttaggcccatttgggtctctgttttgtctgatttagtcttttgaaaatgttacgttttggctgagtttgtatctcttgcccagtgctttgtacactctacattaatctatatttcatttggt

SEQ ID NO: 97155 - protein, 395 aa, Arabidopsis thaliana
  peptide (1)..(395): Ceres Seq. ID no. 12736234
  misc_feature (4)..(28): Pfam Name: Zinc finger, C2H2 type Pfam Description: Zinc finger, C2H2 type
  misc_feature (1)..(395): Homolog of NCBI NO: 15224153 NR Description: putative C2H2-type zinc finger protein; protein At2g24500.1, supported by cDNA: gi_17065087, supported by cDNA: [Arabidopsis thaliana] >gi|25453524|pir||T52423 C2H2 zinc finger
  misc_feature (1)..(395): Homolog of NCBI NO: 18417803 NR Description: putative zinc finger protein; protein id: supported by cDNA: gi_13878012 [Arabidopsis thaliana]
  misc_feature (1)..(395): Homolog of NCBI NO: 13878013 NR Description: putative zinc finger protein [Arabidopsis
  misc_feature (1)..(345): Homolog of NCBI NO: 7486672 NR Description: hypothetical protein F8F16.240 - Arabidopsis >gi|2827537|emb|CAA16545.1| putative zinc finger protein thaliana] >gi|7270045|emb|CAB79860.1| putative zinc finger
  misc_feature (154)..(319): Homolog of NCBI NO: 28207607 NR Description: putative C2H2-type zinc finger protein [Brassica
  misc_feature (2)..(384): Homolog of NCBI NO: 39581031 NR Description: Hypothetical protein CBG19691 [Caenorhabditis
  misc_feature (2)..(384): Homolog of NCBI NO: 17552200 NR Description: Zinc finger C2H2 type (43.1 kD) [Caenorhabditis
  misc_feature (1)..(274): Homolog of NCBI NO: 34874602 NR Description: similar to putative Zn-finger protein C47S
  misc_feature (6)..(387): Homolog of NCBI NO: 33286946 NR Description: Unknown (protein for IMAGE:6795513) [Danio rerio]
  misc_feature (12)..(389): Homolog of NCBI NO: 15529978 NR Description: zinc finger-like protein 9 [Homo sapiens] Unknown (protein for MGC:2485) [Homo sapiens] Unknown (protein for MGC:17552) [Homo sapiens]
MSGLACNSCNKDFEDDAEQKFHYKSEWHRYNLKRKIAGVPGVTEALFEARQAAIAQEKVKAVEAPMLYSCGICNKGYRSSKAHEQHLKSKSHVLKASTSTGEEDKAIIKQLPPRRVEKNNTAQLKGSIEEEESEDEWIEVDSDEDLDAEMNEDGEEEDMDEDGIEFELDPACCLMCDKKHKTIEKCMVHMHKFHGFFIPDIEYLKDPKGFLTYLGLKVKRDFVCLYCNELCHPFSSLEAVRKHMDAKGHCKVHYGDGGDEEDAELEEFYDYSSSYVNGDENQMVVSGESVNTVELFGGSELVITKRTDNKVTSRTLGSREFMRYYKQKPAPSSQKHIVNSLTSRYKMMGLATVQSKEAIVRMKVMREMNKRGAKSSVRLGMKSNVIRNLPNNVTY

SEQ ID NO: 97156 - protein, 330 aa, Arabidopsis thaliana
  peptide (1)..(330): Ceres Seq. ID no. 12736235
  misc_feature (1)..(330): Homolog of NCBI NO: 15224153 NR Description: putative C2H2-type zinc finger protein; protein At2g24500.1, supported by cDNA: gi_17065087, supported by cDNA: [Arabidopsis thaliana] >gi|25453524|pir||T52423 C2H2 zinc finger
  misc_feature (1)..(330): Homolog of NCBI NO: 18417803 NR Description: putative zinc finger protein; protein id: supported by cDNA: gi_13878012 [Arabidopsis thaliana]
  misc_feature (1)..(330): Homolog of NCBI NO: 13878013 NR Description: putative zinc finger protein [Arabidopsis
  misc_feature (1)..(280): Homolog of NCBI NO: 7486672 NR Description: hypothetical protein F8F16.240 - Arabidopsis >gi|2827537|emb|CAA16545.1| putative zinc finger protein thaliana] >gi|7270045|emb|CAB79860.1| putative zinc finger
  misc_feature (89)..(254): Homolog of NCBI NO: 28207607 NR Description: putative C2H2-type zinc finger protein [Brassica
  misc_feature (1)..(319): Homolog of NCBI NO: 39581031 NR Description: Hypothetical protein CBG19691 [Caenorhabditis
  misc_feature (1)..(319): Homolog of NCBI NO: 17552200 NR Description: Zinc finger C2H2 type (43.1 kD) [Caenorhabditis
  misc_feature (1)..(209): Homolog of NCBI NO: 34874602 NR Description: similar to putative Zn-finger protein C47S
  misc_feature (1)..(322): Homolog of NCBI NO: 33286946 NR Description: Unknown (protein for IMAGE:6795513) [Danio rerio]
  misc_feature (1)..(324): Homolog of NCBI NO: 15529978 NR Description: zinc finger-like protein 9 [Homo sapiens] Unknown (protein for MGC:2485) [Homo sapiens] Unknown (protein for MGC:17552) [Homo sapiens]
MLYSCGICNKGYRSSKAHEQHLKSKSHVLKASTSTGEEDKAIIKQLPPRRVEKNNTAQLKGSIEEEESEDEWIEVDSDEDLDAEMNEDGEEEDMDEDGIEFELDPACCLMCDKKHKTIEKCMVHMHKFHGFFIPDIEYLKDPKGFLTYLGLKVKRDFVCLYCNELCHPFSSLEAVRKHMDAKGHCKVHYGDGGDEEDAELEEFYDYSSSYVNGDENQMVVSGESVNTVELFGGSELVITKRTDNKVTSRTLGSREFMRYYKQKPAPSSQKHIVNSLTSRYKMMGLATVQSKEAIVRMKVMREMNKRGAKSSVRLGMKSNVIRNLPNNVTY

SEQ ID NO: 97157 - protein, 246 aa, Arabidopsis thaliana
  peptide (1)..(246): Ceres Seq. ID no. 12736236
  misc_feature (1)..(246): Homolog of NCBI NO: 15224153 NR Description: putative C2H2-type zinc finger protein; protein At2g24500.1, supported by cDNA: gi_17065087, supported by cDNA: [Arabidopsis thaliana] >gi|25453524|pir||T52423 C2H2 zinc finger
  misc_feature (1)..(246): Homolog of NCBI NO: 18417803 NR Description: putative zinc finger protein; protein id: supported by cDNA: gi_13878012 [Arabidopsis thaliana]
  misc_feature (1)..(246): Homolog of NCBI NO: 13878013 NR Description: putative zinc finger protein [Arabidopsis
  misc_feature (1)..(196): Homolog of NCBI NO: 7486672 NR Description: hypothetical protein F8F16.240 - Arabidopsis >gi|2827537|emb|CAA16545.1| putative zinc finger protein thaliana] >gi|7270045|emb|CAB79860.1| putative zinc finger
  misc_feature (5)..(170): Homolog of NCBI NO: 28207607 NR Description: putative C2H2-type zinc finger protein [Brassica
  misc_feature (1)..(235): Homolog of NCBI NO: 39581031 NR Description: Hypothetical protein CBG19691 [Caenorhabditis
  misc_feature (1)..(235): Homolog of NCBI NO: 17552200 NR Description: Zinc finger C2H2 type (43.1 kD) [Caenorhabditis
  misc_feature (1)..(125): Homolog of NCBI NO: 34874602 NR Description: similar to putative Zn-finger protein C47S
  misc_feature (1)..(238): Homolog of NCBI NO: 33286946 NR Description: Unknown (protein for IMAGE:6795513) [Danio rerio]
  misc_feature (1)..(240): Homolog of NCBI NO: 15529978 NR Description: zinc finger-like protein 9 [Homo sapiens] Unknown (protein for MGC:2485) [Homo sapiens] Unknown (protein for MGC:17552) [Homo sapiens]
MNEDGEEEDMDEDGIEFELDPACCLMCDKKHKTIEKCMVHMHKFHGFFIPDIEYLKDPKGFLTYLGLKVKRDFVCLYCNELCHPFSSLEAVRKHMDAKGHCKVHYGDGGDEEDAELEEFYDYSSSYVNGDENQMVVSGESVNTVELFGGSELVITKRTDNKVTSRTLGSREFMRYYKQKPAPSSQKHIVNSLTSRYKMMGLATVQSKEAIVRMKVMREMNKRGAKSSVRLGMKSNVIRNLPNNVTY

SEQ ID NO: 97158 - DNA, 2073 bp, Arabidopsis thaliana
  misc_feature (1)..(2073): Ceres Seq. ID no. 12736241
  misc_feature: MA Experiment ID: 20000327 Result: Down-regulated in Transcription
  misc_feature: MA Experiment 20000327 PARAMETER Experiment Name: At_42deg_Heat_Sub_P Parameter: Age (day) Value: 14
  misc_feature: MA Experiment 20000327 PARAMETER Experiment Name: At_42deg_Heat_Sub_P Parameter: Organism Value: A. thaliana
  misc_feature: MA Experiment 20000327 PARAMETER Experiment Name: At_42deg_Heat_Sub_P Parameter: Plant Line Value: WS
  misc_feature: MA Experiment 20000327 PARAMETER Experiment Name: At_42deg_Heat_Sub_P Parameter: Temperature (deg C) Value: 42 vs. 22
  misc_feature: MA Experiment 20000327 PARAMETER Experiment Name: At_42deg_Heat_Sub_P Parameter: Timepoint (hr) Value: 1
  misc_feature: MA Experiment 20000327 PARAMETER Experiment Name: At_42deg_Heat_Sub_P Parameter: Tissue Value: Aerial
  misc_feature: MA Experiment ID: 20000328 Result: Down-regulated in Transcription
  misc_feature: MA Experiment 20000328 PARAMETER Experiment Name: At_42deg_Heat_Sub_P Parameter: Age (day) Value: 14
  misc_feature: MA Experiment 20000328 PARAMETER Experiment Name: At_42deg_Heat_Sub_P Parameter: Organism Value: A. thaliana
  misc_feature: MA Experiment 20000328 PARAMETER Experiment Name: At_42deg_Heat_Sub_P Parameter: Plant Line Value: WS
  misc_feature: MA Experiment 20000328 PARAMETER Experiment Name: At_42deg_Heat_Sub_P Parameter: Temperature (deg C) Value: 42 vs. 22
  misc_feature: MA Experiment 20000328 PARAMETER Experiment Name: At_42deg_Heat_Sub_P Parameter: Timepoint (hr) Value: 6
  misc_feature: MA Experiment 20000328 PARAMETER Experiment Name: At_42deg_Heat_Sub_P Parameter: Tissue Value: Aerial
  misc_feature: MA Experiment ID: 20000355 Result: Up-regulated in Transcription
  misc_feature: MA Experiment 20000355 PARAMETER Experiment Name: At_Siliques_Sub_P Parameter: Age (day) Value: 21
  misc_feature: MA Experiment 20000355 PARAMETER Experiment Name: At_Siliques_Sub_P Parameter: Organism Value: A. thaliana
  misc_feature: MA Experiment 20000355 PARAMETER Experiment Name: At_Siliques_Sub_P Parameter: Plant Line Value: WS
  misc_feature: MA Experiment 20000355 PARAMETER Experiment Name: At_Siliques_Sub_P Parameter: Tissue Value: Less Than 5mm Siliques vs. Whole Plant
atggctccaaggtttgatttttcagatttatgggccaaggaaacaaggagaggtacaccagtagtggtgaaaatggagaatccaaattactcaatagttgaagtagaggaaccagactctgcatttcaaccaatggagaagagtagaggcaagaacgctaagcaagtgacttgggttttgcttcttaaagctcacaaagctgttggatgtctcacttgggtcgctacagtgttctggtctcttcttggttcagtcaagagacggctcagtttcactcatccactaggctctgagagacttggtagagacggatggcttttctcagctattaagctcttcttagttgcttcattagctattcttgcgtttgagttagttgcttattacagaggatggcattactttaaaaaccctaatttacacattcctacaagcaaacttgagatccagagcttgcttcatctgttctatgtcggttggttgagtttaagagctgattatattgctcctccaatcaaagctctctcaaagttttgtattgtactgttccttgtacagtctgtagatcgtttgattctttgcttaggctgtctttggatcaagtttaagaagattaagccgagaatcgatgaagagcattttcgaaatgatgattttgaaggatcagggtctgagtatccaatggttcttgttcagataccaatgtgcaatgagagagaggtatatgagcaatctatatctgctgtgtgtcagcttgactggccaaaagatcgactgctagttcaggttctagacgattcagatgatgaaagcatccaggagttaattagagatgaggttactaaatggagccaaaagggtgtcaacattatttaccggcatcgtttggttagaactggttacaaagctggtaacctcaaatctgcaatgagctgtgattatgtggaagcttacgagtttgttgcaattttcgatgcggatttccaacctaactcggatttccttaaactaaccgtgccacatttcaaggagaagcctgagttaggtctggttcaggctaggtgggcgtttgtgaacaaagacgagaacttgttgacccgtcttcaaaacatcaatctgtgttttcatttcgaggttgagcagcaggttaatggggtgttcttgaatttctttggtttcaatggaactgctggagtatggagaattaaagcccttgaggaatctggaggttggcttgaaaggacaaccgtcgaggatatggatatagctgttcgggctcatcttcatggatggaaattcatatatcttaacgatgtcaaggttctttgtgaagttcctgagtcatatgaagcatacaagaagcagcaacatcgatggcactcgggaccaatgcagctatttcgcttgtgtctgcgatcaatcttgacctctaagattgcaatgtggaagaaagcaaatctgatactactattcttccttctaaggaaactcatacttcctttctactccttcacattgttctgtgtaatccttccaatcaccatgttcgttccagaagccgagcttcctatttgggtcatctgctatgtaccgatattcatgtcactactcaacattcttcctgctccaaagtctttccctttcattgtcccttacctattgtttgagaacactatgtcggtcaccaagttcaacgcgatggtatctggattattccaactcggtagctcttacgaatggattgtaacaaagaaagcaggaagatcatcagagtctgatcttttagctctcactgataaagaatccgagaagatgccaaaccaaatcctaagaggagtttcagacagtgagctcttggagataagccaagttgaggaacagaaaaaacaaccggtttccgtgaagaaaaccaataagatattccacaaagagctcgcgctagcttttcttttgctcactgcagcagttaggagtcttttggcctcacaaggagtacatttctacttcctattgttccaaggtctcacctttcttcttgtgggtctcgatctcataggggagcagatgagttaa

SEQ ID NO: 97159 - protein, 690 aa, Arabidopsis thaliana
  peptide (1)..(690): Ceres Seq. ID no. 12736242
  misc_feature (230)..(405): Pfam Name: Glycosyl transferase Pfam Description: Glycosyl transferase
  misc_feature (139)..(629): Homolog of NCBI NO: 34419220 NR Description: TPA: cellulose synthase-like C3 [Oryza sativa
  misc_feature (1)..(134): Homolog of NCBI NO: 34419220 NR Description: TPA: cellulose synthase-like C3 [Oryza sativa
  misc_feature (629)..(690): Homolog of NCBI NO: 34419220 NR Description: TPA: cellulose synthase-like C3 [Oryza sativa
  misc_feature (106)..(690): Homolog of NCBI NO: 7635490 NR Description: putative glucosyltransferase [Cicer arietinum]
  misc_feature (10)..(689): Homolog of NCBI NO: 34419218 NR Description: TPA: cellulose synthase-like C2 [Oryza sativa
  misc_feature (21)..(690): Homolog of NCBI NO: 18405677 NR Description: expressed protein; protein id: At3g28180.1, by cDNA: gi_15810494, supported by cDNA: gi_20259272 [Arabidopsis
  misc_feature (1)..(689): Homolog of NCBI NO: 15235900 NR Description: putative glucosyltransferase; protein id: supported by cDNA: 3126. [Arabidopsis thaliana]
  misc_feature (18)..(689): Homolog of NCBI NO: 28201308 NR Description: putative CSLC9(cellulose synthase-like) [Oryza
  misc_feature (6)..(690): Homolog of NCBI NO: 15231448 NR Description: unknown protein; protein id: At3g07330.1, by cDNA: gi_17979429 [Arabidopsis thaliana] unknown protein [Arabidopsis thaliana]
  misc_feature (107)..(689): Homolog of NCBI NO: 16974749 NR Description: CSLC9 [Oryza sativa]
MAPRFDFSDLWAKETRRGTPVVVKMENPNYSIVEVEEPDSAFQPMEKSRGKNAKQVTWVLLLKAHKAVGCLTWVATVFWSLLGSVKRRLSFTHPLGSERLGRDGWLFSAIKLFLVASLAILAFELVAYYRGWHYFKNPNLHIPTSKLEIQSLLHLFYVGWLSLRADYIAPPIKALSKFCIVLFLVQSVDRLILCLGCLWIKFKKIKPRIDEEHFRNDDFEGSGSEYPMVLVQIPMCNEREVYEQSISAVCQLDWPKDRLLVQVLDDSDDESIQELIRDEVTKWSQKGVNIIYRHRLVRTGYKAGNLKSAMSCDYVEAYEFVAIFDADFQPNSDFLKLTVPHFKEKPELGLVQARWAFVNKDENLLTRLQNINLCFHFEVEQQVNGVFLNFFGFNGTAGVWRIKALEESGGWLERTTVEDMDIAVRAHLHGWKFIYLNDVKVLCEVPESYEAYKKQQHRWHSGPMQLFRLCLRSILTSKIAMWKKANLILLFFLLRKLILPFYSFTLFCVILPITMFVPEAELPIWVICYVPIFMSLLNILPAPKSFPFIVPYLLFENTMSVTKFNAMVSGLFQLGSSYEWIVTKKAGRSSESDLLALTDKESEKMPNQILRGVSDSELLEISQVEEQKKQPVSVKKTNKIFHKELALAFLLLTAAVRSLLASQGVHFYFLLFQGLTFLLVGLDLIGEQMS

SEQ ID NO: 97160 - protein, 666 aa, Arabidopsis thaliana
  peptide (1)..(666): Ceres Seq. ID no. 12736243
  misc_feature (206)..(381): Pfam Name: Glycosyl transferase Pfam Description: Glycosyl transferase
  misc_feature (115)..(605): Homolog of NCBI NO: 34419220 NR Description: TPA: cellulose synthase-like C3 [Oryza sativa
  misc_feature (1)..(110): Homolog of NCBI NO: 34419220 NR Description: TPA: cellulose synthase-like C3 [Oryza sativa
  misc_feature (605)..(666): Homolog of NCBI NO: 34419220 NR Description: TPA: cellulose synthase-like C3 [Oryza sativa
  misc_feature (82)..(666): Homolog of NCBI NO: 7635490 NR Description: putative glucosyltransferase [Cicer arietinum]
  misc_feature (1)..(665): Homolog of NCBI NO: 34419218 NR Description: TPA: cellulose synthase-like C2 [Oryza sativa
  misc_feature (1)..(666): Homolog of NCBI NO: 18405677 NR Description: expressed protein; protein id: At3g28180.1, by cDNA: gi_15810494, supported by cDNA: gi_20259272 [Arabidopsis
  misc_feature (1)..(665): Homolog of NCBI NO: 15235900 NR Description: putative glucosyltransferase; protein id: supported by cDNA: 3126. [Arabidopsis thaliana]
  misc_feature (1)..(665): Homolog of NCBI NO: 28201308 NR Description: putative CSLC9(cellulose synthase-like) [Oryza
  misc_feature (1)..(666): Homolog of NCBI NO: 15231448 NR Description: unknown protein; protein id: At3g07330.1, by cDNA: gi_17979429 [Arabidopsis thaliana] unknown protein [Arabidopsis thaliana]
  misc_feature (83)..(665): Homolog of NCBI NO: 16974749 NR Description: CSLC9 [Oryza sativa]
MENPNYSIVEVEEPDSAFQPMEKSRGKNAKQVTWVLLLKAHKAVGCLTWVATVFWSLLGSVKRRLSFTHPLGSERLGRDGWLFSAIKLFLVASLAILAFELVAYYRGWHYFKNPNLHIPTSKLEIQSLLHLFYVGWLSLRADYIAPPIKALSKFCIVLFLVQSVDRLILCLGCLWIKFKKIKPRIDEEHFRNDDFEGSGSEYPMVLVQIPMCNEREVYEQSISAVCQLDWPKDRLLVQVLDDSDDESIQELIRDEVTKWSQKGVNIIYRHRLVRTGYKAGNLKSAMSCDYVEAYEFVAIFDADFQPNSDFLKLTVPHFKEKPELGLVQARWAFVNKDENLLTRLQNINLCFHFEVEQQVNGVFLNFFGFNGTAGVWRIKALEESGGWLERTTVEDMDIAVRAHLHGWKFIYLNDVKVLCEVPESYEAYKKQQHRWHSGPMQLFRLCLRSILTSKIAMWKKANLILLFFLLRKLILPFYSFTLFCVILPITMFVPEAELPIWVICYVPIFMSLLNILPAPKSFPFIVPYLLFENTMSVTKFNAMVSGLFQLGSSYEWIVTKKAGRSSESDLLALTDKESEKMPNQILRGVSDSELLEISQVEEQKKQPVSVKKTNKIFHKELALAFLLLTAAVRSLLASQGVHFYFLLFQGLTFLLVGLDLIGEQMS

SEQ ID NO: 97161 - protein, 646 aa, Arabidopsis thaliana
  peptide (1)..(646): Ceres Seq. ID no. 12736244
  misc_feature (186)..(361): Pfam Name: Glycosyl transferase Pfam Description: Glycosyl transferase
  misc_feature (95)..(585): Homolog of NCBI NO: 34419220 NR Description: TPA: cellulose synthase-like C3 [Oryza sativa
  misc_feature (1)..(90): Homolog of NCBI NO: 34419220 NR Description: TPA: cellulose synthase-like C3 [Oryza sativa
  misc_feature (585)..(646): Homolog of NCBI NO: 34419220 NR Description: TPA: cellulose synthase-like C3 [Oryza sativa
  misc_feature (62)..(646): Homolog of NCBI NO: 7635490 NR Description: putative glucosyltransferase [Cicer arietinum]
  misc_feature (1)..(645): Homolog of NCBI NO: 34419218 NR Description: TPA: cellulose synthase-like C2 [Oryza sativa
  misc_feature (1)..(646): Homolog of NCBI NO: 18405677 NR Description: expressed protein; protein id: At3g28180.1, by cDNA: gi_15810494, supported by cDNA: gi_20259272 [Arabidopsis
  misc_feature (1)..(645): Homolog of NCBI NO: 15235900 NR Description: putative glucosyltransferase; protein id: supported by cDNA: 3126. [Arabidopsis thaliana]
  misc_feature (1)..(645): Homolog of NCBI NO: 28201308 NR Description: putative CSLC9(cellulose synthase-like) [Oryza
  misc_feature (1)..(646): Homolog of NCBI NO: 15231448 NR Description: unknown protein; protein id: At3g07330.1, by cDNA: gi_17979429 [Arabidopsis thaliana] unknown protein [Arabidopsis thaliana]
  misc_feature (63)..(645): Homolog of NCBI NO: 16974749 NR Description: CSLC9 [Oryza sativa]
MEKSRGKNAKQVTWVLLLKAHKAVGCLTWVATVFWSLLGSVKRRLSFTHPLGSERLGRDGWLFSAIKLFLVASLAILAFELVAYYRGWHYFKNPNLHIPTSKLEIQSLLHLFYVGWLSLRADYIAPPIKALSKFCIVLFLVQSVDRLILCLGCLWIKFKKIKPRIDEEHFRNDDFEGSGSEYPMVLVQIPMCNEREVYEQSISAVCQLDWPKDRLLVQVLDDSDDESIQELIRDEVTKWSQKGVNIIYRHRLVRTGYKAGNLKSAMSCDYVEAYEFVAIFDADFQPNSDFLKLTVPHFKEKPELGLVQARWAFVNKDENLLTRLQNINLCFHFEVEQQVNGVFLNFFGFNGTAGVWRIKALEESGGWLERTTVEDMDIAVRAHLHGWKFIYLNDVKVLCEVPESYEAYKKQQHRWHSGPMQLFRLCLRSILTSKIAMWKKANLILLFFLLRKLILPFYSFTLFCVILPITMFVPEAELPIWVICYVPIFMSLLNILPAPKSFPFIVPYLLFENTMSVTKFNAMVSGLFQLGSSYEWIVTKKAGRSSESDLLALTDKESEKMPNQILRGVSDSELLEISQVEEQKKQPVSVKKTNKIFHKELALAFLLLTAAVRSLLASQGVHFYFLLFQGLTFLLVGLDLIGEQMS

SEQ ID NO: 97162 - DNA, 589 bp, Arabidopsis thaliana
  misc_feature (1)..(589): Ceres Seq. ID no. 12736288
  misc_feature: MA Experiment ID: 20000184 Result: Down-regulated in Transcription
  misc_feature: MA Experiment 20000184 PARAMETER Experiment Name: At_Shoots__P Parameter: Age (day) Value: 7
  misc_feature: MA Experiment 20000184 PARAMETER Experiment Name: At_Shoots__P Parameter: Tissue Value: Shoots vs. Whole Plant
  misc_feature: MA Experiment ID: 20000227 Result: Down-regulated in Transcription
  misc_feature: MA Experiment 20000227 PARAMETER Experiment Name: At_Root-Tips-vs-Tops_P Parameter: Tissue Value: Root Tips vs. Root Tops
  misc_feature: MA Experiment ID: 20000235 Result: Down-regulated in Transcription
  misc_feature: MA Experiment 20000235 PARAMETER Experiment Name: At_Siliques_P Parameter: Age (day) Value: 21
  misc_feature: MA Experiment 20000235 PARAMETER Experiment Name: At_Siliques_P Parameter: Organism Value: A. thaliana
  misc_feature: MA Experiment 20000235 PARAMETER Experiment Name: At_Siliques_P Parameter: Plant Line Value: WS
  misc_feature: MA Experiment 20000235 PARAMETER Experiment Name: At_Siliques_P Parameter: Tissue Value: 5-10mm Siliques vs. Whole Plant
  misc_feature: MA Experiment ID: 20000264 Result: Down-regulated in Transcription
  misc_feature: MA Experiment 20000264 PARAMETER Experiment Name: At_Open_Flower_P Parameter: Age (day) Value: 21
  misc_feature: MA Experiment 20000264 PARAMETER Experiment Name: At_Open_Flower_P Parameter: Plant Line Value: WS
  misc_feature: MA Experiment 20000264 PARAMETER Experiment Name: At_Open_Flower_P Parameter: Tissue Value: Open Flower vs. Whole Plant
  misc_feature: MA Experiment ID: 20000265 Result: Down-regulated in Transcription
  misc_feature: MA Experiment 20000265 PARAMETER Experiment Name: At_Open_Flower_P Parameter: Age (day) Value: 21
  misc_feature: MA Experiment 20000265 PARAMETER Experiment Name: At_Open_Flower_P Parameter: Plant Line Value: WS
  misc_feature: MA Experiment 20000265 PARAMETER Experiment Name: At_Open_Flower_P Parameter: Tissue Value: Closed Flower vs. Whole Plant
  misc_feature: MA Experiment ID: 20000286 Result: Down-regulated in Transcription
  misc_feature: MA Experiment 20000286 PARAMETER Experiment Name: At_Open_Flower_P Parameter: Age (day) Value: 21
  misc_feature: MA Experiment 20000286 PARAMETER Experiment Name: At_Open_Flower_P Parameter: Plant Line Value: WS
  misc_feature: MA Experiment 20000286 PARAMETER Experiment Name: At_Open_Flower_P Parameter: Tissue Value: Half Open vs. Whole Plant
  misc_feature: MA Experiment ID: 20000438 Result: Down-regulated in Transcription
  misc_feature: MA Experiment 20000438 PARAMETER Experiment Name: At_Shoots__P Parameter: Age (day) Value: 14
  misc_feature: MA Experiment 20000438 PARAMETER Experiment Name: At_Shoots__P Parameter: Tissue Value: Shoots vs. Whole Plant
  misc_feature: MA Experiment ID: 20000794 Result: Down-regulated in Transcription
  misc_feature: MA Experiment 20000794 PARAMETER Experiment Name: At_Petals_P Parameter: Age (day) Value: 23-25 days
  misc_feature: MA Experiment 20000794 PARAMETER Experiment Name: At_Petals_P Parameter: Plant Line Value: WS
  misc_feature: MA Experiment 20000794 PARAMETER Experiment Name: At_Petals_P Parameter: Tissue Value: Petals vs. Whole plant
  misc_feature: MA Experiment ID: 20001757 Result: Down-regulated in Transcription
  misc_feature: MA Experiment 20001757 PARAMETER Experiment Name: At_50mM_NH4NO3_L-to-H_P Parameter: Timepoint (hr) Value: 6
  misc_feature: MA Experiment 20001757 PARAMETER Experiment Name: At_50mM_NH4NO3_L-to-H_P Parameter: Tissue Value: Leaf
  misc_feature: MA Experiment 20001757 PARAMETER Experiment Name: At_50mM_NH4NO3_L-to-H_P Parameter: Treatment Value: 50mM NH4NO3 vs 100mM Mannitol
  misc_feature: MA Experiment ID: 20001904 Result: Up-regulated in Transcription
  misc_feature: MA Experiment 20001904 PARAMETER Experiment Name: At_Drought_Reproduction_P Parameter: Age (day) Value: 37
  misc_feature: MA Experiment 20001904 PARAMETER Experiment Name: At_Drought_Reproduction_P Parameter: Organism Value: A. thaliana
  misc_feature: MA Experiment 20001904 PARAMETER Experiment Name: At_Drought_Reproduction_P Parameter: Plant Line Value: WS
  misc_feature: MA Experiment 20001904 PARAMETER Experiment Name: At_Drought_Reproduction_P Parameter: Timepoint (day) Value: 7
  misc_feature: MA Experiment 20001904 PARAMETER Experiment Name: At_Drought_Reproduction_P Parameter: Tissue Value: Rosettes
  misc_feature: MA Experiment 20001904 PARAMETER Experiment Name: At_Drought_Reproduction_P Parameter: Treatment Value: Drought vs. No Drought
  misc_feature: MA Experiment ID: 20001905 Result: Up-regulated in Transcription
  misc_feature: MA Experiment 20001905 PARAMETER Experiment Name: At_Drought_Reproduction_P Parameter: Age (day) Value: 40
  misc_feature: MA Experiment 20001905 PARAMETER Experiment Name: At_Drought_Reproduction_P Parameter: Organism Value: A. thaliana
  misc_feature: MA Experiment 20001905 PARAMETER Experiment Name: At_Drought_Reproduction_P Parameter: Plant Line Value: WS
  misc_feature: MA Experiment 20001905 PARAMETER Experiment Name: At_Drought_Reproduction_P Parameter: Timepoint (day) Value: 10
  misc_feature: MA Experiment 20001905 PARAMETER Experiment Name: At_Drought_Reproduction_P Parameter: Tissue Value: Rosettes
  misc_feature: MA Experiment 20001905 PARAMETER Experiment Name: At_Drought_Reproduction_P Parameter: Treatment Value: Drought vs. No Drought
acaatttcctccttctcccgttataaactaaagactcgattttgtgttgattgttcgattcacgtaattaaggagatttttggatcaaaagatgggtagggtttttatggttgatctggaagggaacatctacatctgcaaactctgtaagacccatctttctacagaccaagacatcatgtccaagtcttttcaatgcaagaacggaagagcttatcttttcaacaacgttgtaaacgtatctgttggagagaaagaagacagaatgatgataactggactacacaacgtagttgacattttctgtgttggttgtggatcaaacgttggctggaaatacgagtttgcacatgaaaagagccagaagtataaggaaggaaaatctgttcttgaattatacaagatttcgggtcctcatgatagcaacgacttggttagtgatggagatgatgcttgattgaggctttttccttgtctagttatctctctctcagatttcttttaaatttgtacattcttgggcctagattttaattcgtttcaatatgcgtagtggaagaccggtttaataattaggggttttattttc

SEQ ID NO: 97163 - protein, 121 aa, Arabidopsis thaliana
  peptide (1)..(121): Ceres Seq. ID no. 12736289
  misc_feature (1)..(108): Pfam Name: Yippee putative zinc-binding protein Pfam Description: Yippee putative zinc-binding protein
  misc_feature (1)..(121): Homolog of NCBI NO: 15228759 NR Description: Yippee-like protein; protein id: At3g55890.1, by cDNA: gi_15293034, supported by cDNA: gi_20259292 [Arabidopsis
  misc_feature (1)..(116): Homolog of NCBI NO: 15225631 NR Description: unknown protein; protein id: At2g40110.1, by cDNA: 16208. [Arabidopsis thaliana] >gi|25367152|pir||D84825
  misc_feature (1)..(116): Homolog of NCBI NO: 28273361 NR Description: putative zinc binding protein [Oryza sativa
  misc_feature (1)..(120): Homolog of NCBI NO: 27923880 NR Description: Yippee-like protein >gi|24745964|dbj|BAC23053.1|
  misc_feature (1)..(121): Homolog of NCBI NO: 18399156 NR Description: expressed protein; protein id: At3g11230.1,
  misc_feature (1)..(121): Homolog of NCBI NO: 21617953 NR Description: yippee-like protein [Arabidopsis thaliana]
  misc_feature (1)..(103): Homolog of NCBI NO: 15232001 NR Description: Yippee-like protein; protein id: At3g08990.1
  misc_feature (1)..(105): Homolog of NCBI NO: 15238881 NR Description: zinc-binding protein-like; protein id:
  misc_feature (32)..(103): Homolog of NCBI NO: 27923900 NR Description: Yippee-like protein At3g08995
  misc_feature (1)..(101): Homolog of NCBI NO: 23613773 NR Description: hypothetical protein, conserved [Plasmodium
MGRVFMVDLEGNIYICKLCKTHLSTDQDIMSKSFQCKNGRAYLFNNVVNVSVGEKEDRMMITGLHNVVDIFCVGCGSNVGWKYEFAHEKSQKYKEGKSVLELYKISGPHDSNDLVSDGDDA

SEQ ID NO: 97164 - protein, 116 aa, Arabidopsis thaliana
  peptide (1)..(116): Ceres Seq. ID no. 12736290
  misc_feature (1)..(103): Pfam Name: Yippee putative zinc-binding protein Pfam Description: Yippee putative zinc-binding protein
  misc_feature (1)..(116): Homolog of NCBI NO: 15228759 NR Description: Yippee-like protein; protein id: At3g55890.1, by cDNA: gi_15293034, supported by cDNA: gi_20259292 [Arabidopsis
  misc_feature (1)..(111): Homolog of NCBI NO: 15225631 NR Description: unknown protein; protein id: At2g40110.1, by cDNA: 16208. [Arabidopsis thaliana] >gi|25367152|pir||D84825
  misc_feature (1)..(111): Homolog of NCBI NO: 28273361 NR Description: putative zinc binding protein [Oryza sativa
  misc_feature (1)..(115): Homolog of NCBI NO: 27923880 NR Description: Yippee-like protein >gi|24745964|dbj|BAC23053.1|
  misc_feature (1)..(116): Homolog of NCBI NO: 18399156 NR Description: expressed protein; protein id: At3g11230.1,
  misc_feature (1)..(116): Homolog of NCBI NO: 21617953 NR Description: yippee-like protein [Arabidopsis thaliana]
  misc_feature (1)..(98): Homolog of NCBI NO: 15232001 NR Description: Yippee-like protein; protein id: At3g08990.1
  misc_feature (1)..(100): Homolog of NCBI NO: 15238881 NR Description: zinc-binding protein-like; protein id:
  misc_feature (27)..(98): Homolog of NCBI NO: 27923900 NR Description: Yippee-like protein At3g08995
  misc_feature (1)..(96): Homolog of NCBI NO: 23613773 NR Description: hypothetical protein, conserved [Plasmodium
MVDLEGNIYICKLCKTHLSTDQDIMSKSFQCKNGRAYLFNNVVNVSVGEKEDRMMITGLHNVVDIFCVGCGSNVGWKYEFAHEKSQKYKEGKSVLELYKISGPHDSNDLVSDGDDA

SEQ ID NO: 97165 - protein, 92 aa, Arabidopsis thaliana
  peptide (1)..(92): Ceres Seq. ID no. 12736291
  misc_feature (1)..(79): Pfam Name: Yippee putative zinc-binding protein Pfam Description: Yippee putative zinc-binding protein
  misc_feature (1)..(92): Homolog of NCBI NO: 15228759 NR Description: Yippee-like protein; protein id: At3g55890.1, by cDNA: gi_15293034, supported by cDNA: gi_20259292 [Arabidopsis
  misc_feature (1)..(87): Homolog of NCBI NO: 15225631 NR Description: unknown protein; protein id: At2g40110.1, by cDNA: 16208. [Arabidopsis thaliana] >gi|25367152|pir||D84825
  misc_feature (1)..(87): Homolog of NCBI NO: 28273361 NR Description: putative zinc binding protein [Oryza sativa
  misc_feature (1)..(91): Homolog of NCBI NO: 27923880 NR Description: Yippee-like protein >gi|24745964|dbj|BAC23053.1|
  misc_feature (1)..(92): Homolog of NCBI NO: 18399156 NR Description: expressed protein; protein id: At3g11230.1,
  misc_feature (1)..(92): Homolog of NCBI NO: 21617953 NR Description: yippee-like protein [Arabidopsis thaliana]
  misc_feature (1)..(74): Homolog of NCBI NO: 15232001 NR Description: Yippee-like protein; protein id: At3g08990.1
  misc_feature (1)..(76): Homolog of NCBI NO: 15238881 NR Description: zinc-binding protein-like; protein id:
  misc_feature (3)..(74): Homolog of NCBI NO: 27923900 NR Description: Yippee-like protein At3g08995
  misc_feature (1)..(72): Homolog of NCBI NO: 23613773 NR Description: hypothetical protein, conserved [Plasmodium
MSKSFQCKNGRAYLFNNVVNVSVGEKEDRMMITGLHNVVDIFCVGCGSNVGWKYEFAHEKSQKYKEGKSVLELYKISGPHDSNDLVSDGDDA

SEQ ID NO: 97166 - DNA, 2445 bp, Arabidopsis thaliana
  misc_feature (1)..(2445): Ceres Seq. ID no. 12736308
  misc_feature: MA Experiment ID: 20000264 Result: Down-regulated in Transcription
  misc_feature: MA Experiment 20000264 PARAMETER Experiment Name: At_Open_Flower_P Parameter: Age (day) Value: 21
  misc_feature: MA Experiment 20000264 PARAMETER Experiment Name: At_Open_Flower_P Parameter: Plant Line Value: WS
  misc_feature: MA Experiment 20000264 PARAMETER Experiment Name: At_Open_Flower_P Parameter: Tissue Value: Open Flower vs. Whole Plant
  misc_feature: MA Experiment ID: 20000265 Result: Down-regulated in Transcription
  misc_feature: MA Experiment 20000265 PARAMETER Experiment Name: At_Open_Flower_P Parameter: Age (day) Value: 21
  misc_feature: MA Experiment 20000265 PARAMETER Experiment Name: At_Open_Flower_P Parameter: Plant Line Value: WS
  misc_feature: MA Experiment 20000265 PARAMETER Experiment Name: At_Open_Flower_P Parameter: Tissue Value: Closed Flower vs. Whole Plant
  misc_feature: MA Experiment ID: 20001911 Result: Down-regulated in Transcription
  misc_feature: MA Experiment 20001911 PARAMETER Experiment Name: At_Drought_Reproduction_P Parameter: Age (day) Value: 40
  misc_feature: MA Experiment 20001911 PARAMETER Experiment Name: At_Drought_Reproduction_P Parameter: Organism Value: A. thaliana
  misc_feature: MA Experiment 20001911 PARAMETER Experiment Name: At_Drought_Reproduction_P Parameter: Plant Line Value: WS
  misc_feature: MA Experiment 20001911 PARAMETER Experiment Name: At_Drought_Reproduction_P Parameter: Timepoint (day) Value: 10
  misc_feature: MA Experiment 20001911 PARAMETER Experiment Name: At_Drought_Reproduction_P Parameter: Tissue Value: Flowers
  misc_feature: MA Experiment 20001911 PARAMETER Experiment Name: At_Drought_Reproduction_P Parameter: Treatment Value: Drought vs. No Drought
atgaagaggtttatcaactcaaccgtgacgttttccgtcaccgtcaccatcgccgttatcatcttcttcctcttgtctcccgtcacctccttaggttcaggctcaacttacgcagtcgtatacggctccgacaccgtctgcgcattgatctccggtcaacccacacaacgtatcctctgttacgacacgcgtcttaatatcaacgtcactctaaaccccggcgtctcattctcctcaatagccgccggagataatttcctctgcggtatacgctccggtggttacagccttctctgttgggataacatcggaagctactctccaaaccggaaacgaatctaccaaaacgacaacgttttactcgagactctctccgtcggggataaacaaatctgcgcaaccgttaacggtacaaattccttaaaatgctggagaggttccgtttccgatcaatcaaaacctccgaacgagagattccgatcaatttcatccggcgttggtttctcctgcggcgtttcgattcgaaataaccgaatcctttgctggggaaccgatccggttaaatcgaatcagatccaaaccggattcggaaacacgccgatggtgaccatctccgcaggtaaatcacacgcttgtggattaaacactactgggaatttgatttgcatcggaaacaacgattctggtcagctcaatgttattgctccagatcaacctaacctttactcatcatctctctctctcggatcaaatttcacctgcgcgatgcgaatctcgaataattctgtggtttgttggggcggaggagcagagagattcaacaatgtcacggattcgatctctttcgaatcgatttcctcgggtccgggtctaatttgcgggttgatttcaagtaatctctcaatcatgtgttggaatcctacaaatttctccagaatcttcctccctttcccagaagttttaccaggtccttgcgttgaatcatcatcatcctctctttgctcttgtggtgtttatccacaatctgataagctctgttctggtactggctcgatttgtaaatcatgtccgattcaatttccagcgagtcctccgagtcaatttcctcttccaccaccaccaccaccaccaccgccatcaccgtcaacttcatctccaccgtcgaaagctttaacaagaggattattagcgtttgcgatcgttggatcagttggagcatttgcagggatctgtagtgtggtttactgtttatggactggagtttgcttggggaagaagaaagttcataactcggttcaaccgacgataactcgcggtggttctaatagccggtctaacagttcgaatagccggtcgttatctataagacgtcaaggatcgagaatgctatcaatgaggaggcagagaagtggaacatcgtcgatgaagcacgccgataaagcggaagagttttcgttctccgagcttgcttcggctaccggaaacttctctctagagaacaaaatcggttcggggagctttggtgttgtttacagaggtaaactcaatgacgggagagaagtagcgatcaaacgcggggaagtaaacgcgaagatgaagaagtttcaagagaaagaaaccgcgtttgattcggaaatcgcgtttttatcgaggcttcatcataagcatttggtgagactagttggttactgcgaagaaagagaagagaagcttctcgtttacgattacatgaagaatggtgcgctttacgatcatctacacgacaagaacaacgtcgaaaaacatagtagcttgatcaattcttggaaaatgcggatcaaaatcgcgttagatgcggctagaggaatcgagtatctacataactacgcagtgccaccgattattcatagagatattaagtcgtctaacatcttgcttgactctaattgggtcgctagagtttcggatttcgggttatcattaatgggtccggtgctagggaaagatcataatccttatcaacgtccaacgaaagctgcggggacggtcggatatattgatccagagtattatagtcttaatgttttaacggataagagcgatgtgtatggactaggagtggtgttgttagaattgttgaccgggaaaagagcgatatttaggaacaatggtgatgtggaggaggaggaagggtgtgttccggtgcatttggtggattactcggttccggcgataacggctgatgagttgagtacaattttggatccgagagttggatcaccggagctaggtgaaggagatgcggtggagctggtggcttatacggctatgcattgtgtgaatgcggaagggagaaacaggccgacaatgacggatatagtagggaatttggagagagcattggatttgtgtggggatagtcatgggagtatctctagtggcatttgttctattgtctctgattga

SEQ ID NO: 97167 - protein, 814 aa, Arabidopsis thaliana
  peptide (1)..(814): Ceres Seq. ID no. 12736309
  misc_feature (19)..(797): Homolog of NCBI NO: 10998537 NR Description: cytokinin-regulated kinase 1 [Nicotiana tabacum]
  misc_feature (15)..(386): Homolog of NCBI NO: 15721862 NR Description: CR4 [Oryza sativa]
  misc_feature (480)..(796): Homolog of NCBI NO: 15721862 NR Description: CR4 [Oryza sativa]
  misc_feature (15)..(354): Homolog of NCBI NO: 3913366 NR Description: Putative receptor protein kinase CRINKLY4
  misc_feature (480)..(796): Homolog of NCBI NO: 3913366 NR Description: Putative receptor protein kinase CRINKLY4
  misc_feature (204)..(807): Homolog of NCBI NO: 39545656 NR Description: OJ000114_01.11 [Oryza sativa (japonica
  misc_feature (469)..(799): Homolog of NCBI NO: 15231681 NR Description: putative protein; protein id: At3g59420.1, by cDNA: gi_20302589 [Arabidopsis thaliana]
  misc_feature (249)..(338): Homolog of NCBI NO: 15231681 NR Description: putative protein; protein id: At3g59420.1, by cDNA: gi_20302589 [Arabidopsis thaliana]
  misc_feature (473)..(797): Homolog of NCBI NO: 15238823 NR Description: receptor kinase-like protein; protein id:
  misc_feature (357)..(791): Homolog of NCBI NO: 15221470 NR Description: protein kinase, putative; protein id: supported by cDNA: gi_21280864 [Arabidopsis thaliana]
MKRFINSTVTFSVTVTIAVIIFFLLSPVTSLGSGSTYAVVYGSDTVCALISGQPTQRILCYDTRLNINVTLNPGVSFSSIAAGDNFLCGIRSGGYSLLCWDNIGSYSPNRKRIYQNDNVLLETLSVGDKQICATVNGTNSLKCWRGSVSDQSKPPNERFRSISSGVGFSCGVSIRNNRILCWGTDPVKSNQIQTGFGNTPMVTISAGKSHACGLNTTGNLICIGNNDSGQLNVIAPDQPNLYSSSLSLGSNFTCAMRISNNSVVCWGGGAERFNNVTDSISFESISSGPGLICGLISSNLSIMCWNPTNFSRIFLPFPEVLPGPCVESSSSSLCSCGVYPQSDKLCSGTGSICKSCPIQFPASPPSQFPLPPPPPPPPPSPSTSSPPSKALTRGLLAFAIVGSVGAFAGICSVVYCLWTGVCLGKKKVHNSVQPTITRGGSNSRSNSSNSRSLSIRRQGSRMLSMRRQRSGTSSMKHADKAEEFSFSELASATGNFSLENKIGSGSFGVVYRGKLNDGREVAIKRGEVNAKMKKFQEKETAFDSEIAFLSRLHHKHLVRLVGYCEEREEKLLVYDYMKNGALYDHLHDKNNVEKHSSLINSWKMRIKIALDAARGIEYLHNYAVPPIIHRDIKSSNILLDSNWVARVSDFGLSLMGPVLGKDHNPYQRPTKAAGTVGYIDPEYYSLNVLTDKSDVYGLGVVLLELLTGKRAIFRNNGDVEEEEGCVPVHLVDYSVPAITADELSTILDPRVGSPELGEGDAVELVAYTAMHCVNAEGRNRPTMTDIVGNLERALDLCGDSHGSISSGICSIVSD

SEQ ID NO: 97168 - protein, 614 aa, Arabidopsis thaliana
  peptide (1)..(614): Ceres Seq. ID no. 12736310
  misc_feature (1)..(597): Homolog of NCBI NO: 10998537 NR Description: cytokinin-regulated kinase 1 [Nicotiana tabacum]
  misc_feature (1)..(186): Homolog of NCBI NO: 15721862 NR Description: CR4 [Oryza sativa]
  misc_feature (280)..(596): Homolog of NCBI NO: 15721862 NR Description: CR4 [Oryza sativa]
  misc_feature (1)..(154): Homolog of NCBI NO: 3913366 NR Description: Putative receptor protein kinase CRINKLY4
  misc_feature (280)..(596): Homolog of NCBI NO: 3913366 NR Description: Putative receptor protein kinase CRINKLY4
  misc_feature (4)..(607): Homolog of NCBI NO: 39545656 NR Description: OJ000114_01.11 [Oryza sativa (japonica
  misc_feature (269)..(599): Homolog of NCBI NO: 15231681 NR Description: putative protein; protein id: At3g59420.1, by cDNA: gi_20302589 [Arabidopsis thaliana]
  misc_feature (49)..(138): Homolog of NCBI NO: 15231681 NR Description: putative protein; protein id: At3g59420.1, by cDNA: gi_20302589 [Arabidopsis thaliana]
  misc_feature (273)..(597): Homolog of NCBI NO: 15238823 NR Description: receptor kinase-like protein; protein id:
  misc_feature (157)..(591): Homolog of NCBI NO: 15221470 NR Description: protein kinase, putative; protein id: supported by cDNA: gi_21280864 [Arabidopsis thaliana]
MVTISAGKSHACGLNTTGNLICIGNNDSGQLNVIAPDQPNLYSSSLSLGSNFTCAMRISNNSVVCWGGGAERFNNVTDSISFESISSGPGLICGLISSNLSIMCWNPTNFSRIFLPFPEVLPGPCVESSSSSLCSCGVYPQSDKLCSGTGSICKSCPIQFPASPPSQFPLPPPPPPPPPSPSTSSPPSKALTRGLLAFAIVGSVGAFAGICSVVYCLWTGVCLGKKKVHNSVQPTITRGGSNSRSNSSNSRSLSIRRQGSRMLSMRRQRSGTSSMKHADKAEEFSFSELASATGNFSLENKIGSGSFGVVYRGKLNDGREVAIKRGEVNAKMKKFQEKETAFDSEIAFLSRLHHKHLVRLVGYCEEREEKLLVYDYMKNGALYDHLHDKNNVEKHSSLINSWKMRIKIALDAARGIEYLHNYAVPPIIHRDIKSSNILLDSNWVARVSDFGLSLMGPVLGKDHNPYQRPTKAAGTVGYIDPEYYSLNVLTDKSDVYGLGVVLLELLTGKRAIFRNNGDVEEEEGCVPVHLVDYSVPAITADELSTILDPRVGSPELGEGDAVELVAYTAMHCVNAEGRNRPTMTDIVGNLERALDLCGDSHGSISSGICSIVSD

SEQ ID NO: 97169 - protein, 559 aa, Arabidopsis thaliana
  peptide (1)..(559): Ceres Seq. ID no. 12736311
  misc_feature (1)..(542): Homolog of NCBI NO: 10998537 NR Description: cytokinin-regulated kinase 1 [Nicotiana tabacum]
  misc_feature (1)..(131): Homolog of NCBI NO: 15721862 NR Description: CR4 [Oryza sativa]
  misc_feature (225)..(541): Homolog of NCBI NO: 15721862 NR Description: CR4 [Oryza sativa]
  misc_feature (1)..(99): Homolog of NCBI NO: 3913366 NR Description: Putative receptor protein kinase CRINKLY4
  misc_feature (225)..(541): Homolog of NCBI NO: 3913366 NR Description: Putative receptor protein kinase CRINKLY4
  misc_feature (1)..(552): Homolog of NCBI NO: 39545656 NR Description: OJ000114_01.11 [Oryza sativa (japonica
  misc_feature (214)..(544): Homolog of NCBI NO: 15231681 NR Description: putative protein; protein id: At3g59420.1, by cDNA: gi_20302589 [Arabidopsis thaliana]
  misc_feature (1)..(83): Homolog of NCBI NO: 15231681 NR Description: putative protein; protein id: At3g59420.1, by cDNA: gi_20302589 [Arabidopsis thaliana]
  misc_feature (218)..(542): Homolog of NCBI NO: 15238823 NR Description: receptor kinase-like protein; protein id:
  misc_feature (102)..(536): Homolog of NCBI NO: 15221470 NR Description: protein kinase, putative; protein id: supported by cDNA: gi_21280864 [Arabidopsis thaliana]
MRISNNSVVCWGGGAERFNNVTDSISFESISSGPGLICGLISSNLSIMCWNPTNFSRIFLPFPEVLPGPCVESSSSSLCSCGVYPQSDKLCSGTGSICKSCPIQFPASPPSQFPLPPPPPPPPPSPSTSSPPSKALTRGLLAFAIVGSVGAFAGICSVVYCLWTGVCLGKKKVHNSVQPTITRGGSNSRSNSSNSRSLSIRRQGSRMLSMRRQRSGTSSMKHADKAEEFSFSELASATGNFSLENKIGSGSFGVVYRGKLNDGREVAIKRGEVNAKMKKFQEKETAFDSEIAFLSRLHHKHLVRLVGYCEEREEKLLVYDYMKNGALYDHLHDKNNVEKHSSLINSWKMRIKIALDAARGIEYLHNYAVPPIIHRDIKSSNILLDSNWVARVSDFGLSLMGPVLGKDHNPYQRPTKAAGTVGYIDPEYYSLNVLTDKSDVYGLGVVLLELLTGKRAIFRNNGDVEEEEGCVPVHLVDYSVPAITADELSTILDPRVGSPELGEGDAVELVAYTAMHCVNAEGRNRPTMTDIVGNLERALDLCGDSHGSISSGICSIVSD

SEQ ID NO: 97170 - DNA, 1470 bp, Arabidopsis thaliana
  misc_feature (1)..(1470): Ceres Seq. ID no. 12736345
  misc_feature: MA Experiment ID: 20000495 Result: Up-regulated in Transcription
  misc_feature: MA Experiment 20000495 PARAMETER Experiment Name: At_Guard_Cells_P Parameter: Harvest Date Value: 8/2/2002
  misc_feature: MA Experiment 20000495 PARAMETER Experiment Name: At_Guard_Cells_P Parameter: Organism Value: A. thaliana
  misc_feature: MA Experiment 20000495 PARAMETER Experiment Name: At_Guard_Cells_P Parameter: Tissue Value: Guard Cells vs. Leaves
atgtcggagatggaggtggagaaaccggatttgacattgtacaacacaatgactcaactgaaggaagtttataagccgatgaatcccggcaaaatcggaatctatgtatgcggtatcaccgcttacgattatagccacattggccacgctcgtgccgccgtgtccttcgacctcctttacagatacttaaggcacttgggttatcaagttacttatgtcagaaattttacagatgttgatgacaaggctaaaaactgtggagagaagccgttagatttgagtaatcgcttttgcgaggagtatcttttagatatggctgctcttcagtgcctccttcccacccaccagcctcgtgtcagtgatcatatggaacagatcattaagatgatagaaaagatcattgagaatggatgtgggtatgctgtgggtggtgatgtgttcttctcagtggacaaatcaccgagttatggtcagttatctggtcaacggctggatcatactcaagctggtaagcgtgttgctgttgactcaaggaagcgtaatcctgctgactttgcattacggaaggctgcaaaatctggtgaaccaagttgggagagcccttggggtcatggaagaccaggatggcacatcgagtttgacattcatggtggtggcgcagatctcaaattcccgcaccatgaaaatgagatcgcccagacatgtgctgcttgtgaagatagtggtgtgaactactggttgcataacgggcatgtcaccaacaacaatgtgaagatgggaaaatcattgaacaacttttttacgattagacaaatcgcggctaactatcatccactggctttgagacatttcttgatgagtgcacagtaccgttctcctctcaactattcggtttcgcagcttgagagttcatcggatgctttatactctctatcgccatatcgagaagaaatgagtggagatgttggaaagactcaacagtctgcagaagccaaagagatgataaagaaggtgaaaaacgcattgaaattcatcaacgtttcaatctccaagctcaagaaaatgcagaagaagcagcggatgtcgctggtagtgtcactggtcgaggttgagaaggcagtgagggaagttcttgatgtgcttggtttgctcacgactctaagctacggtgagcttttgaaagacatgaaacaaaaggcattaacaagagcaggaatgggagaagaagaggtcttgcagaggattgaagaaaggaatatggcccggaagagcaaagatttcaggagaagcgatcggattcgagagctgttggcatttaaaggaatcttcctcgaggatgttcctggagacactgtgtggagaccttccaccccattgaccaagcctaaatctggtttaggtttaggcatgacagccatcgtttttgctatcgtttttactttcttaggcttcttcttctatagccgttga

SEQ ID NO: 97171 - protein, 489 aa, Arabidopsis thaliana
  peptide (1)..(489): Ceres Seq. ID no. 12736346
  misc_feature (1)..(489): Homolog of NCBI NO: 15228880 NR Description: cysteine-tRNA ligase-like protein; protein id:
  misc_feature (4)..(339): Homolog of NCBI NO: 9758060 NR Description: cysteine-tRNA ligase [Arabidopsis thaliana]
  misc_feature (339)..(458): Homolog of NCBI NO: 9758060 NR Description: cysteine-tRNA ligase [Arabidopsis thaliana]
  misc_feature (4)..(309): Homolog of NCBI NO: 15241557 NR Description: cysteine-tRNA ligase -like protein; protein id:
  misc_feature (339)..(458): Homolog of NCBI NO: 15241557 NR Description: cysteine-tRNA ligase -like protein; protein id:
  misc_feature (10)..(330): Homolog of NCBI NO: 25293240 NR Description: probable cysteinyl-tRNA synthetase [imported] -
  misc_feature (305)..(459): Homolog of NCBI NO: 25293240 NR Description: probable cysteinyl-tRNA synthetase [imported] -
  misc_feature (17)..(330): Homolog of NCBI NO: 18402580 NR Description: putative cysteinyl-tRNA synthetase; protein id:
  misc_feature (305)..(459): Homolog of NCBI NO: 18402580 NR Description: putative cysteinyl-tRNA synthetase; protein id:
  misc_feature (10)..(309): Homolog of NCBI NO: 37535144 NR Description: putative cysteinyl-tRNA synthetase [Oryza sativa
MSEMEVEKPDLTLYNTMTQLKEVYKPMNPGKIGIYVCGITAYDYSHIGHARAAVSFDLLYRYLRHLGYQVTYVRNFTDVDDKAKNCGEKPLDLSNRFCEEYLLDMAALQCLLPTHQPRVSDHMEQIIKMIEKIIENGCGYAVGGDVFFSVDKSPSYGQLSGQRLDHTQAGKRVAVDSRKRNPADFALRKAAKSGEPSWESPWGHGRPGWHIEFDIHGGGADLKFPHHENEIAQTCAACEDSGVNYWLHNGHVTNNNVKMGKSLNNFFTIRQIAANYHPLALRHFLMSAQYRSPLNYSVSQLESSSDALYSLSPYREEMSGDVGKTQQSAEAKEMIKKVKNALKFINVSISKLKKMQKKQRMSLVVSLVEVEKAVREVLDVLGLLTTLSYGELLKDMKQKALTRAGMGEEEVLQRIEERNMARKSKDFRRSDRIRELLAFKGIFLEDVPGDTVWRPSTPLTKPKSGLGLGMTAIVFAIVFTFLGFFFYSR

SEQ ID NO: 97172 - protein, 486 aa, Arabidopsis thaliana
  peptide (1)..(486): Ceres Seq. ID no. 12736347
  misc_feature (1)..(486): Homolog of NCBI NO: 15228880 NR Description: cysteine-tRNA ligase-like protein; protein id:
  misc_feature (1)..(336): Homolog of NCBI NO: 9758060 NR Description: cysteine-tRNA ligase [Arabidopsis thaliana]
  misc_feature (336)..(455): Homolog of NCBI NO: 9758060 NR Description: cysteine-tRNA ligase [Arabidopsis thaliana]
  misc_feature (1)..(306): Homolog of NCBI NO: 15241557 NR Description: cysteine-tRNA ligase -like protein; protein id:
  misc_feature (336)..(455): Homolog of NCBI NO: 15241557 NR Description: cysteine-tRNA ligase -like protein; protein id:
  misc_feature (7)..(327): Homolog of NCBI NO: 25293240 NR Description: probable cysteinyl-tRNA synthetase [imported] -
  misc_feature (302)..(456): Homolog of NCBI NO: 25293240 NR Description: probable cysteinyl-tRNA synthetase [imported] -
  misc_feature (14)..(327): Homolog of NCBI NO: 18402580 NR Description: putative cysteinyl-tRNA synthetase; protein id:
  misc_feature (302)..(456): Homolog of NCBI NO: 18402580 NR Description: putative cysteinyl-tRNA synthetase; protein id:
  misc_feature (7)..(306): Homolog of NCBI NO: 37535144 NR Description: putative cysteinyl-tRNA synthetase [Oryza sativa
MEVEKPDLTLYNTMTQLKEVYKPMNPGKIGIYVCGITAYDYSHIGHARAAVSFDLLYRYLRHLGYQVTYVRNFTDVDDKAKNCGEKPLDLSNRFCEEYLLDMAALQCLLPTHQPRVSDHMEQIIKMIEKIIENGCGYAVGGDVFFSVDKSPSYGQLSGQRLDHTQAGKRVAVDSRKRNPADFALRKAAKSGEPSWESPWGHGRPGWHIEFDIHGGGADLKFPHHENEIAQTCAACEDSGVNYWLHNGHVTNNNVKMGKSLNNFFTIRQIAANYHPLALRHFLMSAQYRSPLNYSVSQLESSSDALYSLSPYREEMSGDVGKTQQSAEAKEMIKKVKNALKFINVSISKLKKMQKKQRMSLVVSLVEVEKAVREVLDVLGLLTTLSYGELLKDMKQKALTRAGMGEEEVLQRIEERNMARKSKDFRRSDRIRELLAFKGIFLEDVPGDTVWRPSTPLTKPKSGLGLGMTAIVFAIVFTFLGFFFYSR

SEQ ID NO: 97173 - protein, 473 aa, Arabidopsis thaliana
  peptide (1)..(473): Ceres Seq. ID no. 12736348
  misc_feature (1)..(473): Homolog of NCBI NO: 15228880 NR Description: cysteine-tRNA ligase-like protein; protein id:
  misc_feature (1)..(323): Homolog of NCBI NO: 9758060 NR Description: cysteine-tRNA ligase [Arabidopsis thaliana]
  misc_feature (323)..(442): Homolog of NCBI NO: 9758060 NR Description: cysteine-tRNA ligase [Arabidopsis thaliana]
  misc_feature (1)..(293): Homolog of NCBI NO: 15241557 NR Description: cysteine-tRNA ligase -like protein; protein id:
  misc_feature (323)..(442): Homolog of NCBI NO: 15241557 NR Description: cysteine-tRNA ligase -like protein; protein id:
  misc_feature (1)..(314): Homolog of NCBI NO: 25293240 NR Description: probable cysteinyl-tRNA synthetase [imported] -
  misc_feature (289)..(443): Homolog of NCBI NO: 25293240 NR Description: probable cysteinyl-tRNA synthetase [imported] -
  misc_feature (1)..(314): Homolog of NCBI NO: 18402580 NR Description: putative cysteinyl-tRNA synthetase; protein id:
  misc_feature (289)..(443): Homolog of NCBI NO: 18402580 NR Description: putative cysteinyl-tRNA synthetase; protein id:
  misc_feature (1)..(293): Homolog of NCBI NO: 37535144 NR Description: putative cysteinyl-tRNA synthetase [Oryza sativa
MTQLKEVYKPMNPGKIGIYVCGITAYDYSHIGHARAAVSFDLLYRYLRHLGYQVTYVRNFTDVDDKAKNCGEKPLDLSNRFCEEYLLDMAALQCLLPTHQPRVSDHMEQIIKMIEKIIENGCGYAVGGDVFFSVDKSPSYGQLSGQRLDHTQAGKRVAVDSRKRNPADFALRKAAKSGEPSWESPWGHGRPGWHIEFDIHGGGADLKFPHHENEIAQTCAACEDSGVNYWLHNGHVTNNNVKMGKSLNNFFTIRQIAANYHPLALRHFLMSAQYRSPLNYSVSQLESSSDALYSLSPYREEMSGDVGKTQQSAEAKEMIKKVKNALKFINVSISKLKKMQKKQRMSLVVSLVEVEKAVREVLDVLGLLTTLSYGELLKDMKQKALTRAGMGEEEVLQRIEERNMARKSKDFRRSDRIRELLAFKGIFLEDVPGDTVWRPSTPLTKPKSGLGLGMTAIVFAIVFTFLGFFFYSR

SEQ ID NO: 97174 - DNA, 1305 bp, Arabidopsis thaliana
  misc_feature (1)..(1305): Ceres Seq. ID no. 12736365
  misc_feature: MA Experiment ID: 20000315 Result: Down-regulated in Transcription
  misc_feature: MA Experiment 20000315 PARAMETER Experiment Name: At_14day_Shoots-Roots_Sub_P Parameter: Age (day) Value: 14
  misc_feature: MA Experiment 20000315 PARAMETER Experiment Name: At_14day_Shoots-Roots_Sub_P Parameter: Organism Value: A. thaliana
  misc_feature: MA Experiment 20000315 PARAMETER Experiment Name: At_14day_Shoots-Roots_Sub_P Parameter: Plant Line Value: WS
  misc_feature: MA Experiment 20000315 PARAMETER Experiment Name: At_14day_Shoots-Roots_Sub_P Parameter: Tissue Value: Shoots vs. Whole Plant
  misc_feature: MA Experiment ID: 20000327 Result: Down-regulated in Transcription
  misc_feature: MA Experiment 20000327 PARAMETER Experiment Name: At_42deg_Heat_Sub_P Parameter: Age (day) Value: 14
  misc_feature: MA Experiment 20000327 PARAMETER Experiment Name: At_42deg_Heat_Sub_P Parameter: Organism Value: A. thaliana
  misc_feature: MA Experiment 20000327 PARAMETER Experiment Name: At_42deg_Heat_Sub_P Parameter: Plant Line Value: WS
  misc_feature: MA Experiment 20000327 PARAMETER Experiment Name: At_42deg_Heat_Sub_P Parameter: Temperature (deg C) Value: 42 vs. 22
  misc_feature: MA Experiment 20000327 PARAMETER Experiment Name: At_42deg_Heat_Sub_P Parameter: Timepoint (hr) Value: 1
  misc_feature: MA Experiment 20000327 PARAMETER Experiment Name: At_42deg_Heat_Sub_P Parameter: Tissue Value: Aerial
  misc_feature: MA Experiment ID: 20000328 Result: Down-regulated in Transcription
  misc_feature: MA Experiment 20000328 PARAMETER Experiment Name: At_42deg_Heat_Sub_P Parameter: Age (day) Value: 14
  misc_feature: MA Experiment 20000328 PARAMETER Experiment Name: At_42deg_Heat_Sub_P Parameter: Organism Value: A. thaliana
  misc_feature: MA Experiment 20000328 PARAMETER Experiment Name: At_42deg_Heat_Sub_P Parameter: Plant Line Value: WS
  misc_feature: MA Experiment 20000328 PARAMETER Experiment Name: At_42deg_Heat_Sub_P Parameter: Temperature (deg C) Value: 42 vs. 22
  misc_feature: MA Experiment 20000328 PARAMETER Experiment Name: At_42deg_Heat_Sub_P Parameter: Timepoint (hr) Value: 6
  misc_feature: MA Experiment 20000328 PARAMETER Experiment Name: At_42deg_Heat_Sub_P Parameter: Tissue Value: Aerial
  misc_feature: MA Experiment ID: 20000355 Result: Up-regulated in Transcription
  misc_feature: MA Experiment 20000355 PARAMETER Experiment Name: At_Siliques_Sub_P Parameter: Age (day) Value: 21
  misc_feature: MA Experiment 20000355 PARAMETER Experiment Name: At_Siliques_Sub_P Parameter: Organism Value: A. thaliana
  misc_feature: MA Experiment 20000355 PARAMETER Experiment Name: At_Siliques_Sub_P Parameter: Plant Line Value: WS
  misc_feature: MA Experiment 20000355 PARAMETER Experiment Name: At_Siliques_Sub_P Parameter: Tissue Value: Less Than 5mm Siliques vs. Whole Plant
atggtgaaaccttccgatttcaaagcagttcacaaacttattcaattgcattacagtcgagtcaacctgttcacaacgacgggatggtcaaaactctcagctttgtcttctccggctcttccttcaaatggggtttctcagcttcagcctaagtctggtttccacaccttctcgtcgagacccacttcgaaaaactttggcttatcccagattcttccctctaatggggtttctcagcttcaacctaagaccagtttccacagctttttgtcgagacccacttcgaaaaatgtgggattatcccagattttacccagtcctaagctcgtacctggtttgcagaattgtggtgtagccttggttaagccccgtgttaatatgaactttgtatcggcgtttagattgttttcgagctctggatttcgaaaagttgatgggaatttcgctagaaaggttgttgacaagccaatcaaagctgttagttcgacttttgctagataccgaatggctttagggttgcacgttgatgcattttggaagaagaataaccttttggtgtttggagcaggagctgtttttgtttgtattttcttgtggagggtcatgtttggaatcgctagtacattcgttggcctctctgagggaatggccaagtatggcttccttgctctctcatctgccattgttgcatttgctggtttataccttcgcgcaaggttcacgatcaatcccgataaagtttacaggatcactatgaggaagctcaatacagcggctgatgttcttgaagttatgggtgctcctctagcaggatcagatttgcgtgcttatgtgatgtcaggtggtggaataacattcaaaaaattcaagccaacaattaggaacaagcgttgcttcctcctattcccggttcaaggttctgagcgaaagggacttgttagtgtcgaagtcaagaagaagaaaggccagtatgatatgaaactactggcggtggatattccgatggcgtctggtcctgatcaacgcttattccttattggtgatgaagaagagtacagagtcggtggtggtttgatctctgagttaagagatcctgtggtaaaagcaatggcagcaaccaaagagtttgataatcttgacagaattgaagaggaagaagacgccgaaagagaacttcaagaagccgaaaggaaggaacgtgaagagattgaacttcaagaagccgaaaggaaggaacgtgaagaattcgaacttcaagaagcagaaagaaagcagcgtgaagaaatcgagaagcttgaaaaatag

SEQ ID NO: 97175 - protein, 434 aa, Arabidopsis thaliana
  peptide (1)..(434): Ceres Seq. ID no. 12736366
  misc_feature (1)..(434): Homolog of NCBI NO: 15228922 NR Description: putative protein; protein id: At3g56430.1
  misc_feature (69)..(409): Homolog of NCBI NO: 15226745 NR Description: unknown protein; protein id: At2g40800.1, by cDNA: gi_17473708, supported by cDNA: gi_20148506 [Arabidopsis >gi|25370574|pir||A84834 hypothetical protein At2g40800
  misc_feature (400)..(434): Homolog of NCBI NO: 15226745 NR Description: unknown protein; protein id: At2g40800.1, by cDNA: gi_17473708, supported by cDNA: gi_20148506 [Arabidopsis >gi|25370574|pir||A84834 hypothetical protein At2g40800
  misc_feature (155)..(434): Homolog of NCBI NO: 34896160 NR Description: hypothetical protein~similar to Arabidopsis
  misc_feature (1)..(83): Homolog of NCBI NO: 15226745 NR Description: unknown protein; protein id: At2g40800.1, by cDNA: gi_17473708, supported by cDNA: gi_20148506 [Arabidopsis >gi|25370574|pir||A84834 hypothetical protein At2g40800
MVKPSDFKAVHKLIQLHYSRVNLFTTTGWSKLSALSSPALPSNGVSQLQPKSGFHTFSSRPTSKNFGLSQILPSNGVSQLQPKTSFHSFLSRPTSKNVGLSQILPSPKLVPGLQNCGVALVKPRVNMNFVSAFRLFSSSGFRKVDGNFARKVVDKPIKAVSSTFARYRMALGLHVDAFWKKNNLLVFGAGAVFVCIFLWRVMFGIASTFVGLSEGMAKYGFLALSSAIVAFAGLYLRARFTINPDKVYRITMRKLNTAADVLEVMGAPLAGSDLRAYVMSGGGITFKKFKPTIRNKRCFLLFPVQGSERKGLVSVEVKKKKGQYDMKLLAVDIPMASGPDQRLFLIGDEEEYRVGGGLISELRDPVVKAMAATKEFDNLDRIEEEEDAERELQEAERKEREEIELQEAERKEREEFELQEAERKQREEIEKLEK

SEQ ID NO: 97176 - protein, 308 aa, Arabidopsis thaliana
  peptide (1)..(308): Ceres Seq. ID no. 12736367
  misc_feature (1)..(308): Homolog of NCBI NO: 15228922 NR Description: putative protein; protein id: At3g56430.1
  misc_feature (1)..(283): Homolog of NCBI NO: 15226745 NR Description: unknown protein; protein id: At2g40800.1, by cDNA: gi_17473708, supported by cDNA: gi_20148506 [Arabidopsis >gi|25370574|pir||A84834 hypothetical protein At2g40800
  misc_feature (274)..(308): Homolog of NCBI NO: 15226745 NR Description: unknown protein; protein id: At2g40800.1, by cDNA: gi_17473708, supported by cDNA: gi_20148506 [Arabidopsis >gi|25370574|pir||A84834 hypothetical protein At2g40800
  misc_feature (29)..(308): Homolog of NCBI NO: 34896160 NR Description: hypothetical protein~similar to Arabidopsis
MNFVSAFRLFSSSGFRKVDGNFARKVVDKPIKAVSSTFARYRMALGLHVDAFWKKNNLLVFGAGAVFVCIFLWRVMFGIASTFVGLSEGMAKYGFLALSSAIVAFAGLYLRARFTINPDKVYRITMRKLNTAADVLEVMGAPLAGSDLRAYVMSGGGITFKKFKPTIRNKRCFLLFPVQGSERKGLVSVEVKKKKGQYDMKLLAVDIPMASGPDQRLFLIGDEEEYRVGGGLISELRDPVVKAMAATKEFDNLDRIEEEEDAERELQEAERKEREEIELQEAERKEREEFELQEAERKQREEIEKLEK

SEQ ID NO: 97177 - protein, 266 aa, Arabidopsis thaliana
  peptide (1)..(266): Ceres Seq. ID no. 12736368
  misc_feature (1)..(266): Homolog of NCBI NO: 15228922 NR Description: putative protein; protein id: At3g56430.1
  misc_feature (1)..(241): Homolog of NCBI NO: 15226745 NR Description: unknown protein; protein id: At2g40800.1, by cDNA: gi_17473708, supported by cDNA: gi_20148506 [Arabidopsis >gi|25370574|pir||A84834 hypothetical protein At2g40800
  misc_feature (232)..(266): Homolog of NCBI NO: 15226745 NR Description: unknown protein; protein id: At2g40800.1, by cDNA: gi_17473708, supported by cDNA: gi_20148506 [Arabidopsis >gi|25370574|pir||A84834 hypothetical protein At2g40800
  misc_feature (1)..(266): Homolog of NCBI NO: 34896160 NR Description: hypothetical protein~similar to Arabidopsis
MALGLHVDAFWKKNNLLVFGAGAVFVCIFLWRVMFGIASTFVGLSEGMAKYGFLALSSAIVAFAGLYLRARFTINPDKVYRITMRKLNTAADVLEVMGAPLAGSDLRAYVMSGGGITFKKFKPTIRNKRCFLLFPVQGSERKGLVSVEVKKKKGQYDMKLLAVDIPMASGPDQRLFLIGDEEEYRVGGGLISELRDPVVKAMAATKEFDNLDRIEEEEDAERELQEAERKEREEIELQEAERKEREEFELQEAERKQREEIEKLEK

SEQ ID NO: 97178 - DNA, 1746 bp, Arabidopsis thaliana
  misc_feature (1)..(1746): Ceres Seq. ID no. 12736374
  misc_feature: MA Experiment ID: 20000307 Result: Down-regulated in Transcription
  misc_feature: MA Experiment 20000307 PARAMETER Experiment Name: At_Germinating_Seeds_Sub_P Parameter: Age (hr) Value: 24 vs. 0
  misc_feature: MA Experiment 20000307 PARAMETER Experiment Name: At_Germinating_Seeds_Sub_P Parameter: Organism Value: A. thaliana
  misc_feature: MA Experiment 20000307 PARAMETER Experiment Name: At_Germinating_Seeds_Sub_P Parameter: Plant Line Value: WS
  misc_feature: MA Experiment 20000307 PARAMETER Experiment Name: At_Germinating_Seeds_Sub_P Parameter: Tissue Value: Germinating Seeds
  misc_feature: MA Experiment ID: 20000328 Result: Down-regulated in Transcription
  misc_feature: MA Experiment 20000328 PARAMETER Experiment Name: At_42deg_Heat_Sub_P Parameter: Age (day) Value: 14
  misc_feature: MA Experiment 20000328 PARAMETER Experiment Name: At_42deg_Heat_Sub_P Parameter: Organism Value: A. thaliana
  misc_feature: MA Experiment 20000328 PARAMETER Experiment Name: At_42deg_Heat_Sub_P Parameter: Plant Line Value: WS
  misc_feature: MA Experiment 20000328 PARAMETER Experiment Name: At_42deg_Heat_Sub_P Parameter: Temperature (deg C) Value: 42 vs. 22
  misc_feature: MA Experiment 20000328 PARAMETER Experiment Name: At_42deg_Heat_Sub_P Parameter: Timepoint (hr) Value: 6
  misc_feature: MA Experiment 20000328 PARAMETER Experiment Name: At_42deg_Heat_Sub_P Parameter: Tissue Value: Aerial
atgtgcgaaaaagcgagagtgatagtgagaatgctacaaggatgcaacagtatgaagaagctccgtaagatccattctcatgtcatcatcaatggtctccaacatcatccttccatcttcaaccacctcctccgcttctgcgccgtctccgtcactggttctttatctcacgctcaacttctcttcgaccatttcgattccgatccatcaacatcggattggaactaccttattcgtggcttctccaattcttcttctcctctaaattcgattctcttctataaccgaatgcttctctcctctgtttcacgtcctgatctcttcactttcaatttcgctctcaaatcatgtgagaggattaaatcgattccgaaatgtttggagattcacggttcggttattcgatctgggtttcttgatgacgctattgttgccactagtctcgttcgttgttactctgcgaatggaagtgttgagattgcatctaaagtgttcgacgaaatgcctgttagagacttggtttcttggaacgttatgatctgttgcttttctcatgttggtttacataatcaagcgttgagtatgtacaagcgaatgggaaatgaaggtgtgtgtggtgactcttacacgctcgttgctttgttatcttcttgtgctcacgttagtgctttgaatatgggagttatgctacacaggatagcctgtgatattcgatgtgagagttgtgtctttgtgagtaatgctcttattgatatgtatgcaaaatgtggtagccttgaaaatgctattggtgtgtttaacgggatgcgaaaaagagatgtgttgacctggaactcaatgattattgggtatggagttcacgggcatggcgtagaggccatctcgttcttcagaaagatggtggcttccggggttagacccaatgccatcacattccttggattgttgttaggttgtagtcatcaaggtctagttaaagaaggagttgagcattttgaaatcatgagttcacagttccatttgactccgaacgtcaaacactatggatgcatggtggatctctatggacgagcaggtcagctagaaaactccctcgagatgatatatgcgtcttcctgccatgaggatcccgtcttgtggagaaccctgcttggctcttgcaaaatccacaggaatttggaattaggagaagtagccatgaagaaattggtgcagcttgaggctttcaatgcaggggactatgtgcttatgacttcgatatattctgcagcgaatgatgcgcaagcttttgctagtatgagaaaactaataagaagccatgatttacagacagttccaggatggagttggattgagattggtgatcaagttcacaaatttgtcgttgatgacaaaatgcatccggagtctgcagttatttactcagaactcggggaagtaatcaaccgtgccattctagctggatacaagccagaggactcaaacagaactgctcctactctctctgatcggtgtttaggatctgcagatacatctcatagtgaaaaattggctattgcatatggattaatgcgaactactgcaggaacaactctccgaatcacaaagaatctgagagtttgcagagattgtcattcgtttacaaaatatgtatcaaaagcattcaatcgggaaattattgtaagggatagagttcgatttcatcactttgcagatggtatttgttcttgcaacgactactggtga

SEQ ID NO: 97179 - protein, 581 aa, Arabidopsis thaliana
  peptide (1)..(581): Ceres Seq. ID no. 12736375
  misc_feature (174)..(208): Pfam Name: PPR repeat Pfam Description: PPR repeat
  misc_feature (6)..(581): Homolog of NCBI NO: 25346319 NR Description: hypothetical protein F23H11.3 [imported] - thaliana >gi|5080805|gb|AAD39314.1|AC007258_3 Hypothetical
  misc_feature (21)..(581): Homolog of NCBI NO: 15232821 NR Description: putative protein; protein id: At3g47530.1
  misc_feature (8)..(581): Homolog of NCBI NO: 8778758 NR Description: T30E16.32 [Arabidopsis thaliana]
  misc_feature (8)..(581): Homolog of NCBI NO: 15218900 NR Description: hypothetical protein; protein id: At1g59720.1
  misc_feature (4)..(581): Homolog of NCBI NO: 15222513 NR Description: PPR-repeat protein, putative; protein id:
  misc_feature (8)..(581): Homolog of NCBI NO: 18418348 NR Description: putative protein; protein id: At4g33990.1
  misc_feature (36)..(581): Homolog of NCBI NO: 15223099 NR Description: unknown protein; protein id: At1g08070.1 thaliana] >gi|8778839|gb|AAF79838.1|AC026875_18 T6D22.15
  misc_feature (8)..(581): Homolog of NCBI NO: 15234831 NR Description: putative protein; protein id: At4g30700.1
  misc_feature (1)..(566): Homolog of NCBI NO: 7486979 NR Description: hypothetical protein T13K14.230 - Arabidopsis
  misc_feature (16)..(581): Homolog of NCBI NO: 15232648 NR Description: putative protein; protein id: At3g46790.1
MCEKARVIVRMLQGCNSMKKLRKIHSHVIINGLQHHPSIFNHLLRFCAVSVTGSLSHAQLLFDHFDSDPSTSDWNYLIRGFSNSSSPLNSILFYNRMLLSSVSRPDLFTFNFALKSCERIKSIPKCLEIHGSVIRSGFLDDAIVATSLVRCYSANGSVEIASKVFDEMPVRDLVSWNVMICCFSHVGLHNQALSMYKRMGNEGVCGDSYTLVALLSSCAHVSALNMGVMLHRIACDIRCESCVFVSNALIDMYAKCGSLENAIGVFNGMRKRDVLTWNSMIIGYGVHGHGVEAISFFRKMVASGVRPNAITFLGLLLGCSHQGLVKEGVEHFEIMSSQFHLTPNVKHYGCMVDLYGRAGQLENSLEMIYASSCHEDPVLWRTLLGSCKIHRNLELGEVAMKKLVQLEAFNAGDYVLMTSIYSAANDAQAFASMRKLIRSHDLQTVPGWSWIEIGDQVHKFVVDDKMHPESAVIYSELGEVINRAILAGYKPEDSNRTAPTLSDRCLGSADTSHSEKLAIAYGLMRTTAGTTLRITKNLRVCRDCHSFTKYVSKAFNREIIVRDRVRFHHFADGICSCNDYW

SEQ ID NO: 97180 - protein, 571 aa, Arabidopsis thaliana
  peptide (1)..(571): Ceres Seq. ID no. 12736376
  misc_feature (164)..(198): Pfam Name: PPR repeat Pfam Description: PPR repeat
  misc_feature (1)..(571): Homolog of NCBI NO: 25346319 NR Description: hypothetical protein F23H11.3 [imported] - thaliana >gi|5080805|gb|AAD39314.1|AC007258_3 Hypothetical
  misc_feature (11)..(571): Homolog of NCBI NO: 15232821 NR Description: putative protein; protein id: At3g47530.1
  misc_feature (1)..(571): Homolog of NCBI NO: 8778758 NR Description: T30E16.32 [Arabidopsis thaliana]
  misc_feature (1)..(571): Homolog of NCBI NO: 15218900 NR Description: hypothetical protein; protein id: At1g59720.1
  misc_feature (1)..(571): Homolog of NCBI NO: 15222513 NR Description: PPR-repeat protein, putative; protein id:
  misc_feature (1)..(571): Homolog of NCBI NO: 18418348 NR Description: putative protein; protein id: At4g33990.1
  misc_feature (26)..(571): Homolog of NCBI NO: 15223099 NR Description: unknown protein; protein id: At1g08070.1 thaliana] >gi|8778839|gb|AAF79838.1|AC026875_18 T6D22.15
  misc_feature (1)..(571): Homolog of NCBI NO: 15234831 NR Description: putative protein; protein id: At4g30700.1
  misc_feature (1)..(556): Homolog of NCBI NO: 7486979 NR Description: hypothetical protein T13K14.230 - Arabidopsis
  misc_feature (6)..(571): Homolog of NCBI NO: 15232648 NR Description: putative protein; protein id: At3g46790.1
MLQGCNSMKKLRKIHSHVIINGLQHHPSIFNHLLRFCAVSVTGSLSHAQLLFDHFDSDPSTSDWNYLIRGFSNSSSPLNSILFYNRMLLSSVSRPDLFTFNFALKSCERIKSIPKCLEIHGSVIRSGFLDDAIVATSLVRCYSANGSVEIASKVFDEMPVRDLVSWNVMICCFSHVGLHNQALSMYKRMGNEGVCGDSYTLVALLSSCAHVSALNMGVMLHRIACDIRCESCVFVSNALIDMYAKCGSLENAIGVFNGMRKRDVLTWNSMIIGYGVHGHGVEAISFFRKMVASGVRPNAITFLGLLLGCSHQGLVKEGVEHFEIMSSQFHLTPNVKHYGCMVDLYGRAGQLENSLEMIYASSCHEDPVLWRTLLGSCKIHRNLELGEVAMKKLVQLEAFNAGDYVLMTSIYSAANDAQAFASMRKLIRSHDLQTVPGWSWIEIGDQVHKFVVDDKMHPESAVIYSELGEVINRAILAGYKPEDSNRTAPTLSDRCLGSADTSHSEKLAIAYGLMRTTAGTTLRITKNLRVCRDCHSFTKYVSKAFNREIIVRDRVRFHHFADGICSCNDYW

SEQ ID NO: 97181 - protein, 564 aa, Arabidopsis thaliana
  peptide (1)..(564): Ceres Seq. ID no. 12736377
  misc_feature (157)..(191): Pfam Name: PPR repeat Pfam Description: PPR repeat
  misc_feature (1)..(564): Homolog of NCBI NO: 25346319 NR Description: hypothetical protein F23H11.3 [imported] - thaliana >gi|5080805|gb|AAD39314.1|AC007258_3 Hypothetical
  misc_feature (4)..(564): Homolog of NCBI NO: 15232821 NR Description: putative protein; protein id: At3g47530.1
  misc_feature (1)..(564): Homolog of NCBI NO: 8778758 NR Description: T30E16.32 [Arabidopsis thaliana]
  misc_feature (1)..(564): Homolog of NCBI NO: 15218900 NR Description: hypothetical protein; protein id: At1g59720.1
  misc_feature (1)..(564): Homolog of NCBI NO: 15222513 NR Description: PPR-repeat protein, putative; protein id:
  misc_feature (1)..(564): Homolog of NCBI NO: 18418348 NR Description: putative protein; protein id: At4g33990.1
  misc_feature (19)..(564): Homolog of NCBI NO: 15223099 NR Description: unknown protein; protein id: At1g08070.1 thaliana] >gi|8778839|gb|AAF79838.1|AC026875_18 T6D22.15
  misc_feature (1)..(564): Homolog of NCBI NO: 15234831 NR Description: putative protein; protein id: At4g30700.1
  misc_feature (1)..(549): Homolog of NCBI NO: 7486979 NR Description: hypothetical protein T13K14.230 - Arabidopsis
  misc_feature (1)..(564): Homolog of NCBI NO: 15232648 NR Description: putative protein; protein id: At3g46790.1
MKKLRKIHSHVIINGLQHHPSIFNHLLRFCAVSVTGSLSHAQLLFDHFDSDPSTSDWNYLIRGFSNSSSPLNSILFYNRMLLSSVSRPDLFTFNFALKSCERIKSIPKCLEIHGSVIRSGFLDDAIVATSLVRCYSANGSVEIASKVFDEMPVRDLVSWNVMICCFSHVGLHNQALSMYKRMGNEGVCGDSYTLVALLSSCAHVSALNMGVMLHRIACDIRCESCVFVSNALIDMYAKCGSLENAIGVFNGMRKRDVLTWNSMIIGYGVHGHGVEAISFFRKMVASGVRPNAITFLGLLLGCSHQGLVKEGVEHFEIMSSQFHLTPNVKHYGCMVDLYGRAGQLENSLEMIYASSCHEDPVLWRTLLGSCKIHRNLELGEVAMKKLVQLEAFNAGDYVLMTSIYSAANDAQAFASMRKLIRSHDLQTVPGWSWIEIGDQVHKFVVDDKMHPESAVIYSELGEVINRAILAGYKPEDSNRTAPTLSDRCLGSADTSHSEKLAIAYGLMRTTAGTTLRITKNLRVCRDCHSFTKYVSKAFNREIIVRDRVRFHHFADGICSCNDYW

SEQ ID NO: 97182 - DNA, 1492 bp, Arabidopsis thaliana
  misc_feature (1)..(1492): Ceres Seq. ID no. 12736378
  misc_feature: MA Experiment ID: 20000180 Result: Up-regulated in Transcription
  misc_feature: MA Experiment 20000180 PARAMETER Experiment Name: At_Germinating_Seeds_P Parameter: Age (hr) Value: 24 vs. 0
  misc_feature: MA Experiment 20000180 PARAMETER Experiment Name: At_Germinating_Seeds_P Parameter: Tissue Value: Germinating Seeds
  misc_feature: MA Experiment ID: 20000185 Result: Up-regulated in Transcription
  misc_feature: MA Experiment 20000185 PARAMETER Experiment Name: At_Roots__P Parameter: Age (day) Value: 7 vs. 21
  misc_feature: MA Experiment 20000185 PARAMETER Experiment Name: At_Roots__P Parameter: Organism Value: A. thaliana
  misc_feature: MA Experiment 20000185 PARAMETER Experiment Name: At_Roots__P Parameter: Tissue Value: Roots vs. Whole Plant
cttctaccagagttgctctcttttggttcgttttcttcctccaaaatccaatcttaccacagtttctttagggtttcttcttcgtcttcctttggatctatgtgaacagtatgaactaagctctgaggtaagcttgggaagtagggatatggccaaaatctctttggtttaccaacttagcaaaaaagttagcaggagttggtgatcagttctcctaccggcttttgcaggctaataactaatacctgactgtaaaatcttccaaggtttcaaccacacagggaccttgtttctcttgttattgtaaaggatgtcaagtattcggaatactcattggtgtcacagatgtcaacgtgctgtttggcttcgagctcgagatgctgtctgttcatattgtggaggagggtttgttgaggaaatcgatataggaccgagtagagctcacagggatgttgagcgtgatccaacctttgatctcatggaagctttctcagcctttatgagaagccgtttagctgaaagaagctatgaccgagaaatcagcggaagacttggctctgcgggttctgaaagcttttcaaacttggctcctctattgatctttggtggccaagctccctttcgattggctggtggtgataatagttcagttgaagcctttgtcaatggcgcagcacctggaattggtatcgcacgtggcaccaatgccggagactatttttttggacccggtcttgaagaactgattgaacagctttcctcaggcactcatcaccgaggcccaccaccagcaccgaaatcatcaattgatgcattgccaaccatcaagatcacacagaagcatctcaagtcatcagactctcactgcccggtttgcaaagacgagttcgaactgaaatcagaagcaaaacagatgccgtgtcaccatatctatcattctgactgcattgtcccgtggctggttcagcataactcatgcccagtctgtcgtaaagagttgccatccagaggatcttcttcaagcacacagagtagtcagaacagaagcaccaatggaagagaaaacagcagaagaaggaacattttctctaacctctggccattccgctcgtctagctcaagctcgactcaaaaccgcagagacacaaacaacacagcaactgcagaagaaggccactatcatcatcaccagcagcaacagcaacaacatcaacatcaacatcaacaacaacaatcccatatgggttacagtggatggccttttgactattaaaggttaatctaactcttgactctttttaagccttctgtttcactttggttctgtgtattttgtttgtgttttgtcatgtctctctttcccttactttgttcattgtttattgtagatcttctgtttctctggtttatcaactttatgtttttattttgaattgtgtatctcacacatgttagcttgttattgaatttgcattgaataaattattgtttt

SEQ ID NO: 97183 - protein, 320 aa, Arabidopsis thaliana
  peptide (1)..(320): Ceres Seq. ID no. 12736379
  misc_feature (186)..(226): Pfam Name: Zinc finger, C3HC4 type (RING finger) Pfam Description: Zinc finger, C3HC4 type (RING finger)
  misc_feature (1)..(320): Homolog of NCBI NO: 18410530 NR Description: Expressed protein; protein id: At3g56580.1, by cDNA: gi_15028360 [Arabidopsis thaliana] unknown protein [Arabidopsis thaliana]
  misc_feature (1)..(320): Homolog of NCBI NO: 18405518 NR Description: expressed protein; protein id: At2g40830.1,
  misc_feature (1)..(281): Homolog of NCBI NO: 11358386 NR Description: hypothetical protein T5P19.230 - Arabidopsis >gi|7594536|emb|CAB88061.1| putative protein [Arabidopsis
  misc_feature (5)..(320): Homolog of NCBI NO: 34908968 NR Description: P0003D09.21 [Oryza sativa (japonica
  misc_feature (132)..(273): Homolog of NCBI NO: 11994207 NR Description: gene_id:MPN9.20~unknown protein [Arabidopsis
  misc_feature (132)..(273): Homolog of NCBI NO: 15231003 NR Description: unknown protein; protein id: At3g19950.1, by cDNA: gi_20465262 [Arabidopsis thaliana] AT3g19950/MPN9_19 [Arabidopsis thaliana]
  misc_feature (52)..(232): Homolog of NCBI NO: 37535546 NR Description: putative zinc finger protein [Oryza sativa
  misc_feature (6)..(232): Homolog of NCBI NO: 14719329 NR Description: putative RING-H2 finger protein [Oryza sativa]
  misc_feature (121)..(281): Homolog of NCBI NO: 15219060 NR Description: hypothetical protein; protein id: At1g60360.1
  misc_feature (2)..(232): Homolog of NCBI NO: 15232595 NR Description: putative protein; protein id: At3g46620.1, by cDNA: gi_20260607 [Arabidopsis thaliana]
MSSIRNTHWCHRCQRAVWLRARDAVCSYCGGGFVEEIDIGPSRAHRDVERDPTFDLMEAFSAFMRSRLAERSYDREISGRLGSAGSESFSNLAPLLIFGGQAPFRLAGGDNSSVEAFVNGAAPGIGIARGTNAGDYFFGPGLEELIEQLSSGTHHRGPPPAPKSSIDALPTIKITQKHLKSSDSHCPVCKDEFELKSEAKQMPCHHIYHSDCIVPWLVQHNSCPVCRKELPSRGSSSSTQSSQNRSTNGRENSRRRNIFSNLWPFRSSSSSSTQNRRDTNNTATAEEGHYHHHQQQQQQHQHQHQQQQSHMGYSGWPFDY

SEQ ID NO: 97184 - protein, 264 aa, Arabidopsis thaliana
  peptide (1)..(264): Ceres Seq. ID no. 12736380
  misc_feature (130)..(170): Pfam Name: Zinc finger, C3HC4 type (RING finger) Pfam Description: Zinc finger, C3HC4 type (RING finger)
  misc_feature (1)..(264): Homolog of NCBI NO: 18410530 NR Description: Expressed protein; protein id: At3g56580.1, by cDNA: gi_15028360 [Arabidopsis thaliana] unknown protein [Arabidopsis thaliana]
  misc_feature (1)..(264): Homolog of NCBI NO: 18405518 NR Description: expressed protein; protein id: At2g40830.1,
  misc_feature (1)..(225): Homolog of NCBI NO: 11358386 NR Description: hypothetical protein T5P19.230 - Arabidopsis >gi|7594536|emb|CAB88061.1| putative protein [Arabidopsis
  misc_feature (1)..(264): Homolog of NCBI NO: 34908968 NR Description: P0003D09.21 [Oryza sativa (japonica
  misc_feature (76)..(217): Homolog of NCBI NO: 11994207 NR Description: gene_id:MPN9.20~unknown protein [Arabidopsis
  misc_feature (76)..(217): Homolog of NCBI NO: 15231003 NR Description: unknown protein; protein id: At3g19950.1, by cDNA: gi_20465262 [Arabidopsis thaliana] AT3g19950/MPN9_19 [Arabidopsis thaliana]
  misc_feature (1)..(176): Homolog of NCBI NO: 37535546 NR Description: putative zinc finger protein [Oryza sativa
  misc_feature (1)..(176): Homolog of NCBI NO: 14719329 NR Description: putative RING-H2 finger protein [Oryza sativa]
  misc_feature (65)..(225): Homolog of NCBI NO: 15219060 NR Description: hypothetical protein; protein id: At1g60360.1
  misc_feature (1)..(176): Homolog of NCBI NO: 15232595 NR Description: putative protein; protein id: At3g46620.1, by cDNA: gi_20260607 [Arabidopsis thaliana]
MEAFSAFMRSRLAERSYDREISGRLGSAGSESFSNLAPLLIFGGQAPFRLAGGDNSSVEAFVNGAAPGIGIARGTNAGDYFFGPGLEELIEQLSSGTHHRGPPPAPKSSIDALPTIKITQKHLKSSDSHCPVCKDEFELKSEAKQMPCHHIYHSDCIVPWLVQHNSCPVCRKELPSRGSSSSTQSSQNRSTNGRENSRRRNIFSNLWPFRSSSSSSTQNRRDTNNTATAEEGHYHHHQQQQQQHQHQHQQQQSHMGYSGWPFDY

SEQ ID NO: 97185 - protein, 257 aa, Arabidopsis thaliana
  peptide (1)..(257): Ceres Seq. ID no. 12736381
  misc_feature (123)..(163): Pfam Name: Zinc finger, C3HC4 type (RING finger) Pfam Description: Zinc finger, C3HC4 type (RING finger)
  misc_feature (1)..(257): Homolog of NCBI NO: 18410530 NR Description: Expressed protein; protein id: At3g56580.1, by cDNA: gi_15028360 [Arabidopsis thaliana] unknown protein [Arabidopsis thaliana]
  misc_feature (1)..(257): Homolog of NCBI NO: 18405518 NR Description: expressed protein; protein id: At2g40830.1,
  misc_feature (1)..(218): Homolog of NCBI NO: 11358386 NR Description: hypothetical protein T5P19.230 - Arabidopsis >gi|7594536|emb|CAB88061.1| putative protein [Arabidopsis
  misc_feature (1)..(257): Homolog of NCBI NO: 34908968 NR Description: P0003D09.21 [Oryza sativa (japonica
  misc_feature (69)..(210): Homolog of NCBI NO: 11994207 NR Description: gene_id:MPN9.20~unknown protein [Arabidopsis
  misc_feature (69)..(210): Homolog of NCBI NO: 15231003 NR Description: unknown protein; protein id: At3g19950.1, by cDNA: gi_20465262 [Arabidopsis thaliana] AT3g19950/MPN9_19 [Arabidopsis thaliana]
  misc_feature (1)..(169): Homolog of NCBI NO: 37535546 NR Description: putative zinc finger protein [Oryza sativa
  misc_feature (1)..(169): Homolog of NCBI NO: 14719329 NR Description: putative RING-H2 finger protein [Oryza sativa]
  misc_feature (58)..(218): Homolog of NCBI NO: 15219060 NR Description: hypothetical protein; protein id: At1g60360.1
  misc_feature (1)..(169): Homolog of NCBI NO: 15232595 NR Description: putative protein; protein id: At3g46620.1, by cDNA: gi_20260607 [Arabidopsis thaliana]
MRSRLAERSYDREISGRLGSAGSESFSNLAPLLIFGGQAPFRLAGGDNSSVEAFVNGAAPGIGIARGTNAGDYFFGPGLEELIEQLSSGTHHRGPPPAPKSSIDALPTIKITQKHLKSSDSHCPVCKDEFELKSEAKQMPCHHIYHSDCIVPWLVQHNSCPVCRKELPSRGSSSSTQSSQNRSTNGRENSRRRNIFSNLWPFRSSSSSSTQNRRDTNNTATAEEGHYHHHQQQQQQHQHQHQQQQSHMGYSGWPFDY

SEQ ID NO: 97186 - DNA, 1500 bp, Arabidopsis thaliana
  misc_feature (1)..(1500): Ceres Seq. ID no. 12736394
  misc_feature: MA Experiment ID: 20000185 Result: Down-regulated in Transcription
  misc_feature: MA Experiment 20000185 PARAMETER Experiment Name: At_Roots__P Parameter: Age (day) Value: 7 vs. 21
  misc_feature: MA Experiment 20000185 PARAMETER Experiment Name: At_Roots__P Parameter: Organism Value: A. thaliana
  misc_feature: MA Experiment 20000185 PARAMETER Experiment Name: At_Roots__P Parameter: Tissue Value: Roots vs. Whole Plant
atggagcatttcatcctcatctccctcctctgtttccctatcgtcatcttcttcatcttcttccccaagaattcttcttcagaatttggtttcaagtcgtatccgatcgttggaagcttacctggtctagtgaataaccgtcaccgattcctcgactggacggtggaaactctgtctcgatgcccaacccaaacggcgatttttcggcgaccagggaagctgcagttcgtcatgacggcgaatccagctaacgtcgagtatatgctcaagacgaaattcgaaagtttccctaaaggcgaacggttcatctcgattctcgaggattttctcggccgcgggatttttaactccgacggtgagatgtggtggaaacagaggaagacggccagttatgaattcagtactaaatctctccgtgacttcgttatgagcaacgtcaccgtcgaaatcaacactaggcttgttccagtgttagcagaagctgcaaccaacggaaaattgatagatcttcaagacatattggagcggttcgcgttcgataacatctgtaaattagctttcaacgttgattcagcttgtctcggcgacgacggagcagccggtgtaaacttcatgcaggcctttgaaacggcggcgacgatcatctcgcaacggtttcagtctgtgatttcgtattcatggaagattaaaaagaaactcaacattggatcagagagagttctgagagaatcaatcatgatcgtccataaattcgcagacgagatcgtgcgtaacaggattgaacaaggaaaggtaagtgatcacaaggaagatttgctttctcggtttatcagcaaggaggagatgaattctccggagatacttcgtgatattgtcataagtttcatacttgcaggacgagacactacttcctctgctttgagctggttcttttggttgctctctatgcatccagaagtgaaagataagattctacaagagctaaactcgattcgagaacgaacagggaagcgaatcggggaagtttacgggtttgaagatcttaaactgatgaattatcttcacgcagcgataactgaatctctacgattgtatccgccagtgccagtggatacaatgagttgtgctgaggacaatgtgttgcctgatgggacatttatagggaaagattgggggataagctataacgcgtatgcgatggggaggatggagagtatttgggggaaagattgcgatcggtttgatcctgagaggtggattgatgaaacaaatggtggttttagaggtgagaatccttataagtttcctgcgtttcatgcgggaccaaggatgtgtttagggaaggagatggcttatattcagatgaaatcgatagtcgctgcggttttagagaggtttgtggttgaggttccagggaagaaggagcgtcctgagattctaatgtcggtgacacttagaatcagaggaggtttgaatgtgagagtacaagaaagatcttga

SEQ ID NO: 97187 - protein, 499 aa, Arabidopsis thaliana
  peptide (1)..(499): Ceres Seq. ID no. 12736395
  misc_feature (1)..(499): Homolog of NCBI NO: 15228981 NR Description: cytochrome P450, putative; protein id: At3g56630.1
  misc_feature (1)..(499): Homolog of NCBI NO: 15218671 NR Description: cytochrome p450, putative; protein id: [Arabidopsis thaliana] >gi|8778262|gb|AAF79271.1|AC023279_20
  misc_feature (4)..(498): Homolog of NCBI NO: 34909016 NR Description: cytochrome P450-like protein [Oryza sativa
  misc_feature (5)..(498): Homolog of NCBI NO: 34909030 NR Description: cytochrome P450-like protein [Oryza sativa
  misc_feature (5)..(498): Homolog of NCBI NO: 34909022 NR Description: cytochrome P450-like protein [Oryza sativa
  misc_feature (5)..(498): Homolog of NCBI NO: 34909018 NR Description: cytochrome P450-like protein [Oryza sativa
  misc_feature (21)..(499): Homolog of NCBI NO: 18000070 NR Description: cytochrome P450-dependent fatty acid hydroxylase
  misc_feature (6)..(499): Homolog of NCBI NO: 15228396 NR Description: cytochrome p450, putative; protein id: At3g48520.1
  misc_feature (52)..(498): Homolog of NCBI NO: 34908446 NR Description: putative cytochrome P450 [Oryza sativa (japonica group)] >gi|15290017|dbj|BAB63711.1| putative cytochrome P450
  misc_feature (15)..(499): Homolog of NCBI NO: 11249681 NR Description: cytochrome P450-like protein - Arabidopsis
MEHFILISLLCFPIVIFFIFFPKNSSSEFGFKSYPIVGSLPGLVNNRHRFLDWTVETLSRCPTQTAIFRRPGKLQFVMTANPANVEYMLKTKFESFPKGERFISILEDFLGRGIFNSDGEMWWKQRKTASYEFSTKSLRDFVMSNVTVEINTRLVPVLAEAATNGKLIDLQDILERFAFDNICKLAFNVDSACLGDDGAAGVNFMQAFETAATIISQRFQSVISYSWKIKKKLNIGSERVLRESIMIVHKFADEIVRNRIEQGKVSDHKEDLLSRFISKEEMNSPEILRDIVISFILAGRDTTSSALSWFFWLLSMHPEVKDKILQELNSIRERTGKRIGEVYGFEDLKLMNYLHAAITESLRLYPPVPVDTMSCAEDNVLPDGTFIGKDWGISYNAYAMGRMESIWGKDCDRFDPERWIDETNGGFRGENPYKFPAFHAGPRMCLGKEMAYIQMKSIVAAVLERFVVEVPGKKERPEILMSVTLRIRGGLNVRVQERS

SEQ ID NO: 97188 - protein, 422 aa, Arabidopsis thaliana
  peptide (1)..(422): Ceres Seq. ID no. 12736396
  misc_feature (1)..(422): Homolog of NCBI NO: 15228981 NR Description: cytochrome P450, putative; protein id: At3g56630.1
  misc_feature (1)..(422): Homolog of NCBI NO: 15218671 NR Description: cytochrome p450, putative; protein id: [Arabidopsis thaliana] >gi|8778262|gb|AAF79271.1|AC023279_20
  misc_feature (1)..(421): Homolog of NCBI NO: 34909016 NR Description: cytochrome P450-like protein [Oryza sativa
  misc_feature (1)..(421): Homolog of NCBI NO: 34909030 NR Description: cytochrome P450-like protein [Oryza sativa
  misc_feature (1)..(421): Homolog of NCBI NO: 34909022 NR Description: cytochrome P450-like protein [Oryza sativa
  misc_feature (1)..(421): Homolog of NCBI NO: 34909018 NR Description: cytochrome P450-like protein [Oryza sativa
  misc_feature (1)..(422): Homolog of NCBI NO: 18000070 NR Description: cytochrome P450-dependent fatty acid hydroxylase
  misc_feature (1)..(422): Homolog of NCBI NO: 15228396 NR Description: cytochrome p450, putative; protein id: At3g48520.1
  misc_feature (1)..(421): Homolog of NCBI NO: 34908446 NR Description: putative cytochrome P450 [Oryza sativa (japonica group)] >gi|15290017|dbj|BAB63711.1| putative cytochrome P450
  misc_feature (1)..(422): Homolog of NCBI NO: 11249681 NR Description: cytochrome P450-like protein - Arabidopsis
MTANPANVEYMLKTKFESFPKGERFISILEDFLGRGIFNSDGEMWWKQRKTASYEFSTKSLRDFVMSNVTVEINTRLVPVLAEAATNGKLIDLQDILERFAFDNICKLAFNVDSACLGDDGAAGVNFMQAFETAATIISQRFQSVISYSWKIKKKLNIGSERVLRESIMIVHKFADEIVRNRIEQGKVSDHKEDLLSRFISKEEMNSPEILRDIVISFILAGRDTTSSALSWFFWLLSMHPEVKDKILQELNSIRERTGKRIGEVYGFEDLKLMNYLHAAITESLRLYPPVPVDTMSCAEDNVLPDGTFIGKDWGISYNAYAMGRMESIWGKDCDRFDPERWIDETNGGFRGENPYKFPAFHAGPRMCLGKEMAYIQMKSIVAAVLERFVVEVPGKKERPEILMSVTLRIRGGLNVRVQERS

SEQ ID NO: 97189 - protein, 412 aa, Arabidopsis thaliana
  peptide (1)..(412): Ceres Seq. ID no. 12736397
  misc_feature (1)..(412): Homolog of NCBI NO: 15228981 NR Description: cytochrome P450, putative; protein id: At3g56630.1
  misc_feature (1)..(412): Homolog of NCBI NO: 15218671 NR Description: cytochrome p450, putative; protein id: [Arabidopsis thaliana] >gi|8778262|gb|AAF79271.1|AC023279_20
  misc_feature (1)..(411): Homolog of NCBI NO: 34909016 NR Description: cytochrome P450-like protein [Oryza sativa
  misc_feature (1)..(411): Homolog of NCBI NO: 34909030 NR Description: cytochrome P450-like protein [Oryza sativa
  misc_feature (1)..(411): Homolog of NCBI NO: 34909022 NR Description: cytochrome P450-like protein [Oryza sativa
  misc_feature (1)..(411): Homolog of NCBI NO: 34909018 NR Description: cytochrome P450-like protein [Oryza sativa
  misc_feature (1)..(412): Homolog of NCBI NO: 18000070 NR Description: cytochrome P450-dependent fatty acid hydroxylase
  misc_feature (1)..(412): Homolog of NCBI NO: 15228396 NR Description: cytochrome p450, putative; protein id: At3g48520.1
  misc_feature (1)..(411): Homolog of NCBI NO: 34908446 NR Description: putative cytochrome P450 [Oryza sativa (japonica group)] >gi|15290017|dbj|BAB63711.1| putative cytochrome P450
  misc_feature (1)..(412): Homolog of NCBI NO: 11249681 NR Description: cytochrome P450-like protein - Arabidopsis
MLKTKFESFPKGERFISILEDFLGRGIFNSDGEMWWKQRKTASYEFSTKSLRDFVMSNVTVEINTRLVPVLAEAATNGKLIDLQDILERFAFDNICKLAFNVDSACLGDDGAAGVNFMQAFETAATIISQRFQSVISYSWKIKKKLNIGSERVLRESIMIVHKFADEIVRNRIEQGKVSDHKEDLLSRFISKEEMNSPEILRDIVISFILAGRDTTSSALSWFFWLLSMHPEVKDKILQELNSIRERTGKRIGEVYGFEDLKLMNYLHAAITESLRLYPPVPVDTMSCAEDNVLPDGTFIGKDWGISYNAYAMGRMESIWGKDCDRFDPERWIDETNGGFRGENPYKFPAFHAGPRMCLGKEMAYIQMKSIVAAVLERFVVEVPGKKERPEILMSVTLRIRGGLNVRVQERS

SEQ ID NO: 97190 - DNA, 2370 bp, Arabidopsis thaliana
  misc_feature (1)..(2370): Ceres Seq. ID no. 12736398
  misc_feature: MA Experiment ID: 20000355 Result: Up-regulated in Transcription
  misc_feature: MA Experiment 20000355 PARAMETER Experiment Name: At_Siliques_Sub_P Parameter: Age (day) Value: 21
  misc_feature: MA Experiment 20000355 PARAMETER Experiment Name: At_Siliques_Sub_P Parameter: Organism Value: A. thaliana
  misc_feature: MA Experiment 20000355 PARAMETER Experiment Name: At_Siliques_Sub_P Parameter: Plant Line Value: WS
  misc_feature: MA Experiment 20000355 PARAMETER Experiment Name: At_Siliques_Sub_P Parameter: Tissue Value: Less Than 5mm Siliques vs. Whole Plant
atggaggccaaaccaaaaaggaggattgttacagagaatggagatacaggtgaagatttagttcttgcaacattgattggaaacggtgatgatgtaggtcctctcgttaggcatgctttcgaaatggggaggcctgagcctctcgttcatcagctcaaaaatgtggcgaggaagaaggaagctgaaattgaggatctatgcaagactcactatgaagaatttattgttgcagttgatgagcttcgtggtgtgttagttgacgctgaagagcttaagagtgatcttgcaagtgacaatttccgtttgcaagaggttggtagtgccttattggttaaactggaagagcttctcgagtcttatgcagtcaagaagaatgtaaccgaagctattaaaatgtcgaagatctgcgttcaagcactggagttgtgtgttaaatgtaatagttacatatctgaaggacagttttaccatgccctgaaaaccatggatttgattgagaagagttacctgaagcttatcccacttaaggttctaaagttggttatagagagaagaattccagtgatcaagactcacattgagaaaaaagtgtgtagccaatttaatgaatggcttgttcacattaggagttcctctaaaaatattggacagactgctattggcctcaccgcttcagctcgccagagggaagaagaaatgctggaacgtcagaggagagcagaggaacagaatacaggtggtttgggagaattggcatacactttagatgttgaagactcggaacaagactctgtattgaagtttgatctgacacctctgtatcgagcttatcacatccacactattcttggagtcccagaacggttccgtgactattactatgagaataggctactacagctccaatcagatctgcagatcacttatacacagccatttgtggaatcataccaaacatttctagcccaggttgcaggatatttcattgtggaggatcgggtgattaggacagctggagatttcttgttggctgatcaagttgagacaatgtgggaaacagccatttccaaaattgtagccatattggagaaccaatttgccagaatggattcgcctactcatctgcttttggtgaaagattatgtaactctccttggcacaacccttagacagtacggttatgaagtgggtccagttcttgatgcccttgacaagagccgagataaataccacgagcttcttcttgaagagtgtcgaaagcaaattgtgactgctattacagaggacacttatcagcagatggtaatcaagaaggaagctgactatgaaaacaatgtcttgtcgtttaatcttcagacctcagacattatgccggctttcacttacattgcgcccttctcttctatggtgccagatgtttgccgcatcatcaggtcatacataaaaggatctgttgattacttgtcctatggagtgaacactaattttttcagtgttctgaggaagtacctcgacaaaatcttgattgatgtattgaacgaagttatcctcgagacgattagcaacaattcaattggtgtatctcaagctatgcagattgcagcaaacatatctttcctcgaaaaggccagtgattattttctccgacatgcagctcaactttgtggcatcccaagccgatcagttgagaggcctcaagctagtttagctgcaaaggttgtcctcaaaacatcaagagacgcagcctatcttgctttgttgaatgtggttaacaccaagttggacgagttcatgaagctcacagaaaatgttaactggactacagaggaaatgccacaagggccgcacgagtacataaacgaggttgttatatacctcgagactgttatgtcaacggcacaacagatcctcccaatggatgccttatacaaagttggagttggggctatcgaacatatctcaaactccatcgtctctacattcctcagcgatagcatcaagagattcaatgctaatgcagtctcggccattaaccacgatctgagagtgatagaaaactttgctgatgagagatatcactcaagcgggttaaatgagatctacaaagaaggaagctttagaagctatctggttgaagctaggcagttgataaacctgttgtcgagtagccaacccgagaacttcatgaacccggtgattagagagaggaactacaacactttggattacaagaaagtggctacgatctgcgagaagtttaaggattctgcagacgggatattcggaagcctggctaatagaaacacaaagctgacagccaagaagaaatcgatggacatgctcaagaagagactcaaggaatttaactga

SEQ ID NO: 97191 - protein, 789 aa, Arabidopsis thaliana
  peptide (1)..(789): Ceres Seq. ID no. 12736399
  misc_feature (441)..(789): Pfam Name: Exocyst complex subunit Sec15-like Pfam Description: Exocyst complex subunit Sec15-like
  misc_feature (1)..(789): Homolog of NCBI NO: 34902596 NR Description: Unknown protein [Oryza sativa (japonica
  misc_feature (1)..(789): Homolog of NCBI NO: 37534338 NR Description: unknown protein [Oryza sativa (japonica
  misc_feature (19)..(787): Homolog of NCBI NO: 34895194 NR Description: B1051E10.38 [Oryza sativa (japonica
  misc_feature (323)..(787): Homolog of NCBI NO: 18411920 NR Description: hypothetical protein; protein id: At4g02350.1
  misc_feature (18)..(417): Homolog of NCBI NO: 18411920 NR Description: hypothetical protein; protein id: At4g02350.1
  misc_feature (30)..(786): Homolog of NCBI NO: 21355951 NR Description: CG7034-PA [Drosophila melanogaster]
  misc_feature (255)..(786): Homolog of NCBI NO: 37546939 NR Description: similar to KIAA0919 protein [Homo sapiens]
  misc_feature (32)..(264): Homolog of NCBI NO: 37546939 NR Description: similar to KIAA0919 protein [Homo sapiens]
  misc_feature (32)..(786): Homolog of NCBI NO: 24418668 NR Description: Exocyst complex component Sec15A
  misc_feature (49)..(786): Homolog of NCBI NO: 28202021 NR Description: expressed sequence AW413330 [Mus musculus]
MEAKPKRRIVTENGDTGEDLVLATLIGNGDDVGPLVRHAFEMGRPEPLVHQLKNVARKKEAEIEDLCKTHYEEFIVAVDELRGVLVDAEELKSDLASDNFRLQEVGSALLVKLEELLESYAVKKNVTEAIKMSKICVQALELCVKCNSYISEGQFYHALKTMDLIEKSYLKLIPLKVLKLVIERRIPVIKTHIEKKVCSQFNEWLVHIRSSSKNIGQTAIGLTASARQREEEMLERQRRAEEQNTGGLGELAYTLDVEDSEQDSVLKFDLTPLYRAYHIHTILGVPERFRDYYYENRLLQLQSDLQITYTQPFVESYQTFLAQVAGYFIVEDRVIRTAGDFLLADQVETMWETAISKIVAILENQFARMDSPTHLLLVKDYVTLLGTTLRQYGYEVGPVLDALDKSRDKYHELLLEECRKQIVTAITEDTYQQMVIKKEADYENNVLSFNLQTSDIMPAFTYIAPFSSMVPDVCRIIRSYIKGSVDYLSYGVNTNFFSVLRKYLDKILIDVLNEVILETISNNSIGVSQAMQIAANISFLEKASDYFLRHAAQLCGIPSRSVERPQASLAAKVVLKTSRDAAYLALLNVVNTKLDEFMKLTENVNWTTEEMPQGPHEYINEVVIYLETVMSTAQQILPMDALYKVGVGAIEHISNSIVSTFLSDSIKRFNANAVSAINHDLRVIENFADERYHSSGLNEIYKEGSFRSYLVEARQLINLLSSSQPENFMNPVIRERNYNTLDYKKVATICEKFKDSADGIFGSLANRNTKLTAKKKSMDMLKKRLKEFN

SEQ ID NO: 97192 - protein, 748 aa, Arabidopsis thaliana
  peptide (1)..(748): Ceres Seq. ID no. 12736400
  misc_feature (400)..(748): Pfam Name: Exocyst complex subunit Sec15-like Pfam Description: Exocyst complex subunit Sec15-like
  misc_feature (1)..(748): Homolog of NCBI NO: 34902596 NR Description: Unknown protein [Oryza sativa (japonica
  misc_feature (1)..(748): Homolog of NCBI NO: 37534338 NR Description: unknown protein [Oryza sativa (japonica
  misc_feature (1)..(746): Homolog of NCBI NO: 34895194 NR Description: B1051E10.38 [Oryza sativa (japonica
  misc_feature (282)..(746): Homolog of NCBI NO: 18411920 NR Description: hypothetical protein; protein id: At4g02350.1
  misc_feature (1)..(376): Homolog of NCBI NO: 18411920 NR Description: hypothetical protein; protein id: At4g02350.1
  misc_feature (1)..(745): Homolog of NCBI NO: 21355951 NR Description: CG7034-PA [Drosophila melanogaster]
  misc_feature (214)..(745): Homolog of NCBI NO: 37546939 NR Description: similar to KIAA0919 protein [Homo sapiens]
  misc_feature (1)..(223): Homolog of NCBI NO: 37546939 NR Description: similar to KIAA0919 protein [Homo sapiens]
  misc_feature (1)..(745): Homolog of NCBI NO: 24418668 NR Description: Exocyst complex component Sec15A
  misc_feature (8)..(745): Homolog of NCBI NO: 28202021 NR Description: expressed sequence AW413330 [Mus musculus]
MGRPEPLVHQLKNVARKKEAEIEDLCKTHYEEFIVAVDELRGVLVDAEELKSDLASDNFRLQEVGSALLVKLEELLESYAVKKNVTEAIKMSKICVQALELCVKCNSYISEGQFYHALKTMDLIEKSYLKLIPLKVLKLVIERRIPVIKTHIEKKVCSQFNEWLVHIRSSSKNIGQTAIGLTASARQREEEMLERQRRAEEQNTGGLGELAYTLDVEDSEQDSVLKFDLTPLYRAYHIHTILGVPERFRDYYYENRLLQLQSDLQITYTQPFVESYQTFLAQVAGYFIVEDRVIRTAGDFLLADQVETMWETAISKIVAILENQFARMDSPTHLLLVKDYVTLLGTTLRQYGYEVGPVLDALDKSRDKYHELLLEECRKQIVTAITEDTYQQMVIKKEADYENNVLSFNLQTSDIMPAFTYIAPFSSMVPDVCRIIRSYIKGSVDYLSYGVNTNFFSVLRKYLDKILIDVLNEVILETISNNSIGVSQAMQIAANISFLEKASDYFLRHAAQLCGIPSRSVERPQASLAAKVVLKTSRDAAYLALLNVVNTKLDEFMKLTENVNWTTEEMPQGPHEYINEVVIYLETVMSTAQQILPMDALYKVGVGAIEHISNSIVSTFLSDSIKRFNANAVSAINHDLRVIENFADERYHSSGLNEIYKEGSFRSYLVEARQLINLLSSSQPENFMNPVIRERNYNTLDYKKVATICEKFKDSADGIFGSLANRNTKLTAKKKSMDMLKKRLKEFN

SEQ ID NO: 97193 - protein, 658 aa, Arabidopsis thaliana
  peptide (1)..(658): Ceres Seq. ID no. 12736401
  misc_feature (310)..(658): Pfam Name: Exocyst complex subunit Sec15-like Pfam Description: Exocyst complex subunit Sec15-like
  misc_feature (1)..(658): Homolog of NCBI NO: 34902596 NR Description: Unknown protein [Oryza sativa (japonica
  misc_feature (1)..(658): Homolog of NCBI NO: 37534338 NR Description: unknown protein [Oryza sativa (japonica
  misc_feature (1)..(656): Homolog of NCBI NO: 34895194 NR Description: B1051E10.38 [Oryza sativa (japonica
  misc_feature (192)..(656): Homolog of NCBI NO: 18411920 NR Description: hypothetical protein; protein id: At4g02350.1
  misc_feature (1)..(286): Homolog of NCBI NO: 18411920 NR Description: hypothetical protein; protein id: At4g02350.1
  misc_feature (1)..(655): Homolog of NCBI NO: 21355951 NR Description: CG7034-PA [Drosophila melanogaster]
  misc_feature (124)..(655): Homolog of NCBI NO: 37546939 NR Description: similar to KIAA0919 protein [Homo sapiens]
  misc_feature (1)..(133): Homolog of NCBI NO: 37546939 NR Description: similar to KIAA0919 protein [Homo sapiens]
  misc_feature (1)..(655): Homolog of NCBI NO: 24418668 NR Description: Exocyst complex component Sec15A
  misc_feature (1)..(655): Homolog of NCBI NO: 28202021 NR Description: expressed sequence AW413330 [Mus musculus]
MSKICVQALELCVKCNSYISEGQFYHALKTMDLIEKSYLKLIPLKVLKLVIERRIPVIKTHIEKKVCSQFNEWLVHIRSSSKNIGQTAIGLTASARQREEEMLERQRRAEEQNTGGLGELAYTLDVEDSEQDSVLKFDLTPLYRAYHIHTILGVPERFRDYYYENRLLQLQSDLQITYTQPFVESYQTFLAQVAGYFIVEDRVIRTAGDFLLADQVETMWETAISKIVAILENQFARMDSPTHLLLVKDYVTLLGTTLRQYGYEVGPVLDALDKSRDKYHELLLEECRKQIVTAITEDTYQQMVIKKEADYENNVLSFNLQTSDIMPAFTYIAPFSSMVPDVCRIIRSYIKGSVDYLSYGVNTNFFSVLRKYLDKILIDVLNEVILETISNNSIGVSQAMQIAANISFLEKASDYFLRHAAQLCGIPSRSVERPQASLAAKVVLKTSRDAAYLALLNVVNTKLDEFMKLTENVNWTTEEMPQGPHEYINEVVIYLETVMSTAQQILPMDALYKVGVGAIEHISNSIVSTFLSDSIKRFNANAVSAINHDLRVIENFADERYHSSGLNEIYKEGSFRSYLVEARQLINLLSSSQPENFMNPVIRERNYNTLDYKKVATICEKFKDSADGIFGSLANRNTKLTAKKKSMDMLKKRLKEFN

SEQ ID NO: 97194 - DNA, 3405 bp, Arabidopsis thaliana
  misc_feature (1)..(3405): Ceres Seq. ID no. 12736406
  misc_feature: MA Experiment ID: 20000180 Result: Down-regulated in Transcription
  misc_feature: MA Experiment 20000180 PARAMETER Experiment Name: At_Germinating_Seeds_P Parameter: Age (hr) Value: 24 vs. 0
  misc_feature: MA Experiment 20000180 PARAMETER Experiment Name: At_Germinating_Seeds_P Parameter: Tissue Value: Germinating Seeds
  misc_feature: MA Experiment ID: 20000184 Result: Down-regulated in Transcription
  misc_feature: MA Experiment 20000184 PARAMETER Experiment Name: At_Shoots__P Parameter: Age (day) Value: 7
  misc_feature: MA Experiment 20000184 PARAMETER Experiment Name: At_Shoots__P Parameter: Tissue Value: Shoots vs. Whole Plant
atttctcaaacccaattaaaccctaagagaaattgaagatttttcatttcggctctttatctccggcgaggatcgccggcgttctgtaacttatttatactcactggggtctgggaacaagggttgctttttactccggagtgtagattaacaaaaagctaaagatgccttcgaagaagaagcagtcgaggacgccatcacggctatccaattcggaaccgcctgcatctccaagaactccggcgtcttcaacaactagtcgagatacagattctatcaacgaagaagagcttaggcgcagtattgaagaagcgtctgctgcgtttccttgtcttctcggaaaatctgcaatcatcgcaagagtagccgatgttgcatcagaatctatcagaggctctaagatttggctatcggaaacttctatggtcgctgcttctctcagccctggctccactgtatcggtatcactagcttctccggagagtagattttcgagaagcttcccactcagctcgattaaagctgaatatggagatgacagtgagagtatcattgctgatgaaccaggaaactattttgtgcttaccaccgttttctcttcttcaaaggttttcaaagatgctgttcgaatttcattgaatctttgctatgggcttggttgtcctgtttcaggcaggactgtttttgtttatcctgttagcggaccttctttaagtgatcaattcaacgggaatggtagatctcgctatgatgatgttaaccatctatcgctgcttgcctgcaaagagttgtgtttagagttgactcccttcaggaatatgttacaagctaagaatgcttttgaaagttcttacgagcagaacggaaatgggaattcaactcctaagacaccagcaaacttgcaaaagtttagttctcctcgccccaaatctccggtttcaccaatcatagaggactctgttttcagttgcaagcagcggttttcatctgaaagctcgattgatctacgagaggtgttgagcaatgaaagttcgaaaaaacttttgcagatttgtgcaagttcgtggctttacccttgtagcctgctatatgggaattttgtgtctgtgccaattctctcagaaatctgtatattctgcgtcaaaagagctgataaaaggccatctgacacatccaacagaaatcatgcttttatgatcaatcaggaaactaaagtctacctccatcatacattagacttagcatctgaaattcaagggagaacatttgtacaaggtctgcaatttgatgaaggagaaaatgtgggatgtgaaatctcaaagttaggtggtctctctaaagaatatgcaattttaagggacatcattgattcttcgtccataaagaattccttatcaagtcttggtttgcgacctaccaagggagtgcttattcatggacctccaggcacaggaaaaacatctttggctcgaacctttgcccgccattctggtgtcaactttttctctgtgaatggaccagagattataagccagtatttgggtgaaagcgagaaagctctagatgaggttttcagatctgctagcaatgctacaccagctgtggtgttcattgatgacttggatgccattgctcctgctcggaaagaaggaggcgaagaattgtctcagaggatggtagctacattactgaatttaatggatggaataagtaggacggatggcgttgttgtaattgctgcaaccaataggcctgatagcattgagcccgcccttagacggccaggaagacttgacagggaaattgaaattggtgtaccatcttctacacaacggtccgatatacttcacataattctccgtgggatgcggcattcactttcaaacatccaggttgaacagcttgctatggcaacccatggttttgttggtgcagatctgtctgcactgtgttgtgaggcagcctttgtctgcttaaggcggcatcttgatcagagttcctcttctagcaatttgccccttgaagaagcacctattgctgagtcctcgtcaaatatgtcagacatatcatctgatagttcggattctgcatcgtcatgtatcacaatttcagccacaacttcaggggctcagcgttcatttagtttggatgagacagtttccctagtagcggatgatattcaaaacaatggcaactcttgttctgaacagatgcttagaaaacaaggagaacataccttaagtgttggatttgaagattttgaaaatgctaagaccaaaatcagacctagtgccatgcgagaggtgatattagaggttcctaaagttaactgggaagatgttggtggccaaaatgaggtgaaaaatcagctaatggaagcagtagaatggcctcaaaaacatcaggacgcattcaagagaataggtacaaggccaccaagtgggatactgatgtttggtcctcctggatgtagcaagacccttatggcacgtgcagtagcttctgaagccaagctgaattttcttgctgtcaaaggtccagaactattcagcaaatgggttggtgaatccgaaaaggctgttaggtccctattcgcaaaggcaagagcaaatgccccctccattatctttttcgatgagatagatagtcttgcctccattagggggaaagaaaatgatggggtgtcagtttcagacagagttatgagccaacttcttgtggagctcgatggtttgcatcaaagagttggtgttaccgtcattgctgctacaaaccggccagacaagatcgattctgccctactaagacctgggcgctttgatcgcttgctatatgtcggacctcctaatgaaactgatcgcgaagcaatactcaaaatccatttgcgtaaaatcccatgcagctctgatatttgtttaaaggaattggcttccattaccaaaggctatacaggagctgacatatcattgatatgcagagaagcagctattgctgcacttgaggagagtcttgaaatggaggaaataagcatgcgacatttaaaagctgcgattagccaaatcgaaccaacagagattctgtcttacaaagcactgtctgaaaaattccaaagacttgtccatacagacccacaaagagaagaggaggttacacaaccaggaaacaaaagccgatctctatggacaccattgagatcagttgccatgtttcttcgccgccacattgcttcgtaaacaaatgttgaaaccagcaaactttggaaattctccatcactaacgtacgtattgtgtttgtttaaactagatattgtttttttgttgcgtctcacagacttgtacgaatcaacggaacaaataacatgaatgtaaagatttggaaggctgattatttatcttgtgtaatgc

SEQ ID NO: 97195 - protein, 1022 aa, Arabidopsis thaliana
  peptide (1)..(1022): Ceres Seq. ID no. 12736407
  misc_feature (760)..(946): Pfam Name: ATPase family associated with various cellular Pfam Description: ATPase family associated with various cellular
  misc_feature (694)..(995): Homolog of NCBI NO: 14602090 NR Description: transitional endoplasmic reticulum ATPase pernix] >gi|7435761|pir||B72479 probable transitional endoplasmic
  misc_feature (387)..(620): Homolog of NCBI NO: 14602090 NR Description: transitional endoplasmic reticulum ATPase pernix] >gi|7435761|pir||B72479 probable transitional endoplasmic
  misc_feature (692)..(984): Homolog of NCBI NO: 14601365 NR Description: transitional endoplasmic reticulum ATPase pernix] >gi|7435760|pir||D72613 probable transitional endoplasmic
  misc_feature (387)..(623): Homolog of NCBI NO: 14601365 NR Description: transitional endoplasmic reticulum ATPase pernix] >gi|7435760|pir||D72613 probable transitional endoplasmic
  misc_feature (698)..(968): Homolog of NCBI NO: 15679634 NR Description: cell division control protein Cdc48 thermautotrophicus] >gi|7435751|pir||A69086 cell division control
  misc_feature (387)..(620): Homolog of NCBI NO: 15679634 NR Description: cell division control protein Cdc48 thermautotrophicus] >gi|7435751|pir||A69086 cell division control
  misc_feature (692)..(992): Homolog of NCBI NO: 15669345 NR Description: cell division control protein 48 (cdc48), AAA [Methanococcus jannaschii] >gi|2492505|sp|Q58556|YB56_METJA Cell cycle protein 48 homolog MJ1156 >gi|2118117|pir||C64444 cell
  misc_feature (387)..(650): Homolog of NCBI NO: 15669345 NR Description: cell division control protein 48 (cdc48), AAA [Methanococcus jannaschii] >gi|2492505|sp|Q58556|YB56_METJA Cell cycle protein 48 homolog MJ1156 >gi|2118117|pir||C64444 cell
  misc_feature (697)..(969): Homolog of NCBI NO: 1168858 NR Description: CdcH protein >gi|629399|pir||S47018 cdcH protein Halobacterium salinarum >gi|517390|emb|CAA56097.1| cdcH
  misc_feature (697)..(969): Homolog of NCBI NO: 15790615 NR Description: cell division cycle protein; Cdc48c sp. NRC- 1] >gi|12229754|sp|Q9HPF0|CDCH_HALN1 CdcH protein
MPSKKKQSRTPSRLSNSEPPASPRTPASSTTSRDTDSINEEELRRSIEEASAAFPCLLGKSAIIARVADVASESIRGSKIWLSETSMVAASLSPGSTVSVSLASPESRFSRSFPLSSIKAEYGDDSESIIADEPGNYFVLTTVFSSSKVFKDAVRISLNLCYGLGCPVSGRTVFVYPVSGPSLSDQFNGNGRSRYDDVNHLSLLACKELCLELTPFRNMLQAKNAFESSYEQNGNGNSTPKTPANLQKFSSPRPKSPVSPIIEDSVFSCKQRFSSESSIDLREVLSNESSKKLLQICASSWLYPCSLLYGNFVSVPILSEICIFCVKRADKRPSDTSNRNHAFMINQETKVYLHHTLDLASEIQGRTFVQGLQFDEGENVGCEISKLGGLSKEYAILRDIIDSSSIKNSLSSLGLRPTKGVLIHGPPGTGKTSLARTFARHSGVNFFSVNGPEIISQYLGESEKALDEVFRSASNATPAVVFIDDLDAIAPARKEGGEELSQRMVATLLNLMDGISRTDGVVVIAATNRPDSIEPALRRPGRLDREIEIGVPSSTQRSDILHIILRGMRHSLSNIQVEQLAMATHGFVGADLSALCCEAAFVCLRRHLDQSSSSSNLPLEEAPIAESSSNMSDISSDSSDSASSCITISATTSGAQRSFSLDETVSLVADDIQNNGNSCSEQMLRKQGEHTLSVGFEDFENAKTKIRPSAMREVILEVPKVNWEDVGGQNEVKNQLMEAVEWPQKHQDAFKRIGTRPPSGILMFGPPGCSKTLMARAVASEAKLNFLAVKGPELFSKWVGESEKAVRSLFAKARANAPSIIFFDEIDSLASIRGKENDGVSVSDRVMSQLLVELDGLHQRVGVTVIAATNRPDKIDSALLRPGRFDRLLYVGPPNETDREAILKIHLRKIPCSSDICLKELASITKGYTGADISLICREAAIAALEESLEMEEISMRHLKAAISQIEPTEILSYKALSEKFQRLVHTDPQREEEVTQPGNKSRSLWTPLRSVAMFLRRHIAS

SEQ ID NO: 97196 - protein, 936 aa, Arabidopsis thaliana
  peptide (1)..(936): Ceres Seq. ID no. 12736408
  misc_feature (674)..(860): Pfam Name: ATPase family associated with various cellular Pfam Description: ATPase family associated with various cellular
  misc_feature (608)..(909): Homolog of NCBI NO: 14602090 NR Description: transitional endoplasmic reticulum ATPase pernix] >gi|7435761|pir||B72479 probable transitional endoplasmic
  misc_feature (301)..(534): Homolog of NCBI NO: 14602090 NR Description: transitional endoplasmic reticulum ATPase pernix] >gi|7435761|pir||B72479 probable transitional endoplasmic
  misc_feature (606)..(898): Homolog of NCBI NO: 14601365 NR Description: transitional endoplasmic reticulum ATPase pernix] >gi|7435760|pir||D72613 probable transitional endoplasmic
  misc_feature (301)..(537): Homolog of NCBI NO: 14601365 NR Description: transitional endoplasmic reticulum ATPase pernix] >gi|7435760|pir||D72613 probable transitional endoplasmic
  misc_feature (612)..(882): Homolog of NCBI NO: 15679634 NR Description: cell division control protein Cdc48 thermautotrophicus] >gi|7435751|pir||A69086 cell division control
  misc_feature (301)..(534): Homolog of NCBI NO: 15679634 NR Description: cell division control protein Cdc48 thermautotrophicus] >gi|7435751|pir||A69086 cell division control
  misc_feature (606)..(906): Homolog of NCBI NO: 15669345 NR Description: cell division control protein 48 (cdc48), AAA [Methanococcus jannaschii] >gi|2492505|sp|Q58556|YB56_METJA Cell cycle protein 48 homolog MJ1156 >gi|2118117|pir||C64444 cell
  misc_feature (301)..(564): Homolog of NCBI NO: 15669345 NR Description: cell division control protein 48 (cdc48), AAA [Methanococcus jannaschii] >gi|2492505|sp|Q58556|YB56_METJA Cell cycle protein 48 homolog MJ1156 >gi|2118117|pir||C64444 cell
  misc_feature (611)..(883): Homolog of NCBI NO: 1168858 NR Description: CdcH protein >gi|629399|pir||S47018 cdcH protein Halobacterium salinarum >gi|517390|emb|CAA56097.1| cdcH
  misc_feature (611)..(883): Homolog of NCBI NO: 15790615 NR Description: cell division cycle protein; Cdc48c sp. NRC- 1] >gi|12229754|sp|Q9HPF0|CDCH_HALN1 CdcH protein
MVAASLSPGSTVSVSLASPESRFSRSFPLSSIKAEYGDDSESIIADEPGNYFVLTTVFSSSKVFKDAVRISLNLCYGLGCPVSGRTVFVYPVSGPSLSDQFNGNGRSRYDDVNHLSLLACKELCLELTPFRNMLQAKNAFESSYEQNGNGNSTPKTPANLQKFSSPRPKSPVSPIIEDSVFSCKQRFSSESSIDLREVLSNESSKKLLQICASSWLYPCSLLYGNFVSVPILSEICIFCVKRADKRPSDTSNRNHAFMINQETKVYLHHTLDLASEIQGRTFVQGLQFDEGENVGCEISKLGGLSKEYAILRDIIDSSSIKNSLSSLGLRPTKGVLIHGPPGTGKTSLARTFARHSGVNFFSVNGPEIISQYLGESEKALDEVFRSASNATPAVVFIDDLDAIAPARKEGGEELSQRMVATLLNLMDGISRTDGVVVIAATNRPDSIEPALRRPGRLDREIEIGVPSSTQRSDILHIILRGMRHSLSNIQVEQLAMATHGFVGADLSALCCEAAFVCLRRHLDQSSSSSNLPLEEAPIAESSSNMSDISSDSSDSASSCITISATTSGAQRSFSLDETVSLVADDIQNNGNSCSEQMLRKQGEHTLSVGFEDFENAKTKIRPSAMREVILEVPKVNWEDVGGQNEVKNQLMEAVEWPQKHQDAFKRIGTRPPSGILMFGPPGCSKTLMARAVASEAKLNFLAVKGPELFSKWVGESEKAVRSLFAKARANAPSIIFFDEIDSLASIRGKENDGVSVSDRVMSQLLVELDGLHQRVGVTVIAATNRPDKIDSALLRPGRFDRLLYVGPPNETDREAILKIHLRKIPCSSDICLKELASITKGYTGADISLICREAAIAALEESLEMEEISMRHLKAAISQIEPTEILSYKALSEKFQRLVHTDPQREEEVTQPGNKSRSLWTPLRSVAMFLRRHIAS

SEQ ID NO: 97197 - protein, 804 aa, Arabidopsis thaliana
  peptide (1)..(804): Ceres Seq. ID no. 12736409
  misc_feature (542)..(728): Pfam Name: ATPase family associated with various cellular Pfam Description: ATPase family associated with various cellular
  misc_feature (476)..(777): Homolog of NCBI NO: 14602090 NR Description: transitional endoplasmic reticulum ATPase pernix] >gi|7435761|pir||B72479 probable transitional endoplasmic
  misc_feature (169)..(402): Homolog of NCBI NO: 14602090 NR Description: transitional endoplasmic reticulum ATPase pernix] >gi|7435761|pir||B72479 probable transitional endoplasmic
  misc_feature (474)..(766): Homolog of NCBI NO: 14601365 NR Description: transitional endoplasmic reticulum ATPase pernix] >gi|7435760|pir||D72613 probable transitional endoplasmic
  misc_feature (169)..(405): Homolog of NCBI NO: 14601365 NR Description: transitional endoplasmic reticulum ATPase pernix] >gi|7435760|pir||D72613 probable transitional endoplasmic
  misc_feature (480)..(750): Homolog of NCBI NO: 15679634 NR Description: cell division control protein Cdc48 thermautotrophicus] >gi|7435751|pir||A69086 cell division control
  misc_feature (169)..(402): Homolog of NCBI NO: 15679634 NR Description: cell division control protein Cdc48 thermautotrophicus] >gi|7435751|pir||A69086 cell division control
  misc_feature (474)..(774): Homolog of NCBI NO: 15669345 NR Description: cell division control protein 48 (cdc48), AAA [Methanococcus jannaschii] >gi|2492505|sp|Q58556|YB56_METJA Cell cycle protein 48 homolog MJ1156 >gi|2118117|pir||C64444 cell
  misc_feature (169)..(432): Homolog of NCBI NO: 15669345 NR Description: cell division control protein 48 (cdc48), AAA [Methanococcus jannaschii] >gi|2492505|sp|Q58556|YB56_METJA Cell cycle protein 48 homolog MJ1156 >gi|2118117|pir||C64444 cell
  misc_feature (479)..(751): Homolog of NCBI NO: 1168858 NR Description: CdcH protein >gi|629399|pir||S47018 cdcH protein Halobacterium salinarum >gi|517390|emb|CAA56097.1| cdcH
  misc_feature (479)..(751): Homolog of NCBI NO: 15790615 NR Description: cell division cycle protein; Cdc48c sp. NRC- 1] >gi|12229754|sp|Q9HPF0|CDCH_HALN1 CdcH protein
MLQAKNAFESSYEQNGNGNSTPKTPANLQKFSSPRPKSPVSPIIEDSVFSCKQRFSSESSIDLREVLSNESSKKLLQICASSWLYPCSLLYGNFVSVPILSEICIFCVKRADKRPSDTSNRNHAFMINQETKVYLHHTLDLASEIQGRTFVQGLQFDEGENVGCEISKLGGLSKEYAILRDIIDSSSIKNSLSSLGLRPTKGVLIHGPPGTGKTSLARTFARHSGVNFFSVNGPEIISQYLGESEKALDEVFRSASNATPAVVFIDDLDAIAPARKEGGEELSQRMVATLLNLMDGISRTDGVVVIAATNRPDSIEPALRRPGRLDREIEIGVPSSTQRSDILHIILRGMRHSLSNIQVEQLAMATHGFVGADLSALCCEAAFVCLRRHLDQSSSSSNLPLEEAPIAESSSNMSDISSDSSDSASSCITISATTSGAQRSFSLDETVSLVADDIQNNGNSCSEQMLRKQGEHTLSVGFEDFENAKTKIRPSAMREVILEVPKVNWEDVGGQNEVKNQLMEAVEWPQKHQDAFKRIGTRPPSGILMFGPPGCSKTLMARAVASEAKLNFLAVKGPELFSKWVGESEKAVRSLFAKARANAPSIIFFDEIDSLASIRGKENDGVSVSDRVMSQLLVELDGLHQRVGVTVIAATNRPDKIDSALLRPGRFDRLLYVGPPNETDREAILKIHLRKIPCSSDICLKELASITKGYTGADISLICREAAIAALEESLEMEEISMRHLKAAISQIEPTEILSYKALSEKFQRLVHTDPQREEEVTQPGNKSRSLWTPLRSVAMFLRRHIAS

SEQ ID NO: 97198 - DNA, 1734 bp, Arabidopsis thaliana
  misc_feature (1)..(1734): Ceres Seq. ID no. 12736413
  misc_feature: MA Experiment ID: 20000314 Result: Up-regulated in Transcription
  misc_feature: MA Experiment 20000314 PARAMETER Experiment Name: At_14day_Shoots-Roots_Sub_P Parameter: Age (day) Value: 14
  misc_feature: MA Experiment 20000314 PARAMETER Experiment Name: At_14day_Shoots-Roots_Sub_P Parameter: Organism Value: A. thaliana
  misc_feature: MA Experiment 20000314 PARAMETER Experiment Name: At_14day_Shoots-Roots_Sub_P Parameter: Plant Line Value: WS
  misc_feature: MA Experiment 20000314 PARAMETER Experiment Name: At_14day_Shoots-Roots_Sub_P Parameter: Tissue Value: Roots vs. Whole Plant
atggggctgtgtcatgggaaacctatcgaacaacaatcgaagaatctcccaatctccaatgaaatcgaagagacacctaagaattcatctcagaaggcgaaatcttcaggctttccgttttatagtccaagccctttacctagtctcttcaaaacctcacctgctgtgtcatcctccagcgtgagctccacgccacttcgtatctttaagcgacctttcccacctccatcaccagctaagcatatacgagctctcctcgcgcgtcgtcacggttctgttaagcccaatgaagcttcgatccctgaaggtagtgaatgtgaggttggcttggacaagaaatttggtttctctaagcagtttgcttcacactacgagattgacggtgaggtgggtcgagggcattttggttatacttgctctgctaaggggaaaaaaggtagcttgaaaggtcaagatgtggctgtcaaagttattcccaaatccaagatgactacggcaattgcaattgaggatgttagaagagaagtgaagatattgcgggctttaactggtcacaagaacctagtccagttctatgacgccttcgaagatgatgaaaatgtttacattgtcatggagttatgccaaggcggtgaactcttggacaaaatacttcaaaggggaggcaaatactcagaagtagatgctaaaaaagtaatgattcagattcttagtgtagtagcctactgtcatcttcaaggcgtggttcaccgtgacctcaaacctgagaattttctcttcaccacaaaggatgagtcttcccctttgaaagccattgattttggtctctccgactatgtcaggccagatgagaggttgaatgacattgtaggaagtgcttattacgtggcccctgaagttttacaccgtacatatggaactgaggcagatatgtggagtattggagtgattgcttatatactactctgtggtagccggcccttttgggcccgttctgaatctggaatctttagagctgttcttaaagcagaacccaatttcgaagaagctccttggccatctctttcacctgacgctgtagattttgtgaaacgtttgttaaataaagattaccgtaagagactaactgctgcacaggctttatgccatccgtggctggttggctcacatgaattaaagataccatctgatatgatcatttacaagctcgtaaaagtatacataatgtcgtcttctttgagaaaatcggctttagcggctcttgccaaaactttaacagtaccgcagctgacttatttgcaagagcagtttaatctgttaggaccaagcaaaaacggatatatctcgatgcagaattataaaacagcaatcttgaagagctccacagaagctacaaaggattcacgagtcttggattttgtacacatgattagttgtcttcagtataagaaactagactttgaagagttttgcgcttcagctttaagtgtatatcagctagaagcaatggagacttgggagcaacatgcacgccgtgcatatgagttgtatgagaaggatgggaacagagtcatcatgatcgaagaacttgccacggaactcggactaggtccatcggtgcctgttcatgttgttcttcaagattggataagacattctgatgggaagctaagtttcttgggttttgtcagactcttacacggcgtctcctctcgtacattgcagaaagcgtag

SEQ ID NO: 97199 - protein, 577 aa, Arabidopsis thaliana
  peptide (1)..(577): Ceres Seq. ID no. 12736414
  misc_feature (124)..(386): Pfam Name: Protein kinase domain Pfam Description: Protein kinase domain
  misc_feature (1)..(577): Homolog of NCBI NO: 15229002 NR Description: calcium-dependent protein kinase-like; protein id:
  misc_feature (1)..(577): Homolog of NCBI NO: 15226841 NR Description: CPDK-related protein kinase; protein id: supported by cDNA: gi_16904217, supported by cDNA: gi_5020365
  misc_feature (34)..(577): Homolog of NCBI NO: 23237898 NR Description: putative calcium/calmodulin-dependent protein
  misc_feature (34)..(576): Homolog of NCBI NO: 14133874 NR Description: CaMK1 [Oryza sativa]
  misc_feature (25)..(575): Homolog of NCBI NO: 15229785 NR Description: CDPK-related protein kinase; protein id: supported by cDNA: gi_16904213 [Arabidopsis thaliana]
  misc_feature (8)..(576): Homolog of NCBI NO: 16904226 NR Description: calcium/calmodulin-dependent protein kinase CaMK3
  misc_feature (25)..(575): Homolog of NCBI NO: 2154715 NR Description: CDPK-related protein kinase [Arabidopsis thaliana]
  misc_feature (12)..(577): Homolog of NCBI NO: 1706130 NR Description: CDPK-related protein kinase (PK421)
  misc_feature (2)..(576): Homolog of NCBI NO: 33146627 NR Description: putative CDPK-related protein kinase [Oryza
  misc_feature (24)..(572): Homolog of NCBI NO: 5020368 NR Description: CDPK-related kinase 2 [Arabidopsis thaliana]
MGLCHGKPIEQQSKNLPISNEIEETPKNSSQKAKSSGFPFYSPSPLPSLFKTSPAVSSSSVSSTPLRIFKRPFPPPSPAKHIRALLARRHGSVKPNEASIPEGSECEVGLDKKFGFSKQFASHYEIDGEVGRGHFGYTCSAKGKKGSLKGQDVAVKVIPKSKMTTAIAIEDVRREVKILRALTGHKNLVQFYDAFEDDENVYIVMELCQGGELLDKILQRGGKYSEVDAKKVMIQILSVVAYCHLQGVVHRDLKPENFLFTTKDESSPLKAIDFGLSDYVRPDERLNDIVGSAYYVAPEVLHRTYGTEADMWSIGVIAYILLCGSRPFWARSESGIFRAVLKAEPNFEEAPWPSLSPDAVDFVKRLLNKDYRKRLTAAQALCHPWLVGSHELKIPSDMIIYKLVKVYIMSSSLRKSALAALAKTLTVPQLTYLQEQFNLLGPSKNGYISMQNYKTAILKSSTEATKDSRVLDFVHMISCLQYKKLDFEEFCASALSVYQLEAMETWEQHARRAYELYEKDGNRVIMIEELATELGLGPSVPVHVVLQDWIRHSDGKLSFLGFVRLLHGVSSRTLQKA

SEQ ID NO: 97200 - protein, 415 aa, Arabidopsis thaliana
  peptide (1)..(415): Ceres Seq. ID no. 12736415
  misc_feature (1)..(224): Pfam Name: Protein kinase domain Pfam Description: Protein kinase domain
  misc_feature (1)..(415): Homolog of NCBI NO: 15229002 NR Description: calcium-dependent protein kinase-like; protein id:
  misc_feature (1)..(415): Homolog of NCBI NO: 15226841 NR Description: CPDK-related protein kinase; protein id: supported by cDNA: gi_16904217, supported by cDNA: gi_5020365
  misc_feature (1)..(415): Homolog of NCBI NO: 23237898 NR Description: putative calcium/calmodulin-dependent protein
  misc_feature (1)..(414): Homolog of NCBI NO: 14133874 NR Description: CaMK1 [Oryza sativa]
  misc_feature (1)..(413): Homolog of NCBI NO: 15229785 NR Description: CDPK-related protein kinase; protein id: supported by cDNA: gi_16904213 [Arabidopsis thaliana]
  misc_feature (1)..(414): Homolog of NCBI NO: 16904226 NR Description: calcium/calmodulin-dependent protein kinase CaMK3
  misc_feature (1)..(413): Homolog of NCBI NO: 2154715 NR Description: CDPK-related protein kinase [Arabidopsis thaliana]
  misc_feature (1)..(415): Homolog of NCBI NO: 1706130 NR Description: CDPK-related protein kinase (PK421)
  misc_feature (1)..(414): Homolog of NCBI NO: 33146627 NR Description: putative CDPK-related protein kinase [Oryza
  misc_feature (1)..(410): Homolog of NCBI NO: 5020368 NR Description: CDPK-related kinase 2 [Arabidopsis thaliana]
MTTAIAIEDVRREVKILRALTGHKNLVQFYDAFEDDENVYIVMELCQGGELLDKILQRGGKYSEVDAKKVMIQILSVVAYCHLQGVVHRDLKPENFLFTTKDESSPLKAIDFGLSDYVRPDERLNDIVGSAYYVAPEVLHRTYGTEADMWSIGVIAYILLCGSRPFWARSESGIFRAVLKAEPNFEEAPWPSLSPDAVDFVKRLLNKDYRKRLTAAQALCHPWLVGSHELKIPSDMIIYKLVKVYIMSSSLRKSALAALAKTLTVPQLTYLQEQFNLLGPSKNGYISMQNYKTAILKSSTEATKDSRVLDFVHMISCLQYKKLDFEEFCASALSVYQLEAMETWEQHARRAYELYEKDGNRVIMIEELATELGLGPSVPVHVVLQDWIRHSDGKLSFLGFVRLLHGVSSRTLQKA

SEQ ID NO: 97201 - protein, 373 aa, Arabidopsis thaliana
  peptide (1)..(373): Ceres Seq. ID no. 12736416
  misc_feature (1)..(182): Pfam Name: Protein kinase domain Pfam Description: Protein kinase domain
  misc_feature (1)..(373): Homolog of NCBI NO: 15229002 NR Description: calcium-dependent protein kinase-like; protein id:
  misc_feature (1)..(373): Homolog of NCBI NO: 15226841 NR Description: CPDK-related protein kinase; protein id: supported by cDNA: gi_16904217, supported by cDNA: gi_5020365
  misc_feature (1)..(373): Homolog of NCBI NO: 23237898 NR Description: putative calcium/calmodulin-dependent protein
  misc_feature (1)..(372): Homolog of NCBI NO: 14133874 NR Description: CaMK1 [Oryza sativa]
  misc_feature (1)..(371): Homolog of NCBI NO: 15229785 NR Description: CDPK-related protein kinase; protein id: supported by cDNA: gi_16904213 [Arabidopsis thaliana]
  misc_feature (1)..(372): Homolog of NCBI NO: 16904226 NR Description: calcium/calmodulin-dependent protein kinase CaMK3
  misc_feature (1)..(371): Homolog of NCBI NO: 2154715 NR Description: CDPK-related protein kinase [Arabidopsis thaliana]
  misc_feature (1)..(373): Homolog of NCBI NO: 1706130 NR Description: CDPK-related protein kinase (PK421)
  misc_feature (1)..(372): Homolog of NCBI NO: 33146627 NR Description: putative CDPK-related protein kinase [Oryza
  misc_feature (1)..(368): Homolog of NCBI NO: 5020368 NR Description: CDPK-related kinase 2 [Arabidopsis thaliana]
MELCQGGELLDKILQRGGKYSEVDAKKVMIQILSVVAYCHLQGVVHRDLKPENFLFTTKDESSPLKAIDFGLSDYVRPDERLNDIVGSAYYVAPEVLHRTYGTEADMWSIGVIAYILLCGSRPFWARSESGIFRAVLKAEPNFEEAPWPSLSPDAVDFVKRLLNKDYRKRLTAAQALCHPWLVGSHELKIPSDMIIYKLVKVYIMSSSLRKSALAALAKTLTVPQLTYLQEQFNLLGPSKNGYISMQNYKTAILKSSTEATKDSRVLDFVHMISCLQYKKLDFEEFCASALSVYQLEAMETWEQHARRAYELYEKDGNRVIMIEELATELGLGPSVPVHVVLQDWIRHSDGKLSFLGFVRLLHGVSSRTLQKA

SEQ ID NO: 97202 - DNA, 693 bp, Arabidopsis thaliana
  misc_feature (1)..(693): Ceres Seq. ID no. 12736417
  misc_feature: MA Experiment ID: 20000306 Result: Down-regulated in Transcription
  misc_feature: MA Experiment 20000306 PARAMETER Experiment Name: At_Germinating_Seeds_Sub_P Parameter: Age (hr) Value: 6 vs. 0
  misc_feature: MA Experiment 20000306 PARAMETER Experiment Name: At_Germinating_Seeds_Sub_P Parameter: Organism Value: A. thaliana
  misc_feature: MA Experiment 20000306 PARAMETER Experiment Name: At_Germinating_Seeds_Sub_P Parameter: Plant Line Value: WS
  misc_feature: MA Experiment 20000306 PARAMETER Experiment Name: At_Germinating_Seeds_Sub_P Parameter: Tissue Value: Germinating Seeds
  misc_feature: MA Experiment ID: 20000307 Result: Down-regulated in Transcription
  misc_feature: MA Experiment 20000307 PARAMETER Experiment Name: At_Germinating_Seeds_Sub_P Parameter: Age (hr) Value: 24 vs. 0
  misc_feature: MA Experiment 20000307 PARAMETER Experiment Name: At_Germinating_Seeds_Sub_P Parameter: Organism Value: A. thaliana
  misc_feature: MA Experiment 20000307 PARAMETER Experiment Name: At_Germinating_Seeds_Sub_P Parameter: Plant Line Value: WS
  misc_feature: MA Experiment 20000307 PARAMETER Experiment Name: At_Germinating_Seeds_Sub_P Parameter: Tissue Value: Germinating Seeds
  misc_feature: MA Experiment ID: 20000440 Result: Down-regulated in Transcription
  misc_feature: MA Experiment 20000440 PARAMETER Experiment Name: At_Closed-Flower__Sub_P Parameter: Tissue Value: Closed Flower vs. Whole Plant
atgcagccagaggtttcagatcaaatattttatgccttcctcaccggaggattatgtgcctcgtctacttccaccaccgtgacgtcgtcgtctgacccttttgccacggtttatgaagacaaagctcttgcttctctgaggaaccataaagaggctgagcgaaagagaagagcaagaatcaattcccatctcaacaagctccgcaagttactctcttgtaactccaagacagacaaatccacactactagcaaaagtggttcaacgagtcaaagaactaaaacaacaaaccctagaaatcaccgacgaaacaataccgtcggagactgacgaaatcagtgtactcaacattgaggactgttccagaggcgacgatcgacggataatctttaaggtatcgttttgctgcgaggaccggccagagctcttgaaagatctcatggagacactcaaatctcttcagatggaaactctctttgccgacatgacaacagtcggtggtcgaacaagaaacgttctcgttgtggccgctgacaaagagcatcacggcgtccagtcggtgaattttctacagaacgcactcaagtctttactcgaacggtcaagcaagtcggtgatggtgggacatggtggtggtggtggggaagaaaggttaaaacgacgtcgtgcgctggatcacatcataatggtctga

SEQ ID NO: 97203 - protein, 230 aa, Arabidopsis thaliana
  peptide (1)..(230): Ceres Seq. ID no. 12736418
  misc_feature (45)..(94): Pfam Name: Helix-loop-helix DNA-binding domain Pfam Description: Helix-loop-helix DNA-binding domain
  misc_feature (1)..(230): Homolog of NCBI NO: 15229004 NR Description: bHLH protein; protein id: At3g56770.1
  misc_feature (18)..(230): Homolog of NCBI NO: 15226839 NR Description: bHLH protein; protein id: At2g41130.1
  misc_feature (18)..(230): Homolog of NCBI NO: 18491261 NR Description: At2g41130/T3K9.10 [Arabidopsis thaliana]
  misc_feature (37)..(226): Homolog of NCBI NO: 18409132 NR Description: bHLH protein; protein id: At1g68810.1, supported
  misc_feature (37)..(189): Homolog of NCBI NO: 15230869 NR Description: bHLH protein; protein id: At3g25710.1, supported cDNA: 247881., supported by cDNA: gi_16604443, supported by cDNA:
  misc_feature (1)..(204): Homolog of NCBI NO: 15225658 NR Description: hypothetical protein; protein id: At2g40200.1, by cDNA: gi_20127046 [Arabidopsis thaliana]
  misc_feature (27)..(225): Homolog of NCBI NO: 34896028 NR Description: ESTs C26093(C11622),AU090634(C12429) correspond a region of the predicted gene.~Similar to Arabidopsis thaliana II BAC T3K9; hypothetical protein (AC004261) [Oryza sativa
  misc_feature (39)..(202): Homolog of NCBI NO: 34904034 NR Description: P0665D10.15 [Oryza sativa (japonica
  misc_feature (12)..(213): Homolog of NCBI NO: 33111975 NR Description: putative bHLH131 transcription factor
  misc_feature (12)..(213): Homolog of NCBI NO: 15233658 NR Description: hypothetical protein; protein id: At4g38070.1
MQPEVSDQIFYAFLTGGLCASSTSTTVTSSSDPFATVYEDKALASLRNHKEAERKRRARINSHLNKLRKLLSCNSKTDKSTLLAKVVQRVKELKQQTLEITDETIPSETDEISVLNIEDCSRGDDRRIIFKVSFCCEDRPELLKDLMETLKSLQMETLFADMTTVGGRTRNVLVVAADKEHHGVQSVNFLQNALKSLLERSSKSVMVGHGGGGGEERLKRRRALDHIIMV

SEQ ID NO: 97204 - DNA, 1389 bp, Arabidopsis thaliana
  misc_feature (1)..(1389): Ceres Seq. ID no. 12736435
  misc_feature: MA Experiment ID: 20000169 Result: Up-regulated in Transcription
  misc_feature: MA Experiment 20000169 PARAMETER Experiment Name: At_100uM_ABA_P Parameter: Age (day) Value: 14
  misc_feature: MA Experiment 20000169 PARAMETER Experiment Name: At_100uM_ABA_P Parameter: Organism Value: A. thaliana
  misc_feature: MA Experiment 20000169 PARAMETER Experiment Name: At_100uM_ABA_P Parameter: Plant Line Value: WS
  misc_feature: MA Experiment 20000169 PARAMETER Experiment Name: At_100uM_ABA_P Parameter: Timepoint (hr) Value: 6
  misc_feature: MA Experiment 20000169 PARAMETER Experiment Name: At_100uM_ABA_P Parameter: Tissue Value: Aerial
  misc_feature: MA Experiment 20000169 PARAMETER Experiment Name: At_100uM_ABA_P Parameter: Treatment Value: 100uM ABA vs. No Treatment
  misc_feature: MA Experiment ID: 20000179 Result: Up-regulated in Transcription
  misc_feature: MA Experiment 20000179 PARAMETER Experiment Name: At_Germinating_Seeds_P Parameter: Age (hr) Value: 6 vs. 0
  misc_feature: MA Experiment 20000179 PARAMETER Experiment Name: At_Germinating_Seeds_P Parameter: Tissue Value: Germinating Seeds
  misc_feature: MA Experiment ID: 20000180 Result: Up-regulated in Transcription
  misc_feature: MA Experiment 20000180 PARAMETER Experiment Name: At_Germinating_Seeds_P Parameter: Age (hr) Value: 24 vs. 0
  misc_feature: MA Experiment 20000180 PARAMETER Experiment Name: At_Germinating_Seeds_P Parameter: Tissue Value: Germinating Seeds
  misc_feature: MA Experiment ID: 20000182 Result: Up-regulated in Transcription
  misc_feature: MA Experiment 20000182 PARAMETER Experiment Name: At_2mM_SA_P Parameter: Age (day) Value: 14
  misc_feature: MA Experiment 20000182 PARAMETER Experiment Name: At_2mM_SA_P Parameter: Organism Value: A. thaliana
  misc_feature: MA Experiment 20000182 PARAMETER Experiment Name: At_2mM_SA_P Parameter: Plant Line Value: WS
  misc_feature: MA Experiment 20000182 PARAMETER Experiment Name: At_2mM_SA_P Parameter: Timepoint (hr) Value: 6
  misc_feature: MA Experiment 20000182 PARAMETER Experiment Name: At_2mM_SA_P Parameter: Tissue Value: Aerial
  misc_feature: MA Experiment 20000182 PARAMETER Experiment Name: At_2mM_SA_P Parameter: Treatment Value: 2mM SA vs. No Treatment
  misc_feature: MA Experiment ID: 20000185 Result: Up-regulated in Transcription
  misc_feature: MA Experiment 20000185 PARAMETER Experiment Name: At_Roots__P Parameter: Age (day) Value: 7 vs. 21
  misc_feature: MA Experiment 20000185 PARAMETER Experiment Name: At_Roots__P Parameter: Organism Value: A. thaliana
  misc_feature: MA Experiment 20000185 PARAMETER Experiment Name: At_Roots__P Parameter: Tissue Value: Roots vs. Whole Plant
  misc_feature: MA Experiment ID: 20000267 Result: Up-regulated in Transcription
  misc_feature: MA Experiment 20000267 PARAMETER Experiment Name: At_Drought_P Parameter: Age (day) Value: 7
  misc_feature: MA Experiment 20000267 PARAMETER Experiment Name: At_Drought_P Parameter: Organism Value: A. thaliana
  misc_feature: MA Experiment 20000267 PARAMETER Experiment Name: At_Drought_P Parameter: Plant Line Value: WS
  misc_feature: MA Experiment 20000267 PARAMETER Experiment Name: At_Drought_P Parameter: Timepoint (hr) Value: 6
  misc_feature: MA Experiment 20000267 PARAMETER Experiment Name: At_Drought_P Parameter: Tissue Value: Whole Plant
  misc_feature: MA Experiment 20000267 PARAMETER Experiment Name: At_Drought_P Parameter: Treatment Value: Drought vs. No Drought
  misc_feature: MA Experiment ID: 20000268 Result: Up-regulated in Transcription
  misc_feature: MA Experiment 20000268 PARAMETER Experiment Name: At_100mM_NaCl__P Parameter: Age (day) Value: 14
  misc_feature: MA Experiment 20000268 PARAMETER Experiment Name: At_100mM_NaCl__P Parameter: Organism Value: A. thaliana
  misc_feature: MA Experiment 20000268 PARAMETER Experiment Name: At_100mM_NaCl__P Parameter: Plant Line Value: WS
  misc_feature: MA Experiment 20000268 PARAMETER Experiment Name: At_100mM_NaCl__P Parameter: Timepoint (hr) Value: 6
  misc_feature: MA Experiment 20000268 PARAMETER Experiment Name: At_100mM_NaCl__P Parameter: Tissue Value: Whole Plant
  misc_feature: MA Experiment 20000268 PARAMETER Experiment Name: At_100mM_NaCl__P Parameter: Treatment Value: 100mM NaCl vs. No Treatment
  misc_feature: MA Experiment ID: 20000436 Result: Up-regulated in Transcription
  misc_feature: MA Experiment 20000436 PARAMETER Experiment Name: At_Drought_P Parameter: Age (day) Value: 7
  misc_feature: MA Experiment 20000436 PARAMETER Experiment Name: At_Drought_P Parameter: Organism Value: A. thaliana
  misc_feature: MA Experiment 20000436 PARAMETER Experiment Name: At_Drought_P Parameter: Plant Line Value: WS
  misc_feature: MA Experiment 20000436 PARAMETER Experiment Name: At_Drought_P Parameter: Timepoint (hr) Value: 12
  misc_feature: MA Experiment 20000436 PARAMETER Experiment Name: At_Drought_P Parameter: Tissue Value: Whole Plant
  misc_feature: MA Experiment 20000436 PARAMETER Experiment Name: At_Drought_P Parameter: Treatment Value: Drought vs. No Drought
  misc_feature: MA Experiment ID: 20000437 Result: Up-regulated in Transcription
  misc_feature: MA Experiment 20000437 PARAMETER Experiment Name: At_Drought_P Parameter: Age (day) Value: 8
  misc_feature: MA Experiment 20000437 PARAMETER Experiment Name: At_Drought_P Parameter: Organism Value: A. thaliana
  misc_feature: MA Experiment 20000437 PARAMETER Experiment Name: At_Drought_P Parameter: Plant Line Value: WS
  misc_feature: MA Experiment 20000437 PARAMETER Experiment Name: At_Drought_P Parameter: Timepoint (hr) Value: 24
  misc_feature: MA Experiment 20000437 PARAMETER Experiment Name: At_Drought_P Parameter: Tissue Value: Whole Plant
  misc_feature: MA Experiment 20000437 PARAMETER Experiment Name: At_Drought_P Parameter: Treatment Value: Drought vs. No Drought
  misc_feature: MA Experiment ID: 20000439 Result: Up-regulated in Transcription
  misc_feature: MA Experiment 20000439 PARAMETER Experiment Name: At_Roots__P Parameter: Age (day) Value: 14 vs. 21
  misc_feature: MA Experiment 20000439 PARAMETER Experiment Name: At_Roots__P Parameter: Organism Value: A. thaliana
  misc_feature: MA Experiment 20000439 PARAMETER Experiment Name: At_Roots__P Parameter: Tissue Value: Roots vs. Whole Plant
  misc_feature: MA Experiment ID: 20000453 Result: Up-regulated in Transcription
  misc_feature: MA Experiment 20000453 PARAMETER Experiment Name: At_100uM_ABA_P Parameter: Age (day) Value: 15
  misc_feature: MA Experiment 20000453 PARAMETER Experiment Name: At_100uM_ABA_P Parameter: Organism Value: A. thaliana
  misc_feature: MA Experiment 20000453 PARAMETER Experiment Name: At_100uM_ABA_P Parameter: Plant Line Value: WS
  misc_feature: MA Experiment 20000453 PARAMETER Experiment Name: At_100uM_ABA_P Parameter: Timepoint (hr) Value: 24
  misc_feature: MA Experiment 20000453 PARAMETER Experiment Name: At_100uM_ABA_P Parameter: Tissue Value: Aerial
  misc_feature: MA Experiment 20000453 PARAMETER Experiment Name: At_100uM_ABA_P Parameter: Treatment Value: 100uM ABA vs. No Treatment
  misc_feature: MA Experiment ID: 20001248 Result: Down-regulated in Transcription
  misc_feature: MA Experiment 20001248 PARAMETER Experiment Name: At_Far-red-induction_P Parameter: Age (day) Value: 7
  misc_feature: MA Experiment 20001248 PARAMETER Experiment Name: At_Far-red-induction_P Parameter: Light Value: Far-red vs. White
  misc_feature: MA Experiment 20001248 PARAMETER Experiment Name: At_Far-red-induction_P Parameter: Organism Value: A. thaliana
  misc_feature: MA Experiment 20001248 PARAMETER Experiment Name: At_Far-red-induction_P Parameter: Plant Line Value: Columbia
  misc_feature: MA Experiment 20001248 PARAMETER Experiment Name: At_Far-red-induction_P Parameter: Timepoint (hr) Value: 4
  misc_feature: MA Experiment 20001248 PARAMETER Experiment Name: At_Far-red-induction_P Parameter: Tissue Value: Whole Plant
  misc_feature: MA Experiment ID: 20001904 Result: Up-regulated in Transcription
  misc_feature: MA Experiment 20001904 PARAMETER Experiment Name: At_Drought_Reproduction_P Parameter: Age (day) Value: 37
  misc_feature: MA Experiment 20001904 PARAMETER Experiment Name: At_Drought_Reproduction_P Parameter: Organism Value: A. thaliana
  misc_feature: MA Experiment 20001904 PARAMETER Experiment Name: At_Drought_Reproduction_P Parameter: Plant Line Value: WS
  misc_feature: MA Experiment 20001904 PARAMETER Experiment Name: At_Drought_Reproduction_P Parameter: Timepoint (day) Value: 7
  misc_feature: MA Experiment 20001904 PARAMETER Experiment Name: At_Drought_Reproduction_P Parameter: Tissue Value: Rosettes
  misc_feature: MA Experiment 20001904 PARAMETER Experiment Name: At_Drought_Reproduction_P Parameter: Treatment Value: Drought vs. No Drought
  misc_feature: MA Experiment ID: 20001905 Result: Up-regulated in Transcription
  misc_feature: MA Experiment 20001905 PARAMETER Experiment Name: At_Drought_Reproduction_P Parameter: Age (day) Value: 40
  misc_feature: MA Experiment 20001905 PARAMETER Experiment Name: At_Drought_Reproduction_P Parameter: Organism Value: A. thaliana
  misc_feature: MA Experiment 20001905 PARAMETER Experiment Name: At_Drought_Reproduction_P Parameter: Plant Line Value: WS
  misc_feature: MA Experiment 20001905 PARAMETER Experiment Name: At_Drought_Reproduction_P Parameter: Timepoint (day) Value: 10
  misc_feature: MA Experiment 20001905 PARAMETER Experiment Name: At_Drought_Reproduction_P Parameter: Tissue Value: Rosettes
  misc_feature: MA Experiment 20001905 PARAMETER Experiment Name: At_Drought_Reproduction_P Parameter: Treatment Value: Drought vs. No Drought
  misc_feature: MA Experiment ID: 20001906 Result: Up-regulated in Transcription
  misc_feature: MA Experiment 20001906 PARAMETER Experiment Name: At_Drought_Reproduction_P Parameter: Age (day) Value: 35
  misc_feature: MA Experiment 20001906 PARAMETER Experiment Name: At_Drought_Reproduction_P Parameter: Organism Value: A. thaliana
  misc_feature: MA Experiment 20001906 PARAMETER Experiment Name: At_Drought_Reproduction_P Parameter: Plant Line Value: WS
  misc_feature: MA Experiment 20001906 PARAMETER Experiment Name: At_Drought_Reproduction_P Parameter: Timepoint (day) Value: 5
  misc_feature: MA Experiment 20001906 PARAMETER Experiment Name: At_Drought_Reproduction_P Parameter: Tissue Value: Siliques
  misc_feature: MA Experiment 20001906 PARAMETER Experiment Name: At_Drought_Reproduction_P Parameter: Treatment Value: Drought vs. No Drought
  misc_feature: MA Experiment ID: 20001907 Result: Up-regulated in Transcription
  misc_feature: MA Experiment 20001907 PARAMETER Experiment Name: At_Drought_Reproduction_P Parameter: Age (day) Value: 37
  misc_feature: MA Experiment 20001907 PARAMETER Experiment Name: At_Drought_Reproduction_P Parameter: Organism Value: A. thaliana
  misc_feature: MA Experiment 20001907 PARAMETER Experiment Name: At_Drought_Reproduction_P Parameter: Plant Line Value: WS
  misc_feature: MA Experiment 20001907 PARAMETER Experiment Name: At_Drought_Reproduction_P Parameter: Timepoint (day) Value: 7
  misc_feature: MA Experiment 20001907 PARAMETER Experiment Name: At_Drought_Reproduction_P Parameter: Tissue Value: Siliques
  misc_feature: MA Experiment 20001907 PARAMETER Experiment Name: At_Drought_Reproduction_P Parameter: Treatment Value: Drought vs. No Drought
  misc_feature: MA Experiment ID: 20001911 Result: Up-regulated in Transcription
  misc_feature: MA Experiment 20001911 PARAMETER Experiment Name: At_Drought_Reproduction_P Parameter: Age (day) Value: 40
  misc_feature: MA Experiment 20001911 PARAMETER Experiment Name: At_Drought_Reproduction_P Parameter: Organism Value: A. thaliana
  misc_feature: MA Experiment 20001911 PARAMETER Experiment Name: At_Drought_Reproduction_P Parameter: Plant Line Value: WS
  misc_feature: MA Experiment 20001911 PARAMETER Experiment Name: At_Drought_Reproduction_P Parameter: Timepoint (day) Value: 10
  misc_feature: MA Experiment 20001911 PARAMETER Experiment Name: At_Drought_Reproduction_P Parameter: Tissue Value: Flowers
  misc_feature: MA Experiment 20001911 PARAMETER Experiment Name: At_Drought_Reproduction_P Parameter: Treatment Value: Drought vs. No Drought
attgattcactcacaaagaaaagatcattgattcacacacattttccttttttgttgttaaatattcacacacactttttcttccaaagaaagaaagatgccgattagccggagagttctgacgccgatcaccgccgctccggttatcttagccgtcctttgcttcttcttttggtcatcaatcatcgggccggacaatttaaagggcacgaaacacgtccttcaagatgctaagaccattcctcttcccgtcgatggaccagagagcctagagttcgatccacaaggtgaaggcccttacgttggcgtcaccgacggtcgcattctcaaatggcgcggtgaagaactcggctgggtcgatttcgcctacacttctcctcacagagataactgttcgagtcatgaggtagtaccaagttgtgggagaccattgggacttagcttcgagaggaaaacaggagatttgtacatatgtgatggttactttggggtcatgaaggtcggaccagagggaggcctggccgagttagttgttgatgaagccgaaggtcgtaaagttatgtttgccaaccaaggggatatagacgaagaggaagatattttctacttcaatgatagcagcgatacataccatttcagggacgtattttacgtgtctttgtccgggacaaaggttggaagagtaattagatacgatatgaagaagaaagaggccaaagttattatggacaaacttcgtttaccaaatggtctagctctaagcaaaaacggttcgtttgtagtcacatgcgagagtagtacgaacatttgccatagaatatgggtcaaaggtcccaaatccggaaccaacgaggttttcgcaacgctccctggttccccggacaatatccggcgtacgccaacaggcgatttctgggtcgcattacattgcaaaaagaatttgttcacacgtgcagttttgattcacacttgggtcggaaggtttttcatgaacacgatgaagatggagactgtaattcatttcatgaacggaggaaaacctcatggaattgtcgtgaaactctctggagagacaggagagattcttgagatacttgaggacagtgaagggaagacggtgaaatatgttagtgaggcttatgagacaaaagatggaaagttatggatcggatctgtgtattggccggccgtttgggttcttgatacatcggtttatgattccatatgagttagccaaaagaccaaacgccaaaatgaaataaattatcacttagttgtgtaatttgtttattagcgggaatgcatcttgtttttgtatcttcttgtttgttgcgtgagtgaattatatatgatgtaaacttggattctacaaaattttgtttgaagttg

SEQ ID NO: 97205 - protein, 376 aa, Arabidopsis thaliana
  peptide (1)..(376): Ceres Seq. ID no. 12736436
  misc_feature (40)..(365): Pfam Name: Strictosidine synthase Pfam Description: Strictosidine synthase
  misc_feature (1)..(376): Homolog of NCBI NO: 15230182 NR Description: strictosidine synthase-related; protein id: supported by cDNA: gi_13877836 [Arabidopsis thaliana]
  misc_feature (1)..(376): Homolog of NCBI NO: 13877837 NR Description: unknown protein [Arabidopsis thaliana]
  misc_feature (27)..(376): Homolog of NCBI NO: 6759491 NR Description: hypothetical protein [Arabidopsis thaliana]
  misc_feature (1)..(369): Homolog of NCBI NO: 15230200 NR Description: strictosidine synthase-related; protein id: supported by cDNA: 98698., supported by cDNA: gi_14532519
  misc_feature (61)..(369): Homolog of NCBI NO: 15227324 NR Description: strictosidine synthase-related; protein id: [Arabidopsis thaliana] >gi|25335893|pir||B84840 probable
  misc_feature (11)..(369): Homolog of NCBI NO: 11280567 NR Description: hypothetical protein F24I3.110 - Arabidopsis >gi|6911873|emb|CAB72173.1| putative protein [Arabidopsis
  misc_feature (11)..(369): Homolog of NCBI NO: 30694556 NR Description: strictosidine synthase-related [Arabidopsis
  misc_feature (39)..(369): Homolog of NCBI NO: 18390900 NR Description: strictosidine synthase-related; protein id: supported by cDNA: gi_16930480, supported by cDNA: gi_17381181 thaliana] >gi|16930481|gb|AAL31926.1|AF419594_1 At1g08470/T27G7_9
  misc_feature (39)..(234): Homolog of NCBI NO: 25335889 NR Description: protein T27G7.16 [imported] - Arabidopsis >gi|6664319|gb|AAF22901.1|AC006932_18 T27G7.16 [Arabidopsis
  misc_feature (240)..(369): Homolog of NCBI NO: 25335889 NR Description: protein T27G7.16 [imported] - Arabidopsis >gi|6664319|gb|AAF22901.1|AC006932_18 T27G7.16 [Arabidopsis
MPISRRVLTPITAAPVILAVLCFFFWSSIIGPDNLKGTKHVLQDAKTIPLPVDGPESLEFDPQGEGPYVGVTDGRILKWRGEELGWVDFAYTSPHRDNCSSHEVVPSCGRPLGLSFERKTGDLYICDGYFGVMKVGPEGGLAELVVDEAEGRKVMFANQGDIDEEEDIFYFNDSSDTYHFRDVFYVSLSGTKVGRVIRYDMKKKEAKVIMDKLRLPNGLALSKNGSFVVTCESSTNICHRIWVKGPKSGTNEVFATLPGSPDNIRRTPTGDFWVALHCKKNLFTRAVLIHTWVGRFFMNTMKMETVIHFMNGGKPHGIVVKLSGETGEILEILEDSEGKTVKYVSEAYETKDGKLWIGSVYWPAVWVLDTSVYDSI

SEQ ID NO: 97206 - protein, 244 aa, Arabidopsis thaliana
  peptide (1)..(244): Ceres Seq. ID no. 12736437
  misc_feature (1)..(233): Pfam Name: Strictosidine synthase Pfam Description: Strictosidine synthase
  misc_feature (1)..(244): Homolog of NCBI NO: 15230182 NR Description: strictosidine synthase-related; protein id: supported by cDNA: gi_13877836 [Arabidopsis thaliana]
  misc_feature (1)..(244): Homolog of NCBI NO: 13877837 NR Description: unknown protein [Arabidopsis thaliana]
  misc_feature (1)..(244): Homolog of NCBI NO: 6759491 NR Description: hypothetical protein [Arabidopsis thaliana]
  misc_feature (1)..(237): Homolog of NCBI NO: 15230200 NR Description: strictosidine synthase-related; protein id: supported by cDNA: 98698., supported by cDNA: gi_14532519
  misc_feature (1)..(237): Homolog of NCBI NO: 15227324 NR Description: strictosidine synthase-related; protein id: [Arabidopsis thaliana] >gi|25335893|pir||B84840 probable
  misc_feature (1)..(237): Homolog of NCBI NO: 11280567 NR Description: hypothetical protein F24I3.110 - Arabidopsis >gi|6911873|emb|CAB72173.1| putative protein [Arabidopsis
  misc_feature (1)..(237): Homolog of NCBI NO: 30694556 NR Description: strictosidine synthase-related [Arabidopsis
  misc_feature (1)..(237): Homolog of NCBI NO: 18390900 NR Description: strictosidine synthase-related; protein id: supported by cDNA: gi_16930480, supported by cDNA: gi_17381181 thaliana] >gi|16930481|gb|AAL31926.1|AF419594_1 At1g08470/T27G7_9
  misc_feature (1)..(102): Homolog of NCBI NO: 25335889 NR Description: protein T27G7.16 [imported] - Arabidopsis >gi|6664319|gb|AAF22901.1|AC006932_18 T27G7.16 [Arabidopsis
  misc_feature (108)..(237): Homolog of NCBI NO: 25335889 NR Description: protein T27G7.16 [imported] - Arabidopsis >gi|6664319|gb|AAF22901.1|AC006932_18 T27G7.16 [Arabidopsis
MKVGPEGGLAELVVDEAEGRKVMFANQGDIDEEEDIFYFNDSSDTYHFRDVFYVSLSGTKVGRVIRYDMKKKEAKVIMDKLRLPNGLALSKNGSFVVTCESSTNICHRIWVKGPKSGTNEVFATLPGSPDNIRRTPTGDFWVALHCKKNLFTRAVLIHTWVGRFFMNTMKMETVIHFMNGGKPHGIVVKLSGETGEILEILEDSEGKTVKYVSEAYETKDGKLWIGSVYWPAVWVLDTSVYDSI

SEQ ID NO: 97207 - protein, 222 aa, Arabidopsis thaliana
  peptide (1)..(222): Ceres Seq. ID no. 12736438
  misc_feature (1)..(211): Pfam Name: Strictosidine synthase Pfam Description: Strictosidine synthase
  misc_feature (1)..(222): Homolog of NCBI NO: 15230182 NR Description: strictosidine synthase-related; protein id: supported by cDNA: gi_13877836 [Arabidopsis thaliana]
  misc_feature (1)..(222): Homolog of NCBI NO: 13877837 NR Description: unknown protein [Arabidopsis thaliana]
  misc_feature (1)..(222): Homolog of NCBI NO: 6759491 NR Description: hypothetical protein [Arabidopsis thaliana]
  misc_feature (1)..(215): Homolog of NCBI NO: 15230200 NR Description: strictosidine synthase-related; protein id: supported by cDNA: 98698., supported by cDNA: gi_14532519
  misc_feature (1)..(215): Homolog of NCBI NO: 15227324 NR Description: strictosidine synthase-related; protein id: [Arabidopsis thaliana] >gi|25335893|pir||B84840 probable
  misc_feature (1)..(215): Homolog of NCBI NO: 11280567 NR Description: hypothetical protein F24I3.110 - Arabidopsis >gi|6911873|emb|CAB72173.1| putative protein [Arabidopsis
  misc_feature (1)..(215): Homolog of NCBI NO: 30694556 NR Description: strictosidine synthase-related [Arabidopsis
  misc_feature (1)..(215): Homolog of NCBI NO: 18390900 NR Description: strictosidine synthase-related; protein id: supported by cDNA: gi_16930480, supported by cDNA: gi_17381181 thaliana] >gi|16930481|gb|AAL31926.1|AF419594_1 At1g08470/T27G7_9
  misc_feature (1)..(80): Homolog of NCBI NO: 25335889 NR Description: protein T27G7.16 [imported] - Arabidopsis >gi|6664319|gb|AAF22901.1|AC006932_18 T27G7.16 [Arabidopsis
  misc_feature (86)..(215): Homolog of NCBI NO: 25335889 NR Description: protein T27G7.16 [imported] - Arabidopsis >gi|6664319|gb|AAF22901.1|AC006932_18 T27G7.16 [Arabidopsis
MFANQGDIDEEEDIFYFNDSSDTYHFRDVFYVSLSGTKVGRVIRYDMKKKEAKVIMDKLRLPNGLALSKNGSFVVTCESSTNICHRIWVKGPKSGTNEVFATLPGSPDNIRRTPTGDFWVALHCKKNLFTRAVLIHTWVGRFFMNTMKMETVIHFMNGGKPHGIVVKLSGETGEILEILEDSEGKTVKYVSEAYETKDGKLWIGSVYWPAVWVLDTSVYDSI

SEQ ID NO: 97208 - DNA, 1119 bp, Arabidopsis thaliana
  misc_feature (1)..(1119): Ceres Seq. ID no. 12736439
  misc_feature: MA Experiment ID: 20001905 Result: Down-regulated in Transcription
  misc_feature: MA Experiment 20001905 PARAMETER Experiment Name: At_Drought_Reproduction_P Parameter: Age (day) Value: 40
  misc_feature: MA Experiment 20001905 PARAMETER Experiment Name: At_Drought_Reproduction_P Parameter: Organism Value: A. thaliana
  misc_feature: MA Experiment 20001905 PARAMETER Experiment Name: At_Drought_Reproduction_P Parameter: Plant Line Value: WS
  misc_feature: MA Experiment 20001905 PARAMETER Experiment Name: At_Drought_Reproduction_P Parameter: Timepoint (day) Value: 10
  misc_feature: MA Experiment 20001905 PARAMETER Experiment Name: At_Drought_Reproduction_P Parameter: Tissue Value: Rosettes
  misc_feature: MA Experiment 20001905 PARAMETER Experiment Name: At_Drought_Reproduction_P Parameter: Treatment Value: Drought vs. No Drought
  misc_feature: MA Experiment ID: 20001906 Result: Down-regulated in Transcription
  misc_feature: MA Experiment 20001906 PARAMETER Experiment Name: At_Drought_Reproduction_P Parameter: Age (day) Value: 35
  misc_feature: MA Experiment 20001906 PARAMETER Experiment Name: At_Drought_Reproduction_P Parameter: Organism Value: A. thaliana
  misc_feature: MA Experiment 20001906 PARAMETER Experiment Name: At_Drought_Reproduction_P Parameter: Plant Line Value: WS
  misc_feature: MA Experiment 20001906 PARAMETER Experiment Name: At_Drought_Reproduction_P Parameter: Timepoint (day) Value: 5
  misc_feature: MA Experiment 20001906 PARAMETER Experiment Name: At_Drought_Reproduction_P Parameter: Tissue Value: Siliques
  misc_feature: MA Experiment 20001906 PARAMETER Experiment Name: At_Drought_Reproduction_P Parameter: Treatment Value: Drought vs. No Drought
  misc_feature: MA Experiment ID: 20001911 Result: Down-regulated in Transcription
  misc_feature: MA Experiment 20001911 PARAMETER Experiment Name: At_Drought_Reproduction_P Parameter: Age (day) Value: 40
  misc_feature: MA Experiment 20001911 PARAMETER Experiment Name: At_Drought_Reproduction_P Parameter: Organism Value: A. thaliana
  misc_feature: MA Experiment 20001911 PARAMETER Experiment Name: At_Drought_Reproduction_P Parameter: Plant Line Value: WS
  misc_feature: MA Experiment 20001911 PARAMETER Experiment Name: At_Drought_Reproduction_P Parameter: Timepoint (day) Value: 10
  misc_feature: MA Experiment 20001911 PARAMETER Experiment Name: At_Drought_Reproduction_P Parameter: Tissue Value: Flowers
  misc_feature: MA Experiment 20001911 PARAMETER Experiment Name: At_Drought_Reproduction_P Parameter: Treatment Value: Drought vs. No Drought
atgatgatcattacagtgttcttaacagtgattgcagcggttctcgcaatccttgtcaagaattctcaaaccggttctggcatcttcgcaccgcctgaaatctccggttcgcgtgatgttttcccgtcggcgaaagtggttaacttaaccggagcctctggtcctgagagtatagctttcgatccagcaggtgaaggtccgtacgttggtgtctcagatggtcgtatcttgaaatggcgcggtgaaccgcttggatggtcagatttcgctcacacatcgtctaacaggcaggagtgtgctcgcccatttgcaccagagttggagcatgtgtgtggaaggccattagggttgcggttcgataagaaaaccggagatctctacatagcggatgcctactttggccttcttgttgttggtcctgctggtggtttagccaaacctctggttacagaagctgaggggcagccgtttcgtttcactaatgatttggatattgatgagcaggaagatgtgatttactttacagatactagtgccagattccagagaaggcaattcttagctgctgttttgaacgtcgataagactggaaggtttatcaagtatgatagatcaagcaagaaagcgacagtcttattacaaggccttgcatttgcaaacggcgttgcactaagcaaagaccggtcttttgtattggtagtcgaaacaactacttgcaagattctaagactttggctctctggtccaaacgcaggaacacaccaagtgtttgctgagcttccgggtttccctgacaacatcagaagaaactcgaatggagaattctgggtcgctttacactcaaagaaaggtcttttcgcgaaactatcacttactcaaacttggttcagggatttggtgcttagacttccgatcagtccccaacgcctgcactcgctgttcactggaggaatacctcatgctacagccataaagctgagtgaatcaggtaaggttttggaggtacttgaggataaggaaggaaagacattgaggtttataagtgaagtggaagagaaagacggcaagctttggattggttctgttctcgtgccttttcttggtgtctatgatttgtag

SEQ ID NO: 97209 - protein, 372 aa, Arabidopsis thaliana
  peptide (1)..(372): Ceres Seq. ID no. 12736440
  misc_feature (53)..(367): Pfam Name: Strictosidine synthase Pfam Description: Strictosidine synthase
  misc_feature (1)..(372): Homolog of NCBI NO: 11280567 NR Description: hypothetical protein F24I3.110 - Arabidopsis >gi|6911873|emb|CAB72173.1| putative protein [Arabidopsis
  misc_feature (1)..(372): Homolog of NCBI NO: 30694556 NR Description: strictosidine synthase-related [Arabidopsis
  misc_feature (37)..(372): Homolog of NCBI NO: 8489790 NR Description: putative strictosidine synthase [Lycopersicon
  misc_feature (31)..(372): Homolog of NCBI NO: 22326950 NR Description: similar to strictosidine synthase-related; id: At5g22020.1 [Arabidopsis thaliana]
  misc_feature (32)..(372): Homolog of NCBI NO: 18390900 NR Description: strictosidine synthase-related; protein id: supported by cDNA: gi_16930480, supported by cDNA: gi_17381181 thaliana] >gi|16930481|gb|AAL31926.1|AF419594_1 At1g08470/T27G7_9
  misc_feature (8)..(371): Homolog of NCBI NO: 15230182 NR Description: strictosidine synthase-related; protein id: supported by cDNA: gi_13877836 [Arabidopsis thaliana]
  misc_feature (26)..(371): Homolog of NCBI NO: 6759491 NR Description: hypothetical protein [Arabidopsis thaliana]
  misc_feature (8)..(371): Homolog of NCBI NO: 13877837 NR Description: unknown protein [Arabidopsis thaliana]
  misc_feature (31)..(371): Homolog of NCBI NO: 40538997 NR Description: putative strictosidine synthase [Oryza sativa
  misc_feature (32)..(235): Homolog of NCBI NO: 25335889 NR Description: protein T27G7.16 [imported] - Arabidopsis >gi|6664319|gb|AAF22901.1|AC006932_18 T27G7.16 [Arabidopsis
MMIITVFLTVIAAVLAILVKNSQTGSGIFAPPEISGSRDVFPSAKVVNLTGASGPESIAFDPAGEGPYVGVSDGRILKWRGEPLGWSDFAHTSSNRQECARPFAPELEHVCGRPLGLRFDKKTGDLYIADAYFGLLVVGPAGGLAKPLVTEAEGQPFRFTNDLDIDEQEDVIYFTDTSARFQRRQFLAAVLNVDKTGRFIKYDRSSKKATVLLQGLAFANGVALSKDRSFVLVVETTTCKILRLWLSGPNAGTHQVFAELPGFPDNIRRNSNGEFWVALHSKKGLFAKLSLTQTWFRDLVLRLPISPQRLHSLFTGGIPHATAIKLSESGKVLEVLEDKEGKTLRFISEVEEKDGKLWIGSVLVPFLGVYDL

SEQ ID NO: 97210 - protein, 371 aa, Arabidopsis thaliana
  peptide (1)..(371): Ceres Seq. ID no. 12736441
  misc_feature (52)..(366): Pfam Name: Strictosidine synthase Pfam Description: Strictosidine synthase
  misc_feature (1)..(371): Homolog of NCBI NO: 11280567 NR Description: hypothetical protein F24I3.110 - Arabidopsis >gi|6911873|emb|CAB72173.1| putative protein [Arabidopsis
  misc_feature (1)..(371): Homolog of NCBI NO: 30694556 NR Description: strictosidine synthase-related [Arabidopsis
  misc_feature (36)..(371): Homolog of NCBI NO: 8489790 NR Description: putative strictosidine synthase [Lycopersicon
  misc_feature (30)..(371): Homolog of NCBI NO: 22326950 NR Description: similar to strictosidine synthase-related; id: At5g22020.1 [Arabidopsis thaliana]
  misc_feature (31)..(371): Homolog of NCBI NO: 18390900 NR Description: strictosidine synthase-related; protein id: supported by cDNA: gi_16930480, supported by cDNA: gi_17381181 thaliana] >gi|16930481|gb|AAL31926.1|AF419594_1 At1g08470/T27G7_9
  misc_feature (7)..(370): Homolog of NCBI NO: 15230182 NR Description: strictosidine synthase-related; protein id: supported by cDNA: gi_13877836 [Arabidopsis thaliana]
  misc_feature (25)..(370): Homolog of NCBI NO: 6759491 NR Description: hypothetical protein [Arabidopsis thaliana]
  misc_feature (7)..(370): Homolog of NCBI NO: 13877837 NR Description: unknown protein [Arabidopsis thaliana]
  misc_feature (30)..(370): Homolog of NCBI NO: 40538997 NR Description: putative strictosidine synthase [Oryza sativa
  misc_feature (31)..(234): Homolog of NCBI NO: 25335889 NR Description: protein T27G7.16 [imported] - Arabidopsis >gi|6664319|gb|AAF22901.1|AC006932_18 T27G7.16 [Arabidopsis
MIITVFLTVIAAVLAILVKNSQTGSGIFAPPEISGSRDVFPSAKVVNLTGASGPESIAFDPAGEGPYVGVSDGRILKWRGEPLGWSDFAHTSSNRQECARPFAPELEHVCGRPLGLRFDKKTGDLYIADAYFGLLVVGPAGGLAKPLVTEAEGQPFRFTNDLDIDEQEDVIYFTDTSARFQRRQFLAAVLNVDKTGRFIKYDRSSKKATVLLQGLAFANGVALSKDRSFVLVVETTTCKILRLWLSGPNAGTHQVFAELPGFPDNIRRNSNGEFWVALHSKKGLFAKLSLTQTWFRDLVLRLPISPQRLHSLFTGGIPHATAIKLSESGKVLEVLEDKEGKTLRFISEVEEKDGKLWIGSVLVPFLGVYDL

SEQ ID NO: 97211 - DNA, 1302 bp, Arabidopsis thaliana
  misc_feature (1)..(1302): Ceres Seq. ID no. 12736538
  misc_feature: MA Experiment ID: 20000327 Result: Up-regulated in Transcription
  misc_feature: MA Experiment 20000327 PARAMETER Experiment Name: At_42deg_Heat_Sub_P Parameter: Age (day) Value: 14
  misc_feature: MA Experiment 20000327 PARAMETER Experiment Name: At_42deg_Heat_Sub_P Parameter: Organism Value: A. thaliana
  misc_feature: MA Experiment 20000327 PARAMETER Experiment Name: At_42deg_Heat_Sub_P Parameter: Plant Line Value: WS
  misc_feature: MA Experiment 20000327 PARAMETER Experiment Name: At_42deg_Heat_Sub_P Parameter: Temperature (deg C) Value: 42 vs. 22
  misc_feature: MA Experiment 20000327 PARAMETER Experiment Name: At_42deg_Heat_Sub_P Parameter: Timepoint (hr) Value: 1
  misc_feature: MA Experiment 20000327 PARAMETER Experiment Name: At_42deg_Heat_Sub_P Parameter: Tissue Value: Aerial
atgaacagagcaatgccgcagccgcgaccggaaactatacgtggcagtttaaaacctcacatcatggtgtttccatatccagcacaaggccacttgcttcctcttctcgacttaacccatcaactctgtcttcgtggcctcacagtctccatcatcgtcactcctaaaaaccttccttacctctctcctcttctctccgctcatccatccgctgtttccgtcgtcactttacctttccctcaccatcctttaatcccttccggggttgaaaacgttaaagatctaggtggttacggaaatcccttgatcatggcttctcttcgtcagcttcgagagcctatcgtcaactggttaagttctcatccaaatccaccggtcgctctcatttctgatttcttccttggatggaccaaagatcttggtattcctcgctttgctttcttcagttctggagcattcttagcttcgattctccattttgtctctgacaagcctcatctctttgaatcaactgagcctgtctgtttatcggatcttcctcgctcccctgttttcaaaacagagcatctcccgtctttaatccctcagtctccattatcgcaagatcttgaaagtgttaaagacagtaccatgaatttttcgagttatggttgtattttcaatacttgtgagtgtctggaagaggattacatggagtatgtgaagcagaaagtgagtgagaaccgcgttttcggtgttggtccgctttcttcagtcgggttaagtaaggaagattccgtatccaatgtagacgcaaaggcattgttgagttggctagatggatgtccagatgattcagtgctctacatctgcttcggaagtcaaaaggtgttaaccaaagagcagtgtgatgatctggctcttggtctcgagaagagtatgacccgattcgtatgggtggttaagaaagacccgataccggatgggtttgaggatcgggtcgcaggtcgaggaatgattgtgagagggtgggctcctcaagtggctatgttgagtcatgtggcggttggcgggttcttaatccattgtggatggaactcggtgctggaagcgatggctagcggaacaatgatcttggcatggccaatggaagcagaccagtttgtagatgcgaggttggtagtggagcatatgggtgtggcggttagtgtatgtgaagggggtaagactgtgcctgacccgtatgagatgggtcggattatcgctgacacaatgggtgagagtggaggcgaggcgcgtgctcgggctaaggagatgggatag

SEQ ID NO: 97212 - protein, 433 aa, Arabidopsis thaliana
  peptide (1)..(433): Ceres Seq. ID no. 12736539
  misc_feature (1)..(433): Homolog of NCBI NO: 15223779 NR Description: putative glucosyl transferase; protein id: [Arabidopsis thaliana] >gi|25286807|pir||H96549 hypothetical
  misc_feature (16)..(432): Homolog of NCBI NO: 15242769 NR Description: putative protein; protein id: At5g03490.1
  misc_feature (18)..(432): Homolog of NCBI NO: 22330612 NR Description: putative glucosyltransferase; protein id:
  misc_feature (18)..(432): Homolog of NCBI NO: 25406301 NR Description: protein glucosyltransferase F2P9.25 [imported] - thaliana >gi|12325153|gb|AAG52529.1|AC016662_23 putative
  misc_feature (33)..(428): Homolog of NCBI NO: 19911191 NR Description: glucosyltransferase like protein [Vigna angularis]
  misc_feature (32)..(432): Homolog of NCBI NO: 20260128 NR Description: putative glucosyltransferase [Arabidopsis
  misc_feature (42)..(432): Homolog of NCBI NO: 10241430 NR Description: putative glucosyltransferase [Oryza sativa
  misc_feature (20)..(432): Homolog of NCBI NO: 2232354 NR Description: UDPG glucosyltransferase [Solanum berthaultii]
  misc_feature (238)..(420): Homolog of NCBI NO: 18390599 NR Description: expressed protein; protein id: At1g06000.1, by cDNA: 1040., supported by cDNA: gi_20260467 [Arabidopsis
  misc_feature (18)..(162): Homolog of NCBI NO: 18390599 NR Description: expressed protein; protein id: At1g06000.1, by cDNA: 1040., supported by cDNA: gi_20260467 [Arabidopsis
MNRAMPQPRPETIRGSLKPHIMVFPYPAQGHLLPLLDLTHQLCLRGLTVSIIVTPKNLPYLSPLLSAHPSAVSVVTLPFPHHPLIPSGVENVKDLGGYGNPLIMASLRQLREPIVNWLSSHPNPPVALISDFFLGWTKDLGIPRFAFFSSGAFLASILHFVSDKPHLFESTEPVCLSDLPRSPVFKTEHLPSLIPQSPLSQDLESVKDSTMNFSSYGCIFNTCECLEEDYMEYVKQKVSENRVFGVGPLSSVGLSKEDSVSNVDAKALLSWLDGCPDDSVLYICFGSQKVLTKEQCDDLALGLEKSMTRFVWVVKKDPIPDGFEDRVAGRGMIVRGWAPQVAMLSHVAVGGFLIHCGWNSVLEAMASGTMILAWPMEADQFVDARLVVEHMGVAVSVCEGGKTVPDPYEMGRIIADTMGESGGEARARAKEMG

SEQ ID NO: 97213 - protein, 429 aa, Arabidopsis thaliana; identical to SEQ ID NO: 72048
  peptide (1)..(429): Ceres Seq. ID no. 12736540
  misc_feature (1)..(429): Homolog of NCBI NO: 15223779 NR Description: putative glucosyl transferase; protein id: [Arabidopsis thaliana] >gi|25286807|pir||H96549 hypothetical
  misc_feature (12)..(428): Homolog of NCBI NO: 15242769 NR Description: putative protein; protein id: At5g03490.1
  misc_feature (14)..(428): Homolog of NCBI NO: 22330612 NR Description: putative glucosyltransferase; protein id:
  misc_feature (14)..(428): Homolog of NCBI NO: 25406301 NR Description: protein glucosyltransferase F2P9.25 [imported] - thaliana >gi|12325153|gb|AAG52529.1|AC016662_23 putative
  misc_feature (29)..(424): Homolog of NCBI NO: 19911191 NR Description: glucosyltransferase like protein [Vigna angularis]
  misc_feature (28)..(428): Homolog of NCBI NO: 20260128 NR Description: putative glucosyltransferase [Arabidopsis
  misc_feature (38)..(428): Homolog of NCBI NO: 10241430 NR Description: putative glucosyltransferase [Oryza sativa
  misc_feature (16)..(428): Homolog of NCBI NO: 2232354 NR Description: UDPG glucosyltransferase [Solanum berthaultii]
  misc_feature (234)..(416): Homolog of NCBI NO: 18390599 NR Description: expressed protein; protein id: At1g06000.1, by cDNA: 1040., supported by cDNA: gi_20260467 [Arabidopsis
  misc_feature (14)..(158): Homolog of NCBI NO: 18390599 NR Description: expressed protein; protein id: At1g06000.1, by cDNA: 1040., supported by cDNA: gi_20260467 [Arabidopsis

SEQ ID NO: 97214 - protein, 412 aa, Arabidopsis thaliana; identical to SEQ ID NO: 72049
  peptide (1)..(412): Ceres Seq. ID no. 12736541
  misc_feature (1)..(412): Homolog of NCBI NO: 15223779 NR Description: putative glucosyl transferase; protein id: [Arabidopsis thaliana] >gi|25286807|pir||H96549 hypothetical
  misc_feature (1)..(411): Homolog of NCBI NO: 15242769 NR Description: putative protein; protein id: At5g03490.1
  misc_feature (1)..(411): Homolog of NCBI NO: 22330612 NR Description: putative glucosyltransferase; protein id:
  misc_feature (1)..(411): Homolog of NCBI NO: 25406301 NR Description: protein glucosyltransferase F2P9.25 [imported] - thaliana >gi|12325153|gb|AAG52529.1|AC016662_23 putative
  misc_feature (12)..(407): Homolog of NCBI NO: 19911191 NR Description: glucosyltransferase like protein [Vigna angularis]
  misc_feature (11)..(411): Homolog of NCBI NO: 20260128 NR Description: putative glucosyltransferase [Arabidopsis
  misc_feature (21)..(411): Homolog of NCBI NO: 10241430 NR Description: putative glucosyltransferase [Oryza sativa
  misc_feature (1)..(411): Homolog of NCBI NO: 2232354 NR Description: UDPG glucosyltransferase [Solanum berthaultii]
  misc_feature (217)..(399): Homolog of NCBI NO: 18390599 NR Description: expressed protein; protein id: At1g06000.1, by cDNA: 1040., supported by cDNA: gi_20260467 [Arabidopsis
  misc_feature (1)..(141): Homolog of NCBI NO: 18390599 NR Description: expressed protein; protein id: At1g06000.1, by cDNA: 1040., supported by cDNA: gi_20260467 [Arabidopsis

SEQ ID NO: 97215 - DNA, 1452 bp, Arabidopsis thaliana
  misc_feature (1)..(1452): Ceres Seq. ID no. 12736574
  misc_feature: MA Experiment ID: 20000180 Result: Down-regulated in Transcription
  misc_feature: MA Experiment 20000180 PARAMETER Experiment Name: At_Germinating_Seeds_P Parameter: Age (hr) Value: 24 vs. 0
  misc_feature: MA Experiment 20000180 PARAMETER Experiment Name: At_Germinating_Seeds_P Parameter: Tissue Value: Germinating Seeds
  misc_feature: MA Experiment ID: 20000456 Result: Up-regulated in Transcription
  misc_feature: MA Experiment 20000456 PARAMETER Experiment Name: At_100uM_BA_P Parameter: Age (day) Value: 14
  misc_feature: MA Experiment 20000456 PARAMETER Experiment Name: At_100uM_BA_P Parameter: Organism Value: A. thaliana
  misc_feature: MA Experiment 20000456 PARAMETER Experiment Name: At_100uM_BA_P Parameter: Plant Line Value: WS
  misc_feature: MA Experiment 20000456 PARAMETER Experiment Name: At_100uM_BA_P Parameter: Timepoint (hr) Value: 6
  misc_feature: MA Experiment 20000456 PARAMETER Experiment Name: At_100uM_BA_P Parameter: Tissue Value: Aerial
  misc_feature: MA Experiment 20000456 PARAMETER Experiment Name: At_100uM_BA_P Parameter: Treatment Value: 100uM BA vs. No Treatment
  misc_feature: MA Experiment ID: 20001247 Result: Down-regulated in Transcription
  misc_feature: MA Experiment 20001247 PARAMETER Experiment Name: At_Far-red-induction_P Parameter: Age (day) Value: 7
  misc_feature: MA Experiment 20001247 PARAMETER Experiment Name: At_Far-red-induction_P Parameter: Light Value: Far-red vs. White
  misc_feature: MA Experiment 20001247 PARAMETER Experiment Name: At_Far-red-induction_P Parameter: Organism Value: A. thaliana
  misc_feature: MA Experiment 20001247 PARAMETER Experiment Name: At_Far-red-induction_P Parameter: Plant Line Value: Columbia
  misc_feature: MA Experiment 20001247 PARAMETER Experiment Name: At_Far-red-induction_P Parameter: Timepoint (hr) Value: 1
  misc_feature: MA Experiment 20001247 PARAMETER Experiment Name: At_Far-red-induction_P Parameter: Tissue Value: Whole Plant
  misc_feature: MA Experiment ID: 20001451 Result: Down-regulated in Transcription
  misc_feature: MA Experiment 20001451 PARAMETER Experiment Name: At_Far-red-induction_P Parameter: Age (day) Value: 7
  misc_feature: MA Experiment 20001451 PARAMETER Experiment Name: At_Far-red-induction_P Parameter: Light Value: Far-red vs. White
  misc_feature: MA Experiment 20001451 PARAMETER Experiment Name: At_Far-red-induction_P Parameter: Organism Value: A. thaliana
  misc_feature: MA Experiment 20001451 PARAMETER Experiment Name: At_Far-red-induction_P Parameter: Plant Line Value: Columbia
  misc_feature: MA Experiment 20001451 PARAMETER Experiment Name: At_Far-red-induction_P Parameter: Timepoint (hr) Value: 24
  misc_feature: MA Experiment 20001451 PARAMETER Experiment Name: At_Far-red-induction_P Parameter: Tissue Value: Whole Plant
  misc_feature: MA Experiment ID: 20001458 Result: Up-regulated in Transcription
  misc_feature: MA Experiment 20001458 PARAMETER Experiment Name: At_50mM_NH4NO3_L-to-H_P Parameter: Age (day) Value: Undefined
  misc_feature: MA Experiment 20001458 PARAMETER Experiment Name: At_50mM_NH4NO3_L-to-H_P Parameter: Organism Value: Undefined
  misc_feature: MA Experiment 20001458 PARAMETER Experiment Name: At_50mM_NH4NO3_L-to-H_P Parameter: Plant Line Value: Undefined
  misc_feature: MA Experiment 20001458 PARAMETER Experiment Name: At_50mM_NH4NO3_L-to-H_P Parameter: Timepoint (hr) Value: 2
  misc_feature: MA Experiment 20001458 PARAMETER Experiment Name: At_50mM_NH4NO3_L-to-H_P Parameter: Tissue Value: Siliques
  misc_feature: MA Experiment 20001458 PARAMETER Experiment Name: At_50mM_NH4NO3_L-to-H_P Parameter: Treatment Value: 50mM NH4NO3 vs. 100mM Manitol
  misc_feature: MA Experiment ID: 20001555 Result: Up-regulated in Transcription
  misc_feature: MA Experiment 20001555 PARAMETER Experiment Name: At_Drought_Soil_Dry_P Parameter: Age (day) Value: 24
  misc_feature: MA Experiment 20001555 PARAMETER Experiment Name: At_Drought_Soil_Dry_P Parameter: Organism Value: A. thaliana
  misc_feature: MA Experiment 20001555 PARAMETER Experiment Name: At_Drought_Soil_Dry_P Parameter: Plant Line Value: WS
  misc_feature: MA Experiment 20001555 PARAMETER Experiment Name: At_Drought_Soil_Dry_P Parameter: Post Timepoint (hr) Value: None
  misc_feature: MA Experiment 20001555 PARAMETER Experiment Name: At_Drought_Soil_Dry_P Parameter: Post-Treatment Value: None
  misc_feature: MA Experiment 20001555 PARAMETER Experiment Name: At_Drought_Soil_Dry_P Parameter: Timepoint (day) Value: 10
  misc_feature: MA Experiment 20001555 PARAMETER Experiment Name: At_Drought_Soil_Dry_P Parameter: Treatment Value: Drought vs. No Drought
  misc_feature: MA Experiment ID: 20001556 Result: Up-regulated in Transcription
  misc_feature: MA Experiment 20001556 PARAMETER Experiment Name: At_Drought_Soil_Dry_P Parameter: Age (day) Value: 26
  misc_feature: MA Experiment 20001556 PARAMETER Experiment Name: At_Drought_Soil_Dry_P Parameter: Organism Value: A. thaliana
  misc_feature: MA Experiment 20001556 PARAMETER Experiment Name: At_Drought_Soil_Dry_P Parameter: Plant Line Value: WS
  misc_feature: MA Experiment 20001556 PARAMETER Experiment Name: At_Drought_Soil_Dry_P Parameter: Post Timepoint (hr) Value: None
  misc_feature: MA Experiment 20001556 PARAMETER Experiment Name: At_Drought_Soil_Dry_P Parameter: Post-Treatment Value: None
  misc_feature: MA Experiment 20001556 PARAMETER Experiment Name: At_Drought_Soil_Dry_P Parameter: Timepoint (day) Value: 12
  misc_feature: MA Experiment 20001556 PARAMETER Experiment Name: At_Drought_Soil_Dry_P Parameter: Treatment Value: Drought vs. No Drought
  misc_feature: MA Experiment ID: 20001557 Result: Up-regulated in Transcription
  misc_feature: MA Experiment 20001557 PARAMETER Experiment Name: At_Drought_Soil_Dry_P Parameter: Age (day) Value: 27
  misc_feature: MA Experiment 20001557 PARAMETER Experiment Name: At_Drought_Soil_Dry_P Parameter: Organism Value: A. thaliana
  misc_feature: MA Experiment 20001557 PARAMETER Experiment Name: At_Drought_Soil_Dry_P Parameter: Plant Line Value: WS
  misc_feature: MA Experiment 20001557 PARAMETER Experiment Name: At_Drought_Soil_Dry_P Parameter: Post Timepoint (hr) Value: 3
  misc_feature: MA Experiment 20001557 PARAMETER Experiment Name: At_Drought_Soil_Dry_P Parameter: Post-Treatment Value: Re-Water vs. No Drought
  misc_feature: MA Experiment 20001557 PARAMETER Experiment Name: At_Drought_Soil_Dry_P Parameter: Timepoint (day) Value: 13
  misc_feature: MA Experiment 20001557 PARAMETER Experiment Name: At_Drought_Soil_Dry_P Parameter: Treatment Value: Drought vs. No Drought
  misc_feature: MA Experiment ID: 20001558 Result: Up-regulated in Transcription
  misc_feature: MA Experiment 20001558 PARAMETER Experiment Name: At_Drought_Soil_Dry_P Parameter: Age (day) Value: 27
  misc_feature: MA Experiment 20001558 PARAMETER Experiment Name: At_Drought_Soil_Dry_P Parameter: Organism Value: A. thaliana
  misc_feature: MA Experiment 20001558 PARAMETER Experiment Name: At_Drought_Soil_Dry_P Parameter: Plant Line Value: WS
  misc_feature: MA Experiment 20001558 PARAMETER Experiment Name: At_Drought_Soil_Dry_P Parameter: Post Timepoint (hr) Value: 6
  misc_feature: MA Experiment 20001558 PARAMETER Experiment Name: At_Drought_Soil_Dry_P Parameter: Post-Treatment Value: Re-Water vs. No Drought
  misc_feature: MA Experiment 20001558 PARAMETER Experiment Name: At_Drought_Soil_Dry_P Parameter: Timepoint (day) Value: 13
  misc_feature: MA Experiment 20001558 PARAMETER Experiment Name: At_Drought_Soil_Dry_P Parameter: Treatment Value: Drought vs. No Drought
  misc_feature: MA Experiment ID: 20001757 Result: Up-regulated in Transcription
  misc_feature: MA Experiment 20001757 PARAMETER Experiment Name: At_50mM_NH4NO3_L-to-H_P Parameter: Timepoint (hr) Value: 6
  misc_feature: MA Experiment 20001757 PARAMETER Experiment Name: At_50mM_NH4NO3_L-to-H_P Parameter: Tissue Value: Leaf
  misc_feature: MA Experiment 20001757 PARAMETER Experiment Name: At_50mM_NH4NO3_L-to-H_P Parameter: Treatment Value: 50mM NH4NO3 vs 100mM Mannitol
tctcccgacactttcctcttcaaatcccaaacggctatctgactttggaagaaagagagattcagagtggagaatattatggaaggaactttagatgaagagaatctagtcttcgaaaccaccaaaggtatcaaaccaatcaagagtttcgatgacatggggatgaatgataaagttcttcgcggcgtttatgactacggttacaagaaaccatctgagattcagcagagagctttggttccgattctcaaaggacgagacgtcatagctcaggctcagtccggtactggtaaaacctctatgattgctatctccgtttgccaaatcgtcaacatatcctccagaaaggttcaagtcttggtgttgtctccatcaagagagctggcttcacaaacagagaagactatacaggctattggggcacataccaatattcaggcgcatgcttgcattggtggtaagagcatcggtgaagatatcaagaagctagagcgtggtgtccacgctgtgtctgggacacctggtcgagtttacgatatgataaagagaggaagcttacaaactaaagctgttaaacttttggttctggatgaatcagatgaaatgctgagtaaaggtttgaaagaccagatttatgacgtttacagagctcttccacacgatattcaggtttgcttgatttctgctactcttcctcaagagattttggagatgacagaaaagtttatgacagatcctgtgaggattcttgtgaagcctgatgaattgactcttgaaggaatcaaacaatactatgttgatgttgataaagaagagtggaaattcgatactctttgcgatctttatggaagacttactattaaccaagctattatcttctgcaacacaagacaaaaggttgattggcttactgagaagatgaggagtagcaatttcatagtctcatcaatgcatggagacaaacgtcaaaaggagagagatgatatcatgaaccagtttcggtcatttaaaagccgtgttttaatcgcctcagatgtatgggcacgagggatcgacgttcaaactgtttctcatgtcatcaattatgatatacccaacaacccggagctatacattcatcgtataggacgagctggtcgttttggtcgtgaaggtgttgccattaactttgtaaaatcttcggatatgaaagatcttaaggatattgagcgacattacggtactaaaatccgcgagatgccagctgatcttgtctaaagatgttgtttccttgaagctgaagttatagaatcggttttgaaagaagttttgttcttcaactatccattggtttagacttaggcacaagctctttgaaaatgtatacctcacttcagtcatttcttttgtaccaaccaaaataatattattgtagctattttattttctgaaaatcaacaaattgtgtttggc

SEQ ID NO: 97216 - protein, 392 aa, Arabidopsis thaliana
  peptide (1)..(392): Ceres Seq. ID no. 12736575
  misc_feature (35)..(238): Pfam Name: DEAD/DEAH box helicase Pfam Description: DEAD/DEAH box helicase
  misc_feature (1)..(392): Homolog of NCBI NO: 15223841 NR Description: eukaryotic translation initiation factor 4A putative; protein id: At1g51380.1, supported by cDNA: supported by cDNA: gi_18958045 [Arabidopsis thaliana]
  misc_feature (46)..(392): Homolog of NCBI NO: 12325365 NR Description: photosystem II protein psbT, putative, 5'
  misc_feature (3)..(392): Homolog of NCBI NO: 15230945 NR Description: eukaryotic translation initiation factor 4A putative; protein id: At3g19760.1, supported by cDNA: gi_15215677
  misc_feature (5)..(392): Homolog of NCBI NO: 11277760 NR Description: RNA helicase RH2 [imported] - Arabidopsis >gi|3775985|emb|CAA09195.1| RNA helicase [Arabidopsis thaliana]
  misc_feature (3)..(392): Homolog of NCBI NO: 15215678 NR Description: AT3g19760/MMB12_21 [Arabidopsis thaliana]
  misc_feature (3)..(392): Homolog of NCBI NO: 34896594 NR Description: putative translation initiation factor [Oryza >gi|13957631|gb|AAK50586.1| putative translation initiation
  misc_feature (5)..(392): Homolog of NCBI NO: 1170507 NR Description: Eukaryotic initiation factor 4A-3 (eIF-4A-3)
  misc_feature (5)..(391): Homolog of NCBI NO: 7443503 NR Description: translation initiation factor - garden pea
  misc_feature (6)..(392): Homolog of NCBI NO: 24645031 NR Description: CG7483-PA [Drosophila melanogaster]
  misc_feature (1)..(392): Homolog of NCBI NO: 23479359 NR Description: RNA helicase-1 [Plasmodium yoelii yoelii]
MEGTLDEENLVFETTKGIKPIKSFDDMGMNDKVLRGVYDYGYKKPSEIQQRALVPILKGRDVIAQAQSGTGKTSMIAISVCQIVNISSRKVQVLVLSPSRELASQTEKTIQAIGAHTNIQAHACIGGKSIGEDIKKLERGVHAVSGTPGRVYDMIKRGSLQTKAVKLLVLDESDEMLSKGLKDQIYDVYRALPHDIQVCLISATLPQEILEMTEKFMTDPVRILVKPDELTLEGIKQYYVDVDKEEWKFDTLCDLYGRLTINQAIIFCNTRQKVDWLTEKMRSSNFIVSSMHGDKRQKERDDIMNQFRSFKSRVLIASDVWARGIDVQTVSHVINYDIPNNPELYIHRIGRAGRFGREGVAINFVKSSDMKDLKDIERHYGTKIREMPADLV

SEQ ID NO: 97217 - protein, 366 aa, Arabidopsis thaliana
  peptide (1)..(366): Ceres Seq. ID no. 12736576
  misc_feature (9)..(212): Pfam Name: DEAD/DEAH box helicase Pfam Description: DEAD/DEAH box helicase
  misc_feature (1)..(366): Homolog of NCBI NO: 15223841 NR Description: eukaryotic translation initiation factor 4A putative; protein id: At1g51380.1, supported by cDNA: supported by cDNA: gi_18958045 [Arabidopsis thaliana]
  misc_feature (20)..(366): Homolog of NCBI NO: 12325365 NR Description: photosystem II protein psbT, putative, 5'
  misc_feature (1)..(366): Homolog of NCBI NO: 15230945 NR Description: eukaryotic translation initiation factor 4A putative; protein id: At3g19760.1, supported by cDNA: gi_15215677
  misc_feature (1)..(366): Homolog of NCBI NO: 11277760 NR Description: RNA helicase RH2 [imported] - Arabidopsis >gi|3775985|emb|CAA09195.1| RNA helicase [Arabidopsis thaliana]
  misc_feature (1)..(366): Homolog of NCBI NO: 15215678 NR Description: AT3g19760/MMB12_21 [Arabidopsis thaliana]
  misc_feature (1)..(366): Homolog of NCBI NO: 34896594 NR Description: putative translation initiation factor [Oryza >gi|13957631|gb|AAK50586.1| putative translation initiation
  misc_feature (1)..(366): Homolog of NCBI NO: 1170507 NR Description: Eukaryotic initiation factor 4A-3 (eIF-4A-3)
  misc_feature (1)..(365): Homolog of NCBI NO: 7443503 NR Description: translation initiation factor - garden pea
  misc_feature (1)..(366): Homolog of NCBI NO: 24645031 NR Description: CG7483-PA [Drosophila melanogaster]
  misc_feature (1)..(366): Homolog of NCBI NO: 23479359 NR Description: RNA helicase-1 [Plasmodium yoelii yoelii]
MGMNDKVLRGVYDYGYKKPSEIQQRALVPILKGRDVIAQAQSGTGKTSMIAISVCQIVNISSRKVQVLVLSPSRELASQTEKTIQAIGAHTNIQAHACIGGKSIGEDIKKLERGVHAVSGTPGRVYDMIKRGSLQTKAVKLLVLDESDEMLSKGLKDQIYDVYRALPHDIQVCLISATLPQEILEMTEKFMTDPVRILVKPDELTLEGIKQYYVDVDKEEWKFDTLCDLYGRLTINQAIIFCNTRQKVDWLTEKMRSSNFIVSSMHGDKRQKERDDIMNQFRSFKSRVLIASDVWARGIDVQTVSHVINYDIPNNPELYIHRIGRAGRFGREGVAINFVKSSDMKDLKDIERHYGTKIREMPADLV

SEQ ID NO: 97218 - protein, 364 aa, Arabidopsis thaliana
  peptide (1)..(364): Ceres Seq. ID no. 12736577
  misc_feature (7)..(210): Pfam Name: DEAD/DEAH box helicase Pfam Description: DEAD/DEAH box helicase
  misc_feature (1)..(364): Homolog of NCBI NO: 15223841 NR Description: eukaryotic translation initiation factor 4A putative; protein id: At1g51380.1, supported by cDNA: supported by cDNA: gi_18958045 [Arabidopsis thaliana]
  misc_feature (18)..(364): Homolog of NCBI NO: 12325365 NR Description: photosystem II protein psbT, putative, 5'
  misc_feature (1)..(364): Homolog of NCBI NO: 15230945 NR Description: eukaryotic translation initiation factor 4A putative; protein id: At3g19760.1, supported by cDNA: gi_15215677
  misc_feature (1)..(364): Homolog of NCBI NO: 11277760 NR Description: RNA helicase RH2 [imported] - Arabidopsis >gi|3775985|emb|CAA09195.1| RNA helicase [Arabidopsis thaliana]
  misc_feature (1)..(364): Homolog of NCBI NO: 15215678 NR Description: AT3g19760/MMB12_21 [Arabidopsis thaliana]
  misc_feature (1)..(364): Homolog of NCBI NO: 34896594 NR Description: putative translation initiation factor [Oryza >gi|13957631|gb|AAK50586.1| putative translation initiation
  misc_feature (1)..(364): Homolog of NCBI NO: 1170507 NR Description: Eukaryotic initiation factor 4A-3 (eIF-4A-3)
  misc_feature (1)..(363): Homolog of NCBI NO: 7443503 NR Description: translation initiation factor - garden pea
  misc_feature (1)..(364): Homolog of NCBI NO: 24645031 NR Description: CG7483-PA [Drosophila melanogaster]
  misc_feature (1)..(364): Homolog of NCBI NO: 23479359 NR Description: RNA helicase-1 [Plasmodium yoelii yoelii]
MNDKVLRGVYDYGYKKPSEIQQRALVPILKGRDVIAQAQSGTGKTSMIAISVCQIVNISSRKVQVLVLSPSRELASQTEKTIQAIGAHTNIQAHACIGGKSIGEDIKKLERGVHAVSGTPGRVYDMIKRGSLQTKAVKLLVLDESDEMLSKGLKDQIYDVYRALPHDIQVCLISATLPQEILEMTEKFMTDPVRILVKPDELTLEGIKQYYVDVDKEEWKFDTLCDLYGRLTINQAIIFCNTRQKVDWLTEKMRSSNFIVSSMHGDKRQKERDDIMNQFRSFKSRVLIASDVWARGIDVQTVSHVINYDIPNNPELYIHRIGRAGRFGREGVAINFVKSSDMKDLKDIERHYGTKIREMPADLV

SEQ ID NO: 97219 - DNA, 1701 bp, Arabidopsis thaliana
  misc_feature (1)..(1701): Ceres Seq. ID no. 12736582
  misc_feature: MA Experiment ID: 20000264 Result: Up-regulated in Transcription
  misc_feature: MA Experiment 20000264 PARAMETER Experiment Name: At_Open_Flower_P Parameter: Age (day) Value: 21
  misc_feature: MA Experiment 20000264 PARAMETER Experiment Name: At_Open_Flower_P Parameter: Plant Line Value: WS
  misc_feature: MA Experiment 20000264 PARAMETER Experiment Name: At_Open_Flower_P Parameter: Tissue Value: Open Flower vs. Whole Plant
  misc_feature: MA Experiment ID: 20000265 Result: Up-regulated in Transcription
  misc_feature: MA Experiment 20000265 PARAMETER Experiment Name: At_Open_Flower_P Parameter: Age (day) Value: 21
  misc_feature: MA Experiment 20000265 PARAMETER Experiment Name: At_Open_Flower_P Parameter: Plant Line Value: WS
  misc_feature: MA Experiment 20000265 PARAMETER Experiment Name: At_Open_Flower_P Parameter: Tissue Value: Closed Flower vs. Whole Plant
  misc_feature: MA Experiment ID: 20000286 Result: Up-regulated in Transcription
  misc_feature: MA Experiment 20000286 PARAMETER Experiment Name: At_Open_Flower_P Parameter: Age (day) Value: 21
  misc_feature: MA Experiment 20000286 PARAMETER Experiment Name: At_Open_Flower_P Parameter: Plant Line Value: WS
  misc_feature: MA Experiment 20000286 PARAMETER Experiment Name: At_Open_Flower_P Parameter: Tissue Value: Half Open vs. Whole Plant
  misc_feature: MA Experiment ID: 20000794 Result: Up-regulated in Transcription
  misc_feature: MA Experiment 20000794 PARAMETER Experiment Name: At_Petals_P Parameter: Age (day) Value: 23-25 days
  misc_feature: MA Experiment 20000794 PARAMETER Experiment Name: At_Petals_P Parameter: Plant Line Value: WS
  misc_feature: MA Experiment 20000794 PARAMETER Experiment Name: At_Petals_P Parameter: Tissue Value: Petals vs. Whole plant
  misc_feature: MA Experiment ID: 20001247 Result: Down-regulated in Transcription
  misc_feature: MA Experiment 20001247 PARAMETER Experiment Name: At_Far-red-induction_P Parameter: Age (day) Value: 7
  misc_feature: MA Experiment 20001247 PARAMETER Experiment Name: At_Far-red-induction_P Parameter: Light Value: Far-red vs. White
  misc_feature: MA Experiment 20001247 PARAMETER Experiment Name: At_Far-red-induction_P Parameter: Organism Value: A. thaliana
  misc_feature: MA Experiment 20001247 PARAMETER Experiment Name: At_Far-red-induction_P Parameter: Plant Line Value: Columbia
  misc_feature: MA Experiment 20001247 PARAMETER Experiment Name: At_Far-red-induction_P Parameter: Timepoint (hr) Value: 1
  misc_feature: MA Experiment 20001247 PARAMETER Experiment Name: At_Far-red-induction_P Parameter: Tissue Value: Whole Plant
  misc_feature: MA Experiment ID: 20001248 Result: Down-regulated in Transcription
  misc_feature: MA Experiment 20001248 PARAMETER Experiment Name: At_Far-red-induction_P Parameter: Age (day) Value: 7
  misc_feature: MA Experiment 20001248 PARAMETER Experiment Name: At_Far-red-induction_P Parameter: Light Value: Far-red vs. White
  misc_feature: MA Experiment 20001248 PARAMETER Experiment Name: At_Far-red-induction_P Parameter: Organism Value: A. thaliana
  misc_feature: MA Experiment 20001248 PARAMETER Experiment Name: At_Far-red-induction_P Parameter: Plant Line Value: Columbia
  misc_feature: MA Experiment 20001248 PARAMETER Experiment Name: At_Far-red-induction_P Parameter: Timepoint (hr) Value: 4
  misc_feature: MA Experiment 20001248 PARAMETER Experiment Name: At_Far-red-induction_P Parameter: Tissue Value: Whole Plant
  misc_feature: MA Experiment ID: 20001458 Result: Down-regulated in Transcription
  misc_feature: MA Experiment 20001458 PARAMETER Experiment Name: At_50mM_NH4NO3_L-to-H_P Parameter: Age (day) Value: Undefined
  misc_feature: MA Experiment 20001458 PARAMETER Experiment Name: At_50mM_NH4NO3_L-to-H_P Parameter: Organism Value: Undefined
  misc_feature: MA Experiment 20001458 PARAMETER Experiment Name: At_50mM_NH4NO3_L-to-H_P Parameter: Plant Line Value: Undefined
  misc_feature: MA Experiment 20001458 PARAMETER Experiment Name: At_50mM_NH4NO3_L-to-H_P Parameter: Timepoint (hr) Value: 2
  misc_feature: MA Experiment 20001458 PARAMETER Experiment Name: At_50mM_NH4NO3_L-to-H_P Parameter: Tissue Value: Siliques
  misc_feature: MA Experiment 20001458 PARAMETER Experiment Name: At_50mM_NH4NO3_L-to-H_P Parameter: Treatment Value: 50mM NH4NO3 vs. 100mM Manitol
  misc_feature: MA Experiment ID: 20001905 Result: Down-regulated in Transcription
  misc_feature: MA Experiment 20001905 PARAMETER Experiment Name: At_Drought_Reproduction_P Parameter: Age (day) Value: 40
  misc_feature: MA Experiment 20001905 PARAMETER Experiment Name: At_Drought_Reproduction_P Parameter: Organism Value: A. thaliana
  misc_feature: MA Experiment 20001905 PARAMETER Experiment Name: At_Drought_Reproduction_P Parameter: Plant Line Value: WS
  misc_feature: MA Experiment 20001905 PARAMETER Experiment Name: At_Drought_Reproduction_P Parameter: Timepoint (day) Value: 10
  misc_feature: MA Experiment 20001905 PARAMETER Experiment Name: At_Drought_Reproduction_P Parameter: Tissue Value: Rosettes
  misc_feature: MA Experiment 20001905 PARAMETER Experiment Name: At_Drought_Reproduction_P Parameter: Treatment Value: Drought vs. No Drought
  misc_feature: MA Experiment ID: 20001911 Result: Down-regulated in Transcription
  misc_feature: MA Experiment 20001911 PARAMETER Experiment Name: At_Drought_Reproduction_P Parameter: Age (day) Value: 40
  misc_feature: MA Experiment 20001911 PARAMETER Experiment Name: At_Drought_Reproduction_P Parameter: Organism Value: A. thaliana
  misc_feature: MA Experiment 20001911 PARAMETER Experiment Name: At_Drought_Reproduction_P Parameter: Plant Line Value: WS
  misc_feature: MA Experiment 20001911 PARAMETER Experiment Name: At_Drought_Reproduction_P Parameter: Timepoint (day) Value: 10
  misc_feature: MA Experiment 20001911 PARAMETER Experiment Name: At_Drought_Reproduction_P Parameter: Tissue Value: Flowers
  misc_feature: MA Experiment 20001911 PARAMETER Experiment Name: At_Drought_Reproduction_P Parameter: Treatment Value: Drought vs. No Drought
acacaaaaaaaaaaaacaaaaaaaaaaatataactctcaaacaacccaatctaaatggcttctctatctttaccaataactctcaagaacccaagattcttctcttcttctcctcaaaacatctttaaaacccaaccccaaaccctagttttgacaacaaagttcaagacttgttccatcatttgctcatcttcatgcacaagcataagctcttcaacgactcaacagaagcagtcaaataaacaaacccatgtgtcagacaacaaacgagaagaaaaagcggaagaagaagaagaagagaaagaagttagtcttcgagaaatttggagagaagtacaaggttgcaataattgggaaggacaactagatccaatgaacaatcatcttcgaagagagatcatacgttatggcgaatttgctcaagcttgctatgactcattcgacttcgatcctcactctaaatactgtggctcttgcaaataccatccttctgatttcttcttaaaccttgacctacatctccacaaaggctacaccataacacgttacctctacgctacatccaacataaacctcccaaacttcttccagaaatcaaaactcagctcgatttggagccaacacgcgaactggatgggttttgttgctgtagctacggacgaagaagaggtgagtcggctcgggagacgtgacatagtcattgcttggagaggcacagtcacttatctcgaatggatctatgacttaaaagacattctttgttcagctaacttcggtgacgacccatctatcaagattgaattagggtttcatgacttatacaccaagaaagaagattcttgcaaattctcttccttctcggctcgggaacaggttttggctgaagtcaaacggcttattgagtactacggtaccgaagaagaaggtcacaagacaagcatcaccgtgacagggcacagcctcggcgcctctctggctttggtcagtgcttatgatatcgcagagctaaacttgaatcacgtaccggagaacaactataaaattccaattactgttttctccttctcgggacctcgagtaggtaacttgaggttcaaggaacgatgtgacgaactaggggttaaagttctgagagtcgttaatgtacacgacaaggtaccttctgttccagggatattcacaaacgagaagtttcagtttcagaagtatgtggaagaaaaaacatcattcccgtggagctacgcgcacgtcggcgtggagcttgccttggaccacaagaaaagcccatttctgaaaccgactaaggatttgggttgtgcacataacctagaagctttgcttcatttggtggatggttatcatggaaaagacgaagaagcagagaagagattttgtttggtgacaaagcgagacatagctttagtgaataagagttgtgatttcttgagaggtgagtaccatgtgccgccttgttggagacaagatgagaacaaaggtatggtcaagaacggcgatggacagtgggttcttccggaccgaccactgcttgaacctcacggaccggaggatatcgctcatcatcttcaacaagttcttgggaaggttaacgatgataattttaaacccacaacgacttaagtcgaaaattaaatataaatagttataaaaatattttcgtaattaatgtgtggatcacgtttg

SEQ ID NO: 97220 - protein, 527 aa, Arabidopsis thaliana
  peptide (1)..(527): Ceres Seq. ID no. 12736583
  misc_feature (1)..(527): Homolog of NCBI NO: 18403524 NR Description: expressed protein; protein id: At1g51440.1, by cDNA: gi_15983395 [Arabidopsis thaliana]
  misc_feature (52)..(513): Homolog of NCBI NO: 30679836 NR Description: lipase (class 3) family [Arabidopsis thaliana]
  misc_feature (69)..(513): Homolog of NCBI NO: 18402385 NR Description: putative lipase; protein id: At2g30550.1, by cDNA: 207043., supported by cDNA: gi_20268777 [Arabidopsis >gi|20198327|gb|AAB63082.2| putative lipase [Arabidopsis
  misc_feature (69)..(513): Homolog of NCBI NO: 25408087 NR Description: probable lipase [imported] - Arabidopsis thaliana
  misc_feature (52)..(434): Homolog of NCBI NO: 18390691 NR Description: lipase, putative; protein id: At1g06800.1, by cDNA: gi_15529150 [Arabidopsis thaliana] At1g06800/F4H5_10 [Arabidopsis thaliana]
  misc_feature (69)..(435): Homolog of NCBI NO: 30684625 NR Description: lipase (class 3) family [Arabidopsis thaliana]
  misc_feature (87)..(506): Homolog of NCBI NO: 15220732 NR Description: lipase, putative; protein id: At1g30370.1
  misc_feature (85)..(433): Homolog of NCBI NO: 15225122 NR Description: putative triacylglycerol lipase; protein id: [Arabidopsis thaliana] >gi|25408176|pir||H84723 probable
  misc_feature (51)..(433): Homolog of NCBI NO: 18390571 NR Description: hypothetical protein; protein id: At1g05800.1
  misc_feature (75)..(435): Homolog of NCBI NO: 7488220 NR Description: probable triacylglycerol lipase - Arabidopsis >gi|2245036|emb|CAB10455.1| triacylglycerol lipase like protein thaliana] >gi|7268433|emb|CAB80953.1| triacylglycerol lipase like
MASLSLPITLKNPRFFSSSPQNIFKTQPQTLVLTTKFKTCSIICSSSCTSISSSTTQQKQSNKQTHVSDNKREEKAEEEEEEKEVSLREIWREVQGCNNWEGQLDPMNNHLRREIIRYGEFAQACYDSFDFDPHSKYCGSCKYHPSDFFLNLDLHLHKGYTITRYLYATSNINLPNFFQKSKLSSIWSQHANWMGFVAVATDEEEVSRLGRRDIVIAWRGTVTYLEWIYDLKDILCSANFGDDPSIKIELGFHDLYTKKEDSCKFSSFSAREQVLAEVKRLIEYYGTEEEGHKTSITVTGHSLGASLALVSAYDIAELNLNHVPENNYKIPITVFSFSGPRVGNLRFKERCDELGVKVLRVVNVHDKVPSVPGIFTNEKFQFQKYVEEKTSFPWSYAHVGVELALDHKKSPFLKPTKDLGCAHNLEALLHLVDGYHGKDEEAEKRFCLVTKRDIALVNKSCDFLRGEYHVPPCWRQDENKGMVKNGDGQWVLPDRPLLEPHGPEDIAHHLQQVLGKVNDDNFKPTTT

SEQ ID NO: 97221 - protein, 421 aa, Arabidopsis thaliana
  peptide (1)..(421): Ceres Seq. ID no. 12736584
  misc_feature (1)..(421): Homolog of NCBI NO: 18403524 NR Description: expressed protein; protein id: At1g51440.1, by cDNA: gi_15983395 [Arabidopsis thaliana]
  misc_feature (1)..(407): Homolog of NCBI NO: 30679836 NR Description: lipase (class 3) family [Arabidopsis thaliana]
  misc_feature (1)..(407): Homolog of NCBI NO: 18402385 NR Description: putative lipase; protein id: At2g30550.1, by cDNA: 207043., supported by cDNA: gi_20268777 [Arabidopsis >gi|20198327|gb|AAB63082.2| putative lipase [Arabidopsis
  misc_feature (1)..(407): Homolog of NCBI NO: 25408087 NR Description: probable lipase [imported] - Arabidopsis thaliana
  misc_feature (1)..(328): Homolog of NCBI NO: 18390691 NR Description: lipase, putative; protein id: At1g06800.1, by cDNA: gi_15529150 [Arabidopsis thaliana] At1g06800/F4H5_10 [Arabidopsis thaliana]
  misc_feature (1)..(329): Homolog of NCBI NO: 30684625 NR Description: lipase (class 3) family [Arabidopsis thaliana]
  misc_feature (1)..(400): Homolog of NCBI NO: 15220732 NR Description: lipase, putative; protein id: At1g30370.1
  misc_feature (1)..(327): Homolog of NCBI NO: 15225122 NR Description: putative triacylglycerol lipase; protein id: [Arabidopsis thaliana] >gi|25408176|pir||H84723 probable
  misc_feature (1)..(327): Homolog of NCBI NO: 18390571 NR Description: hypothetical protein; protein id: At1g05800.1
  misc_feature (1)..(329): Homolog of NCBI NO: 7488220 NR Description: probable triacylglycerol lipase - Arabidopsis >gi|2245036|emb|CAB10455.1| triacylglycerol lipase like protein thaliana] >gi|7268433|emb|CAB80953.1| triacylglycerol lipase like
MNNHLRREIIRYGEFAQACYDSFDFDPHSKYCGSCKYHPSDFFLNLDLHLHKGYTITRYLYATSNINLPNFFQKSKLSSIWSQHANWMGFVAVATDEEEVSRLGRRDIVIAWRGTVTYLEWIYDLKDILCSANFGDDPSIKIELGFHDLYTKKEDSCKFSSFSAREQVLAEVKRLIEYYGTEEEGHKTSITVTGHSLGASLALVSAYDIAELNLNHVPENNYKIPITVFSFSGPRVGNLRFKERCDELGVKVLRVVNVHDKVPSVPGIFTNEKFQFQKYVEEKTSFPWSYAHVGVELALDHKKSPFLKPTKDLGCAHNLEALLHLVDGYHGKDEEAEKRFCLVTKRDIALVNKSCDFLRGEYHVPPCWRQDENKGMVKNGDGQWVLPDRPLLEPHGPEDIAHHLQQVLGKVNDDNFKPTTT

SEQ ID NO: 97222 - protein, 334 aa, Arabidopsis thaliana
  peptide (1)..(334): Ceres Seq. ID no. 12736585
  misc_feature (1)..(334): Homolog of NCBI NO: 18403524 NR Description: expressed protein; protein id: At1g51440.1, by cDNA: gi_15983395 [Arabidopsis thaliana]
  misc_feature (1)..(320): Homolog of NCBI NO: 30679836 NR Description: lipase (class 3) family [Arabidopsis thaliana]
  misc_feature (1)..(320): Homolog of NCBI NO: 18402385 NR Description: putative lipase; protein id: At2g30550.1, by cDNA: 207043., supported by cDNA: gi_20268777 [Arabidopsis >gi|20198327|gb|AAB63082.2| putative lipase [Arabidopsis
  misc_feature (1)..(320): Homolog of NCBI NO: 25408087 NR Description: probable lipase [imported] - Arabidopsis thaliana
  misc_feature (1)..(241): Homolog of NCBI NO: 18390691 NR Description: lipase, putative; protein id: At1g06800.1, by cDNA: gi_15529150 [Arabidopsis thaliana] At1g06800/F4H5_10 [Arabidopsis thaliana]
  misc_feature (1)..(242): Homolog of NCBI NO: 30684625 NR Description: lipase (class 3) family [Arabidopsis thaliana]
  misc_feature (1)..(313): Homolog of NCBI NO: 15220732 NR Description: lipase, putative; protein id: At1g30370.1
  misc_feature (1)..(240): Homolog of NCBI NO: 15225122 NR Description: putative triacylglycerol lipase; protein id: [Arabidopsis thaliana] >gi|25408176|pir||H84723 probable
  misc_feature (1)..(240): Homolog of NCBI NO: 18390571 NR Description: hypothetical protein; protein id: At1g05800.1
  misc_feature (1)..(242): Homolog of NCBI NO: 7488220 NR Description: probable triacylglycerol lipase - Arabidopsis >gi|2245036|emb|CAB10455.1| triacylglycerol lipase like protein thaliana] >gi|7268433|emb|CAB80953.1| triacylglycerol lipase like
MGFVAVATDEEEVSRLGRRDIVIAWRGTVTYLEWIYDLKDILCSANFGDDPSIKIELGFHDLYTKKEDSCKFSSFSAREQVLAEVKRLIEYYGTEEEGHKTSITVTGHSLGASLALVSAYDIAELNLNHVPENNYKIPITVFSFSGPRVGNLRFKERCDELGVKVLRVVNVHDKVPSVPGIFTNEKFQFQKYVEEKTSFPWSYAHVGVELALDHKKSPFLKPTKDLGCAHNLEALLHLVDGYHGKDEEAEKRFCLVTKRDIALVNKSCDFLRGEYHVPPCWRQDENKGMVKNGDGQWVLPDRPLLEPHGPEDIAHHLQQVLGKVNDDNFKPTTT

SEQ ID NO: 97223 - DNA, 1533 bp, Arabidopsis thaliana
  misc_feature (1)..(1533): Ceres Seq. ID no. 12736586
  misc_feature: MA Experiment ID: 20000185 Result: Up-regulated in Transcription
  misc_feature: MA Experiment 20000185 PARAMETER Experiment Name: At_Roots__P Parameter: Age (day) Value: 7 vs. 21
  misc_feature: MA Experiment 20000185 PARAMETER Experiment Name: At_Roots__P Parameter: Organism Value: A. thaliana
  misc_feature: MA Experiment 20000185 PARAMETER Experiment Name: At_Roots__P Parameter: Tissue Value: Roots vs. Whole Plant
  misc_feature: MA Experiment ID: 20000227 Result: Up-regulated in Transcription
  misc_feature: MA Experiment 20000227 PARAMETER Experiment Name: At_Root-Tips-vs-Tops_P Parameter: Tissue Value: Root Tips vs. Root Tops
  misc_feature: MA Experiment ID: 20000439 Result: Up-regulated in Transcription
  misc_feature: MA Experiment 20000439 PARAMETER Experiment Name: At_Roots__P Parameter: Age (day) Value: 14 vs. 21
  misc_feature: MA Experiment 20000439 PARAMETER Experiment Name: At_Roots__P Parameter: Organism Value: A. thaliana
  misc_feature: MA Experiment 20000439 PARAMETER Experiment Name: At_Roots__P Parameter: Tissue Value: Roots vs. Whole Plant
  misc_feature: MA Experiment ID: 20000527 Result: Down-regulated in Transcription
  misc_feature: MA Experiment 20000527 PARAMETER Experiment Name: At_10percent_PEG_P Parameter: Age (day) Value: 20
  misc_feature: MA Experiment 20000527 PARAMETER Experiment Name: At_10percent_PEG_P Parameter: Organism Value: A. thaliana
  misc_feature: MA Experiment 20000527 PARAMETER Experiment Name: At_10percent_PEG_P Parameter: Plant Line Value: WS
  misc_feature: MA Experiment 20000527 PARAMETER Experiment Name: At_10percent_PEG_P Parameter: Timepoint (day) Value: 20
  misc_feature: MA Experiment 20000527 PARAMETER Experiment Name: At_10percent_PEG_P Parameter: Tissue Value: Whole Plant
  misc_feature: MA Experiment 20000527 PARAMETER Experiment Name: At_10percent_PEG_P Parameter: Treatment Value: 10percent PEG vs. No Treatment
atggcaattccaaaagctcactactctttagcagttcttgtccttctctttgtcgtcgtttcgagtagccaaaaagtctgcaatccagaatgcaaggccaaagaacccttccactgcgataatactcatgcattcaaccgtagtggatttcccaaaaatttcacttttggtgcagctacttcggcttatcaaattgaaggtgcagcacatagagcacttaatggatgggactatttcacgcatagatatccagaaaaagtaccggatcgtagttcagcagatcttgcttgtgattcgtatgatctttataaggatgatgtcaaactgctaaaaagaatgaatgttcaagcataccgtctctcgatagcatggtcaagggtcttaccaaagggaagactgactgggggagtggacgagaatgggataacatactacaacaatctcattaacgagttgaaagcaaatggcatagaaccatatgttactatatttcattgggatgttccccagactttagaagacgaatatggaggcttcttaagcacacgtatagtggaggactacacaaactacgctgagcttctattccaaagattcggagacagggtcaaattttggatcactttaaatcagcctctctctcttgcactcaaaggctatggaaatggatcttatccaccaggacggtgcaccggctgtgaacttggaggagattctggagttgaaccttatacagttgcacataaccaacttctagctcatgcaaaaactgtctctttatacagaaaaagatatcagaaatttcaaggtggtaagataggaacaaccttgatcgggagatggttcgtcccgctaaatgaatttagtgaactcgacaaggctgctgcaaaacgagcattcgacttttttgttggatggttcttggatccattggtgtacggaaaatatccaacaataatgagagagatggtaggagatagattgccagaattcacacctgaggaatcagctttagttaaaggatcacttgattttctagggttgaactattacgtttcacaatatgcaactgacgcacctcctccgacacaacctaatgcaataacggatgcacgagttactcttggattttaccgcaatggaagtcctattggtgttgcttctagcttcgtctactatcctccaggattccgtcagattctaaactacatcaaagacaactacaaaaatccacttacctacatcaccgaaaacggagttgctgatcttgatcttggaaacgtaacgcttgcaactgctcttgccgataatggacggattcaaaaccattgcagccatctctcttgtctcaaatgcgccatgaaggatggatgcaacgtagcaggatattttgcatggtcattgatggacaattacgaattcggaaatggttacaccctccggtttggtatgaattgggtcaacttcactaatcctgctgatcgtaaagagaaagcttctggaaaatggttctctaagttcctcgcaaaataa

SEQ ID NO: 97224 - protein, 510 aa, Arabidopsis thaliana
  peptide (1)..(510): Ceres Seq. ID no. 12736587
  misc_feature (46)..(510): Pfam Name: Glycosyl hydrolase family 1 Pfam Description: Glycosyl hydrolase family 1
  misc_feature (1)..(510): Homolog of NCBI NO: 30694982 NR Description: glycosyl hydrolase family 1 [Arabidopsis thaliana]
  misc_feature (1)..(510): Homolog of NCBI NO: 30694106 NR Description: glycosyl hydrolase family 1 [Arabidopsis >gi|23306442|gb|AAN17448.1| thioglucosidase, putative thaliana] >gi|25084292|gb|AAN72213.1| thioglucosidase, putative
  misc_feature (1)..(510): Homolog of NCBI NO: 25289450 NR Description: hypothetical protein F16N3.11 [imported] - thaliana >gi|5668800|gb|AAD46026.1|AC007519_11 Similar to
  misc_feature (129)..(510): Homolog of NCBI NO: 25289451 NR Description: probable myrosinase precursor 53323-50499 - Arabidopsis thaliana >gi|12325369|gb|AAG52628.1|AC024261_15
  misc_feature (1)..(124): Homolog of NCBI NO: 25289451 NR Description: probable myrosinase precursor 53323-50499 - Arabidopsis thaliana >gi|12325369|gb|AAG52628.1|AC024261_15
  misc_feature (58)..(419): Homolog of NCBI NO: 15217941 NR Description: glycosyl hydrolase family 1; protein id: [Arabidopsis thaliana] >gi|25289505|pir||C96553 hypothetical
  misc_feature (462)..(510): Homolog of NCBI NO: 15217941 NR Description: glycosyl hydrolase family 1; protein id: [Arabidopsis thaliana] >gi|25289505|pir||C96553 hypothetical
  misc_feature (1)..(26): Homolog of NCBI NO: 15217941 NR Description: glycosyl hydrolase family 1; protein id: [Arabidopsis thaliana] >gi|25289505|pir||C96553 hypothetical
  misc_feature (46)..(510): Homolog of NCBI NO: 38344468 NR Description: OSJNBa0022H21.3 [Oryza sativa (japonica
  misc_feature (46)..(510): Homolog of NCBI NO: 38344470 NR Description: OSJNBa0022H21.5 [Oryza sativa (japonica
MAIPKAHYSLAVLVLLFVVVSSSQKVCNPECKAKEPFHCDNTHAFNRSGFPKNFTFGAATSAYQIEGAAHRALNGWDYFTHRYPEKVPDRSSADLACDSYDLYKDDVKLLKRMNVQAYRLSIAWSRVLPKGRLTGGVDENGITYYNNLINELKANGIEPYVTIFHWDVPQTLEDEYGGFLSTRIVEDYTNYAELLFQRFGDRVKFWITLNQPLSLALKGYGNGSYPPGRCTGCELGGDSGVEPYTVAHNQLLAHAKTVSLYRKRYQKFQGGKIGTTLIGRWFVPLNEFSELDKAAAKRAFDFFVGWFLDPLVYGKYPTIMREMVGDRLPEFTPEESALVKGSLDFLGLNYYVSQYATDAPPPTQPNAITDARVTLGFYRNGSPIGVASSFVYYPPGFRQILNYIKDNYKNPLTYITENGVADLDLGNVTLATALADNGRIQNHCSHLSCLKCAMKDGCNVAGYFAWSLMDNYEFGNGYTLRFGMNWVNFTNPADRKEKASGKWFSKFLAK

SEQ ID NO: 97225 - protein, 398 aa, Arabidopsis thaliana
  peptide (1)..(398): Ceres Seq. ID no. 12736588
  misc_feature (1)..(398): Pfam Name: Glycosyl hydrolase family 1 Pfam Description: Glycosyl hydrolase family 1
  misc_feature (1)..(398): Homolog of NCBI NO: 30694982 NR Description: glycosyl hydrolase family 1 [Arabidopsis thaliana]
  misc_feature (1)..(398): Homolog of NCBI NO: 30694106 NR Description: glycosyl hydrolase family 1 [Arabidopsis >gi|23306442|gb|AAN17448.1| thioglucosidase, putative thaliana] >gi|25084292|gb|AAN72213.1| thioglucosidase, putative
  misc_feature (1)..(398): Homolog of NCBI NO: 25289450 NR Description: hypothetical protein F16N3.11 [imported] - thaliana >gi|5668800|gb|AAD46026.1|AC007519_11 Similar to
  misc_feature (17)..(398): Homolog of NCBI NO: 25289451 NR Description: probable myrosinase precursor 53323-50499 - Arabidopsis thaliana >gi|12325369|gb|AAG52628.1|AC024261_15
  misc_feature (1)..(12): Homolog of NCBI NO: 25289451 NR Description: probable myrosinase precursor 53323-50499 - Arabidopsis thaliana >gi|12325369|gb|AAG52628.1|AC024261_15
  misc_feature (1)..(307): Homolog of NCBI NO: 15217941 NR Description: glycosyl hydrolase family 1; protein id: [Arabidopsis thaliana] >gi|25289505|pir||C96553 hypothetical
  misc_feature (350)..(398): Homolog of NCBI NO: 15217941 NR Description: glycosyl hydrolase family 1; protein id: [Arabidopsis thaliana] >gi|25289505|pir||C96553 hypothetical
  misc_feature (1)..(398): Homolog of NCBI NO: 38344468 NR Description: OSJNBa0022H21.3 [Oryza sativa (japonica
  misc_feature (1)..(398): Homolog of NCBI NO: 38344470 NR Description: OSJNBa0022H21.5 [Oryza sativa (japonica
  misc_feature (1)..(398): Homolog of NCBI NO: 38344467 NR Description: OSJNBa0022H21.2 [Oryza sativa (japonica
MNVQAYRLSIAWSRVLPKGRLTGGVDENGITYYNNLINELKANGIEPYVTIFHWDVPQTLEDEYGGFLSTRIVEDYTNYAELLFQRFGDRVKFWITLNQPLSLALKGYGNGSYPPGRCTGCELGGDSGVEPYTVAHNQLLAHAKTVSLYRKRYQKFQGGKIGTTLIGRWFVPLNEFSELDKAAAKRAFDFFVGWFLDPLVYGKYPTIMREMVGDRLPEFTPEESALVKGSLDFLGLNYYVSQYATDAPPPTQPNAITDARVTLGFYRNGSPIGVASSFVYYPPGFRQILNYIKDNYKNPLTYITENGVADLDLGNVTLATALADNGRIQNHCSHLSCLKCAMKDGCNVAGYFAWSLMDNYEFGNGYTLRFGMNWVNFTNPADRKEKASGKWFSKFLAK

SEQ ID NO: 97226 - DNA, 1266 bp, Arabidopsis thaliana
  misc_feature (1)..(1266): Ceres Seq. ID no. 12736589
  misc_feature: MA Experiment ID: 20000180 Result: Up-regulated in Transcription
  misc_feature: MA Experiment 20000180 PARAMETER Experiment Name: At_Germinating_Seeds_P Parameter: Age (hr) Value: 24 vs. 0
  misc_feature: MA Experiment 20000180 PARAMETER Experiment Name: At_Germinating_Seeds_P Parameter: Tissue Value: Germinating Seeds
  misc_feature: MA Experiment ID: 20000185 Result: Up-regulated in Transcription
  misc_feature: MA Experiment 20000185 PARAMETER Experiment Name: At_Roots__P Parameter: Age (day) Value: 7 vs. 21
  misc_feature: MA Experiment 20000185 PARAMETER Experiment Name: At_Roots__P Parameter: Organism Value: A. thaliana
  misc_feature: MA Experiment 20000185 PARAMETER Experiment Name: At_Roots__P Parameter: Tissue Value: Roots vs. Whole Plant
  misc_feature: MA Experiment ID: 20000227 Result: Up-regulated in Transcription
  misc_feature: MA Experiment 20000227 PARAMETER Experiment Name: At_Root-Tips-vs-Tops_P Parameter: Tissue Value: Root Tips vs. Root Tops
  misc_feature: MA Experiment ID: 20000264 Result: Up-regulated in Transcription
  misc_feature: MA Experiment 20000264 PARAMETER Experiment Name: At_Open_Flower_P Parameter: Age (day) Value: 21
  misc_feature: MA Experiment 20000264 PARAMETER Experiment Name: At_Open_Flower_P Parameter: Plant Line Value: WS
  misc_feature: MA Experiment 20000264 PARAMETER Experiment Name: At_Open_Flower_P Parameter: Tissue Value: Open Flower vs. Whole Plant
  misc_feature: MA Experiment ID: 20000265 Result: Up-regulated in Transcription
  misc_feature: MA Experiment 20000265 PARAMETER Experiment Name: At_Open_Flower_P Parameter: Age (day) Value: 21
  misc_feature: MA Experiment 20000265 PARAMETER Experiment Name: At_Open_Flower_P Parameter: Plant Line Value: WS
  misc_feature: MA Experiment 20000265 PARAMETER Experiment Name: At_Open_Flower_P Parameter: Tissue Value: Closed Flower vs. Whole Plant
  misc_feature: MA Experiment ID: 20000286 Result: Up-regulated in Transcription
  misc_feature: MA Experiment 20000286 PARAMETER Experiment Name: At_Open_Flower_P Parameter: Age (day) Value: 21
  misc_feature: MA Experiment 20000286 PARAMETER Experiment Name: At_Open_Flower_P Parameter: Plant Line Value: WS
  misc_feature: MA Experiment 20000286 PARAMETER Experiment Name: At_Open_Flower_P Parameter: Tissue Value: Half Open vs. Whole Plant
  misc_feature: MA Experiment ID: 20000439 Result: Up-regulated in Transcription
  misc_feature: MA Experiment 20000439 PARAMETER Experiment Name: At_Roots__P Parameter: Age (day) Value: 14 vs. 21
  misc_feature: MA Experiment 20000439 PARAMETER Experiment Name: At_Roots__P Parameter: Organism Value: A. thaliana
  misc_feature: MA Experiment 20000439 PARAMETER Experiment Name: At_Roots__P Parameter: Tissue Value: Roots vs. Whole Plant
  misc_feature: MA Experiment ID: 20000527 Result: Down-regulated in Transcription
  misc_feature: MA Experiment 20000527 PARAMETER Experiment Name: At_10percent_PEG_P Parameter: Age (day) Value: 20
  misc_feature: MA Experiment 20000527 PARAMETER Experiment Name: At_10percent_PEG_P Parameter: Organism Value: A. thaliana
  misc_feature: MA Experiment 20000527 PARAMETER Experiment Name: At_10percent_PEG_P Parameter: Plant Line Value: WS
  misc_feature: MA Experiment 20000527 PARAMETER Experiment Name: At_10percent_PEG_P Parameter: Timepoint (day) Value: 20
  misc_feature: MA Experiment 20000527 PARAMETER Experiment Name: At_10percent_PEG_P Parameter: Tissue Value: Whole Plant
  misc_feature: MA Experiment 20000527 PARAMETER Experiment Name: At_10percent_PEG_P Parameter: Treatment Value: 10percent PEG vs. No Treatment
  misc_feature: MA Experiment ID: 20000794 Result: Up-regulated in Transcription
  misc_feature: MA Experiment 20000794 PARAMETER Experiment Name: At_Petals_P Parameter: Age (day) Value: 23-25 days
  misc_feature: MA Experiment 20000794 PARAMETER Experiment Name: At_Petals_P Parameter: Plant Line Value: WS
  misc_feature: MA Experiment 20000794 PARAMETER Experiment Name: At_Petals_P Parameter: Tissue Value: Petals vs. Whole plant
  misc_feature: MA Experiment ID: 20001556 Result: Up-regulated in Transcription
  misc_feature: MA Experiment 20001556 PARAMETER Experiment Name: At_Drought_Soil_Dry_P Parameter: Age (day) Value: 26
  misc_feature: MA Experiment 20001556 PARAMETER Experiment Name: At_Drought_Soil_Dry_P Parameter: Organism Value: A. thaliana
  misc_feature: MA Experiment 20001556 PARAMETER Experiment Name: At_Drought_Soil_Dry_P Parameter: Plant Line Value: WS
  misc_feature: MA Experiment 20001556 PARAMETER Experiment Name: At_Drought_Soil_Dry_P Parameter: Post Timepoint (hr) Value: None
  misc_feature: MA Experiment 20001556 PARAMETER Experiment Name: At_Drought_Soil_Dry_P Parameter: Post-Treatment Value: None
  misc_feature: MA Experiment 20001556 PARAMETER Experiment Name: At_Drought_Soil_Dry_P Parameter: Timepoint (day) Value: 12
  misc_feature: MA Experiment 20001556 PARAMETER Experiment Name: At_Drought_Soil_Dry_P Parameter: Treatment Value: Drought vs. No Drought
  misc_feature: MA Experiment ID: 20001558 Result: Up-regulated in Transcription
  misc_feature: MA Experiment 20001558 PARAMETER Experiment Name: At_Drought_Soil_Dry_P Parameter: Age (day) Value: 27
  misc_feature: MA Experiment 20001558 PARAMETER Experiment Name: At_Drought_Soil_Dry_P Parameter: Organism Value: A. thaliana
  misc_feature: MA Experiment 20001558 PARAMETER Experiment Name: At_Drought_Soil_Dry_P Parameter: Plant Line Value: WS
  misc_feature: MA Experiment 20001558 PARAMETER Experiment Name: At_Drought_Soil_Dry_P Parameter: Post Timepoint (hr) Value: 6
  misc_feature: MA Experiment 20001558 PARAMETER Experiment Name: At_Drought_Soil_Dry_P Parameter: Post-Treatment Value: Re-Water vs. No Drought
  misc_feature: MA Experiment 20001558 PARAMETER Experiment Name: At_Drought_Soil_Dry_P Parameter: Timepoint (day) Value: 13
  misc_feature: MA Experiment 20001558 PARAMETER Experiment Name: At_Drought_Soil_Dry_P Parameter: Treatment Value: Drought vs. No Drought
  misc_feature: MA Experiment ID: 20001904 Result: Up-regulated in Transcription
  misc_feature: MA Experiment 20001904 PARAMETER Experiment Name: At_Drought_Reproduction_P Parameter: Age (day) Value: 37
  misc_feature: MA Experiment 20001904 PARAMETER Experiment Name: At_Drought_Reproduction_P Parameter: Organism Value: A. thaliana
  misc_feature: MA Experiment 20001904 PARAMETER Experiment Name: At_Drought_Reproduction_P Parameter: Plant Line Value: WS
  misc_feature: MA Experiment 20001904 PARAMETER Experiment Name: At_Drought_Reproduction_P Parameter: Timepoint (day) Value: 7
  misc_feature: MA Experiment 20001904 PARAMETER Experiment Name: At_Drought_Reproduction_P Parameter: Tissue Value: Rosettes
  misc_feature: MA Experiment 20001904 PARAMETER Experiment Name: At_Drought_Reproduction_P Parameter: Treatment Value: Drought vs. No Drought
atggcaattccaaaagctcactactctttagccatcattgtcgttctttttgccgtttcgaggagccaaaaagttgaaggtgcagcacatagagcacttaatggatgggactatttcactcatagatatccagaaagagtttcagatcgcagtataggagaccttgcttgtaattcgtatgatctttataaggatgatgttaaactactaaaaagaatgaacgttcaagcataccgattctcaatagcatggtcaagggtcttaccaaagggcagactaattggaggagtcgacgagaatgggatcacatactacaacaatctcattaacgagttgaaagcaaatggcatagaaccatttgtgactatatttcattgggatgttcctcaagactttagaagacgaatatggaggcttcttaagcccacgtatagtgacttcaaaaattacgctgagcttctattccaaagattcggagacagagttaaattttggatcacattaaatcagccgtactctctcgctgtcaaaggttatggagatggacagtatccaccgggaaggtgcactgactgtgaatttggaggagattctggaactgaaccttatatagttggacatcacgaacttctggctcatatggaagctgtatctttataccgaaaaagatatcagaaatttcaaggtggtaagataggaacgacattgatcggtagatggttcatcccactaaatgaaactaacgatctcgacaaggctgctgcaaaacgagaattcgatttttccgttcttggatccactggtgtacggacaatatccaaagataatgagagactaggagatagattgccaaaattcacgcccaagcaatcagctttacttaaaggatcacttgattttctagggttgaactattacgttacaagatatgcaacctacagacctcctccaatgccgacacaacatagtgtcttaaccgattcaggagttacaattggatttgagcgaaatggagtttctattggtgttaaggctagtatcaactttggattccgtcagattctaaatcacatcaaaaacaagtacaagaatccattaacctacatcaccgaaaacggatattttgcatggtcattgatggacaattatgaattcggaaatggttacactctccggtttgatatgaattgggtcaacttcactaatcctgctgatcgaagagaaaaagcttctggaaaatggttctctaggttcattgcaaaataa

SEQ ID NO: 97227 - protein, 421 aa, Arabidopsis thaliana
  peptide (1)..(421): Ceres Seq. ID no. 12736590
  misc_feature (1)..(421): Homolog of NCBI NO: 15217941 NR Description: glycosyl hydrolase family 1; protein id: [Arabidopsis thaliana] >gi|25289505|pir||C96553 hypothetical
  misc_feature (18)..(373): Homolog of NCBI NO: 30694106 NR Description: glycosyl hydrolase family 1 [Arabidopsis >gi|23306442|gb|AAN17448.1| thioglucosidase, putative thaliana] >gi|25084292|gb|AAN72213.1| thioglucosidase, putative
  misc_feature (373)..(421): Homolog of NCBI NO: 30694106 NR Description: glycosyl hydrolase family 1 [Arabidopsis >gi|23306442|gb|AAN17448.1| thioglucosidase, putative thaliana] >gi|25084292|gb|AAN72213.1| thioglucosidase, putative
  misc_feature (1)..(25): Homolog of NCBI NO: 30694106 NR Description: glycosyl hydrolase family 1 [Arabidopsis >gi|23306442|gb|AAN17448.1| thioglucosidase, putative thaliana] >gi|25084292|gb|AAN72213.1| thioglucosidase, putative
  misc_feature (18)..(373): Homolog of NCBI NO: 30694982 NR Description: glycosyl hydrolase family 1 [Arabidopsis thaliana]
  misc_feature (373)..(421): Homolog of NCBI NO: 30694982 NR Description: glycosyl hydrolase family 1 [Arabidopsis thaliana]
  misc_feature (1)..(25): Homolog of NCBI NO: 30694982 NR Description: glycosyl hydrolase family 1 [Arabidopsis thaliana]
  misc_feature (18)..(373): Homolog of NCBI NO: 25289450 NR Description: hypothetical protein F16N3.11 [imported] - thaliana >gi|5668800|gb|AAD46026.1|AC007519_11 Similar to
  misc_feature (373)..(421): Homolog of NCBI NO: 25289450 NR Description: hypothetical protein F16N3.11 [imported] - thaliana >gi|5668800|gb|AAD46026.1|AC007519_11 Similar to
  misc_feature (1)..(25): Homolog of NCBI NO: 25289450 NR Description: hypothetical protein F16N3.11 [imported] - thaliana >gi|5668800|gb|AAD46026.1|AC007519_11 Similar to
MAIPKAHYSLAIIVVLFAVSRSQKVEGAAHRALNGWDYFTHRYPERVSDRSIGDLACNSYDLYKDDVKLLKRMNVQAYRFSIAWSRVLPKGRLIGGVDENGITYYNNLINELKANGIEPFVTIFHWDVPQDFRRRIWRLLKPTYSDFKNYAELLFQRFGDRVKFWITLNQPYSLAVKGYGDGQYPPGRCTDCEFGGDSGTEPYIVGHHELLAHMEAVSLYRKRYQKFQGGKIGTTLIGRWFIPLNETNDLDKAAAKREFDFSVLGSTGVRTISKDNERLGDRLPKFTPKQSALLKGSLDFLGLNYYVTRYATYRPPPMPTQHSVLTDSGVTIGFERNGVSIGVKASINFGFRQILNHIKNKYKNPLTYITENGYFAWSLMDNYEFGNGYTLRFDMNWVNFTNPADRREKASGKWFSRFIAK

SEQ ID NO: 97228 - protein, 349 aa, Arabidopsis thaliana
  peptide (1)..(349): Ceres Seq. ID no. 12736591
  misc_feature (1)..(349): Homolog of NCBI NO: 15217941 NR Description: glycosyl hydrolase family 1; protein id: [Arabidopsis thaliana] >gi|25289505|pir||C96553 hypothetical
  misc_feature (1)..(301): Homolog of NCBI NO: 30694106 NR Description: glycosyl hydrolase family 1 [Arabidopsis >gi|23306442|gb|AAN17448.1| thioglucosidase, putative thaliana] >gi|25084292|gb|AAN72213.1| thioglucosidase, putative
  misc_feature (301)..(349): Homolog of NCBI NO: 30694106 NR Description: glycosyl hydrolase family 1 [Arabidopsis >gi|23306442|gb|AAN17448.1| thioglucosidase, putative thaliana] >gi|25084292|gb|AAN72213.1| thioglucosidase, putative
  misc_feature (1)..(301): Homolog of NCBI NO: 30694982 NR Description: glycosyl hydrolase family 1 [Arabidopsis thaliana]
  misc_feature (301)..(349): Homolog of NCBI NO: 30694982 NR Description: glycosyl hydrolase family 1 [Arabidopsis thaliana]
  misc_feature (1)..(301): Homolog of NCBI NO: 25289450 NR Description: hypothetical protein F16N3.11 [imported] - thaliana >gi|5668800|gb|AAD46026.1|AC007519_11 Similar to
  misc_feature (301)..(349): Homolog of NCBI NO: 25289450 NR Description: hypothetical protein F16N3.11 [imported] - thaliana >gi|5668800|gb|AAD46026.1|AC007519_11 Similar to
  misc_feature (1)..(301): Homolog of NCBI NO: 25289451 NR Description: probable myrosinase precursor 53323-50499 - Arabidopsis thaliana >gi|12325369|gb|AAG52628.1|AC024261_15
  misc_feature (301)..(349): Homolog of NCBI NO: 25289451 NR Description: probable myrosinase precursor 53323-50499 - Arabidopsis thaliana >gi|12325369|gb|AAG52628.1|AC024261_15
  misc_feature (1)..(301): Homolog of NCBI NO: 38344468 NR Description: OSJNBa0022H21.3 [Oryza sativa (japonica
MNVQAYRFSIAWSRVLPKGRLIGGVDENGITYYNNLINELKANGIEPFVTIFHWDVPQDFRRRIWRLLKPTYSDFKNYAELLFQRFGDRVKFWITLNQPYSLAVKGYGDGQYPPGRCTDCEFGGDSGTEPYIVGHHELLAHMEAVSLYRKRYQKFQGGKIGTTLIGRWFIPLNETNDLDKAAAKREFDFSVLGSTGVRTISKDNERLGDRLPKFTPKQSALLKGSLDFLGLNYYVTRYATYRPPPMPTQHSVLTDSGVTIGFERNGVSIGVKASINFGFRQILNHIKNKYKNPLTYITENGYFAWSLMDNYEFGNGYTLRFDMNWVNFTNPADRREKASGKWFSRFIAK

SEQ ID NO: 97229 - DNA, 1011 bp, Arabidopsis thaliana
  misc_feature (1)..(1011): Ceres Seq. ID no. 12736608
  misc_feature: MA Experiment ID: 20000182 Result: Up-regulated in Transcription
  misc_feature: MA Experiment 20000182 PARAMETER Experiment Name: At_2mM_SA_P Parameter: Age (day) Value: 14
  misc_feature: MA Experiment 20000182 PARAMETER Experiment Name: At_2mM_SA_P Parameter: Organism Value: A. thaliana
  misc_feature: MA Experiment 20000182 PARAMETER Experiment Name: At_2mM_SA_P Parameter: Plant Line Value: WS
  misc_feature: MA Experiment 20000182 PARAMETER Experiment Name: At_2mM_SA_P Parameter: Timepoint (hr) Value: 6
  misc_feature: MA Experiment 20000182 PARAMETER Experiment Name: At_2mM_SA_P Parameter: Tissue Value: Aerial
  misc_feature: MA Experiment 20000182 PARAMETER Experiment Name: At_2mM_SA_P Parameter: Treatment Value: 2mM SA vs. No Treatment
  misc_feature: MA Experiment ID: 20000573 Result: Up-regulated in Transcription
  misc_feature: MA Experiment 20000573 PARAMETER Experiment Name: At_100uM_ABA_Mutants__P Parameter: Organism Value: A. thaliana
  misc_feature: MA Experiment 20000573 PARAMETER Experiment Name: At_100uM_ABA_Mutants__P Parameter: Plant Line Value: CS22 vs. Ler wt
  misc_feature: MA Experiment 20000573 PARAMETER Experiment Name: At_100uM_ABA_Mutants__P Parameter: Timepoint (hr) Value: N/A
  misc_feature: MA Experiment 20000573 PARAMETER Experiment Name: At_100uM_ABA_Mutants__P Parameter: Tissue Value: Whole Plant
  misc_feature: MA Experiment 20000573 PARAMETER Experiment Name: At_100uM_ABA_Mutants__P Parameter: Treatment Value: None
  misc_feature: MA Experiment ID: 20000574 Result: Up-regulated in Transcription
  misc_feature: MA Experiment 20000574 PARAMETER Experiment Name: At_100uM_ABA_Mutants__P Parameter: Organism Value: A. thaliana
  misc_feature: MA Experiment 20000574 PARAMETER Experiment Name: At_100uM_ABA_Mutants__P Parameter: Plant Line Value: CS23 vs. Ler wt
  misc_feature: MA Experiment 20000574 PARAMETER Experiment Name: At_100uM_ABA_Mutants__P Parameter: Timepoint (hr) Value: N/A
  misc_feature: MA Experiment 20000574 PARAMETER Experiment Name: At_100uM_ABA_Mutants__P Parameter: Tissue Value: Whole Plant
  misc_feature: MA Experiment 20000574 PARAMETER Experiment Name: At_100uM_ABA_Mutants__P Parameter: Treatment Value: None
atgacagaagcgacaggcctgaggcgtttcttttctaagttcatttgctgtgatgcagacgattcgactattgaatatgaaccatatgtgtacattccagcgaatagttactcgtatgccgaggttacgaaaattacaaacaagtttaatagagttcatggcaaaggagggtttggtgtagtttatcgtggagttttaaacaagcaacaagtagcagtaaagatgctaaaccgagcttccatctacaatattgtacagtttaccaaagaggttcacgactttgtaaaagttcgtcacaaaaacttggtgagcctcattggatattgcgatgatggtgagcacttggccctaatctacgaattcgtggcaaatggtgacttgaatgatcaactatctgggaagtttggtaatgtcccgagctgggaaaccaggttgaaaatcatcataggagtagcacaaggtctggagtatttgcatagcgagttgcgaatccttcaccgatatgttaagccgacaaatatcctactaggcgaaaactttgaagcgaaactggctgatttcgggctgtctagatcctctccaaccaaccctgacatacaagcgtcaaataagatttatgtcaagcctggaagagatccatatctgcatcaccaatacttcaactcgaaccggttaaaccaaacgagcgacatttatagctttggcattgttatgttggagatgataaccaaccagcctgtagttgacaacaagcgtgagagtcctcacatttcaaagtgggtcgatttaaaggtcgcgaaaggcgatactctagagattgttgatctcaggctaaacaatgactttgagcgcgactcggtcaggaaagctatggatatagcatgcagttgtgcagctcgtgctcataataggccaagcatgagccaggttgttatagagctcaatgagtgtctagccttagagatggctcgaagtaatggaagaactggggagacaactcagactcagtga

SEQ ID NO: 97230 - protein, 336 aa, Arabidopsis thaliana
  peptide (1)..(336): Ceres Seq. ID no. 12736609
  misc_feature (54)..(191): Pfam Name: Protein kinase domain Pfam Description: Protein kinase domain
  misc_feature (1)..(336): Homolog of NCBI NO: 15217993 NR Description: protein kinase, putative; protein id: At1g51620.1
  misc_feature (37)..(324): Homolog of NCBI NO: 25387103 NR Description: probable receptor protein kinase [imported] - thaliana >gi|12321669|gb|AAG50871.1|AC025294_9 receptor protein
  misc_feature (27)..(324): Homolog of NCBI NO: 22330177 NR Description: receptor protein kinase, putative; protein id:
  misc_feature (37)..(336): Homolog of NCBI NO: 9294681 NR Description: receptor-like protein kinase [Arabidopsis
  misc_feature (37)..(336): Homolog of NCBI NO: 15232537 NR Description: serine/threonine-specific protein kinase,
  misc_feature (27)..(324): Homolog of NCBI NO: 12321662 NR Description: receptor protein kinase, putative, 5' partial
  misc_feature (27)..(324): Homolog of NCBI NO: 15218048 NR Description: light repressible receptor protein kinase,
  misc_feature (27)..(324): Homolog of NCBI NO: 25387133 NR Description: probable protein kinase [imported] - Arabidopsis >gi|9802785|gb|AAF99854.1|AC015448_4 Putative protein kinase
  misc_feature (3)..(327): Homolog of NCBI NO: 25387121 NR Description: probable protein kinase [imported] - Arabidopsis >gi|9802790|gb|AAF99859.1|AC015448_9 Putative protein kinase
  misc_feature (27)..(324): Homolog of NCBI NO: 15218050 NR Description: light repressible receptor protein kinase,
MTEATGLRRFFSKFICCDADDSTIEYEPYVYIPANSYSYAEVTKITNKFNRVHGKGGFGVVYRGVLNKQQVAVKMLNRASIYNIVQFTKEVHDFVKVRHKNLVSLIGYCDDGEHLALIYEFVANGDLNDQLSGKFGNVPSWETRLKIIIGVAQGLEYLHSELRILHRYVKPTNILLGENFEAKLADFGLSRSSPTNPDIQASNKIYVKPGRDPYLHHQYFNSNRLNQTSDIYSFGIVMLEMITNQPVVDNKRESPHISKWVDLKVAKGDTLEIVDLRLNNDFERDSVRKAMDIACSCAARAHNRPSMSQVVIELNECLALEMARSNGRTGETTQTQ

SEQ ID NO: 97231 - protein, 262 aa, Arabidopsis thaliana
  peptide (1)..(262): Ceres Seq. ID no. 12736610
  misc_feature (1)..(117): Pfam Name: Protein kinase domain Pfam Description: Protein kinase domain
  misc_feature (1)..(262): Homolog of NCBI NO: 15217993 NR Description: protein kinase, putative; protein id: At1g51620.1
  misc_feature (1)..(250): Homolog of NCBI NO: 25387103 NR Description: probable receptor protein kinase [imported] - thaliana >gi|12321669|gb|AAG50871.1|AC025294_9 receptor protein
  misc_feature (1)..(250): Homolog of NCBI NO: 22330177 NR Description: receptor protein kinase, putative; protein id:
  misc_feature (1)..(262): Homolog of NCBI NO: 9294681 NR Description: receptor-like protein kinase [Arabidopsis
  misc_feature (1)..(262): Homolog of NCBI NO: 15232537 NR Description: serine/threonine-specific protein kinase,
  misc_feature (1)..(250): Homolog of NCBI NO: 12321662 NR Description: receptor protein kinase, putative, 5' partial
  misc_feature (1)..(250): Homolog of NCBI NO: 25387133 NR Description: probable protein kinase [imported] - Arabidopsis >gi|9802785|gb|AAF99854.1|AC015448_4 Putative protein kinase
  misc_feature (1)..(250): Homolog of NCBI NO: 15218048 NR Description: light repressible receptor protein kinase,
  misc_feature (1)..(253): Homolog of NCBI NO: 25387121 NR Description: probable protein kinase [imported] - Arabidopsis >gi|9802790|gb|AAF99859.1|AC015448_9 Putative protein kinase
  misc_feature (1)..(250): Homolog of NCBI NO: 15218050 NR Description: light repressible receptor protein kinase,
MLNRASIYNIVQFTKEVHDFVKVRHKNLVSLIGYCDDGEHLALIYEFVANGDLNDQLSGKFGNVPSWETRLKIIIGVAQGLEYLHSELRILHRYVKPTNILLGENFEAKLADFGLSRSSPTNPDIQASNKIYVKPGRDPYLHHQYFNSNRLNQTSDIYSFGIVMLEMITNQPVVDNKRESPHISKWVDLKVAKGDTLEIVDLRLNNDFERDSVRKAMDIACSCAARAHNRPSMSQVVIELNECLALEMARSNGRTGETTQTQ

SEQ ID NO: 97232 - DNA, 2029 bp, Arabidopsis thaliana
  misc_feature (1)..(2029): Ceres Seq. ID no. 12736617
  misc_feature: MA Experiment ID: 20000179 Result: Down-regulated in Transcription
  misc_feature: MA Experiment 20000179 PARAMETER Experiment Name: At_Germinating_Seeds_P Parameter: Age (hr) Value: 6 vs. 0
  misc_feature: MA Experiment 20000179 PARAMETER Experiment Name: At_Germinating_Seeds_P Parameter: Tissue Value: Germinating Seeds
  misc_feature: MA Experiment ID: 20000180 Result: Up-regulated in Transcription
  misc_feature: MA Experiment 20000180 PARAMETER Experiment Name: At_Germinating_Seeds_P Parameter: Age (hr) Value: 24 vs. 0
  misc_feature: MA Experiment 20000180 PARAMETER Experiment Name: At_Germinating_Seeds_P Parameter: Tissue Value: Germinating Seeds
  misc_feature: MA Experiment ID: 20001248 Result: Down-regulated in Transcription
  misc_feature: MA Experiment 20001248 PARAMETER Experiment Name: At_Far-red-induction_P Parameter: Age (day) Value: 7
  misc_feature: MA Experiment 20001248 PARAMETER Experiment Name: At_Far-red-induction_P Parameter: Light Value: Far-red vs. White
  misc_feature: MA Experiment 20001248 PARAMETER Experiment Name: At_Far-red-induction_P Parameter: Organism Value: A. thaliana
  misc_feature: MA Experiment 20001248 PARAMETER Experiment Name: At_Far-red-induction_P Parameter: Plant Line Value: Columbia
  misc_feature: MA Experiment 20001248 PARAMETER Experiment Name: At_Far-red-induction_P Parameter: Timepoint (hr) Value: 4
  misc_feature: MA Experiment 20001248 PARAMETER Experiment Name: At_Far-red-induction_P Parameter: Tissue Value: Whole Plant
  misc_feature: MA Experiment ID: 20001451 Result: Down-regulated in Transcription
  misc_feature: MA Experiment 20001451 PARAMETER Experiment Name: At_Far-red-induction_P Parameter: Age (day) Value: 7
  misc_feature: MA Experiment 20001451 PARAMETER Experiment Name: At_Far-red-induction_P Parameter: Light Value: Far-red vs. White
  misc_feature: MA Experiment 20001451 PARAMETER Experiment Name: At_Far-red-induction_P Parameter: Organism Value: A. thaliana
  misc_feature: MA Experiment 20001451 PARAMETER Experiment Name: At_Far-red-induction_P Parameter: Plant Line Value: Columbia
  misc_feature: MA Experiment 20001451 PARAMETER Experiment Name: At_Far-red-induction_P Parameter: Timepoint (hr) Value: 24
  misc_feature: MA Experiment 20001451 PARAMETER Experiment Name: At_Far-red-induction_P Parameter: Tissue Value: Whole Plant
  misc_feature: MA Experiment ID: 20001906 Result: Down-regulated in Transcription
  misc_feature: MA Experiment 20001906 PARAMETER Experiment Name: At_Drought_Reproduction_P Parameter: Age (day) Value: 35
  misc_feature: MA Experiment 20001906 PARAMETER Experiment Name: At_Drought_Reproduction_P Parameter: Organism Value: A. thaliana
  misc_feature: MA Experiment 20001906 PARAMETER Experiment Name: At_Drought_Reproduction_P Parameter: Plant Line Value: WS
  misc_feature: MA Experiment 20001906 PARAMETER Experiment Name: At_Drought_Reproduction_P Parameter: Timepoint (day) Value: 5
  misc_feature: MA Experiment 20001906 PARAMETER Experiment Name: At_Drought_Reproduction_P Parameter: Tissue Value: Siliques
  misc_feature: MA Experiment 20001906 PARAMETER Experiment Name: At_Drought_Reproduction_P Parameter: Treatment Value: Drought vs. No Drought
  misc_feature: MA Experiment ID: 20001911 Result: Down-regulated in Transcription
  misc_feature: MA Experiment 20001911 PARAMETER Experiment Name: At_Drought_Reproduction_P Parameter: Age (day) Value: 40
  misc_feature: MA Experiment 20001911 PARAMETER Experiment Name: At_Drought_Reproduction_P Parameter: Organism Value: A. thaliana
  misc_feature: MA Experiment 20001911 PARAMETER Experiment Name: At_Drought_Reproduction_P Parameter: Plant Line Value: WS
  misc_feature: MA Experiment 20001911 PARAMETER Experiment Name: At_Drought_Reproduction_P Parameter: Timepoint (day) Value: 10
  misc_feature: MA Experiment 20001911 PARAMETER Experiment Name: At_Drought_Reproduction_P Parameter: Tissue Value: Flowers
  misc_feature: MA Experiment 20001911 PARAMETER Experiment Name: At_Drought_Reproduction_P Parameter: Treatment Value: Drought vs. No Drought
aggccaaagcctaaaattcacacaaccaaaaaaaccaaccttttttttccacctaaatctttgaatatcacaatatttactatttacaatggcgccacaagaacaagcagtttctcaggtgatggagaaacagagcaacaacaacaacagtgacgtcattttccgatcaaagttaccggatatttacatcccgaaccacctatctctccacgactacatcttccaaaacatctccgaattcgccactaagccttgcctaatcaacggaccaaccggccacgtgtacacttactccgacgtccacgtcatctcccgccaaatcgccgccaattttcacaaactcggcgttaaccaaaacgacgtcgtcatgctcctcctcccaaactgtcccgaattcgtcctctctttcctcgccgcctccttccgcggcgcaaccgccaccgccgcaaaccctttcttcactccggcggagatagctaaacaagccaaagcctccaacaccaaactcataatcaccgaagctcgttacgtcgacaaaatcaaaccacttcaaaacgacgacggagtagtcatcgtctgcatcgacgacaacgaatccgtgccaatccctgaaggctgcctccgcttcaccgagttgactcagtcgacaaccgaggcatcagaagtcatcgactcggtggagatttcaccggacgacgtggtggcactaccttactcctctggcacgacgggattaccaaaaggagtgatgctgactcacaagggactagtcacgagcgttgctcagcaagtcgacggcgagaacccgaatctttatttccacagcgatgacgtcatactctgtgttttgcccatgtttcatatctacgctttgaactcgatcatgttgtgtggtcttagagttggtgcggcgattctgataatgccgaagtttgagatcaatctgctattggagctgatccagaggtgtaaagtgacggtggctccgatggttccgccgattgtgttggccattgcgaagtcttcggagacggagaagtatgatttgagctcgataagagtggtgaaatctggtgctgctcctcttggtaaagaacttgaagatgccgttaatgccaagtttcctaatgccaaactcggtcagggatacggaatgacggaagcaggtccagtgctagcaatgtcgttaggttttgcaaaggaaccttttccggttaagtcaggagcttgtggtactgttgtaagaaatgctgagatgaaaatagttgatccagacaccggagattctctttcgaggaatcaacccggtgagatttgtattcgtggtcaccagatcatgaaaggttacctcaacaatccggcagctacagcagagaccattgataaagacggttggcttcatactggagatattggattgatcgatgacgatgacgagcttttcatcgttgatcgattgaaagaacttatcaagtataaaggttttcaggtagctccggctgagctagaggctttgctcatcggtcatcctgacattactgatgttgctgttgtcgcaatgaaagaagaagcagctggtgaagttcctgttgcatttgtggtgaaatcgaaggattcggagttatcagaagatgatgtgaagcaattcgtgtcgaaacaggttgtgttttacaagagaatcaacaaagtgttcttcactgaatccattcctaaagctccatcagggaagatattgaggaaagatctgagggcaaaactagcaaatggattgtgatggatgatttcaaccaaaaagcaaaagatgatttcaatgtgtatatacatacaactgtttgacccaaccaaggaaacaaactcatacgaaccattgtcttttgttgttgttgttgttgttgttgttgctgttcttgcttgattcatgtaatgagcctttgtgatgaaggtggtttcttttttggtttcctatcatgtaacttgtgctggagaaaacagcacacctttttcatataataataaatttactcggatt

SEQ ID NO: 97233 - protein, 561 aa, Arabidopsis thaliana
  peptide (1)..(561): Ceres Seq. ID no. 12736618
  misc_feature (67)..(488): Pfam Name: AMP-binding enzyme Pfam Description: AMP-binding enzyme
  misc_feature (1)..(561): Homolog of NCBI NO: 15218002 NR Description: 4-coumarate:CoA ligase 1; protein id: supported by cDNA: gi_20466561, supported by cDNA: gi_609339
  misc_feature (1)..(561): Homolog of NCBI NO: 15232507 NR Description: putative 4-coumarate:CoA ligase 2; protein id: supported by cDNA: gi_20466457, supported by cDNA: gi_5702187
  misc_feature (1)..(561): Homolog of NCBI NO: 12229665 NR Description: 4-coumarate--CoA ligase 2 (4CL 2)
  misc_feature (12)..(561): Homolog of NCBI NO: 9651915 NR Description: 4-coumarate:coA ligase 2 [Rubus idaeus]
  misc_feature (12)..(561): Homolog of NCBI NO: 12229632 NR Description: 4-coumarate--CoA ligase 2 (4CL 2)
  misc_feature (18)..(557): Homolog of NCBI NO: 14289344 NR Description: 4-coumarate:CoA ligase 3 [Populus balsamifera
  misc_feature (22)..(558): Homolog of NCBI NO: 12229628 NR Description: 4-COUMARATE--COA LIGASE (4CL) (4-COUMAROYL-COA
  misc_feature (12)..(561): Homolog of NCBI NO: 12229631 NR Description: 4-coumarate--CoA ligase 1 (4CL 1)
  misc_feature (18)..(558): Homolog of NCBI NO: 15636677 NR Description: 4-coumarate:CoA ligase [Populus tomentosa]
  misc_feature (12)..(558): Homolog of NCBI NO: 1117778 NR Description: 4-coumarate:CoA ligase [Lithospermum
MAPQEQAVSQVMEKQSNNNNSDVIFRSKLPDIYIPNHLSLHDYIFQNISEFATKPCLINGPTGHVYTYSDVHVISRQIAANFHKLGVNQNDVVMLLLPNCPEFVLSFLAASFRGATATAANPFFTPAEIAKQAKASNTKLIITEARYVDKIKPLQNDDGVVIVCIDDNESVPIPEGCLRFTELTQSTTEASEVIDSVEISPDDVVALPYSSGTTGLPKGVMLTHKGLVTSVAQQVDGENPNLYFHSDDVILCVLPMFHIYALNSIMLCGLRVGAAILIMPKFEINLLLELIQRCKVTVAPMVPPIVLAIAKSSETEKYDLSSIRVVKSGAAPLGKELEDAVNAKFPNAKLGQGYGMTEAGPVLAMSLGFAKEPFPVKSGACGTVVRNAEMKIVDPDTGDSLSRNQPGEICIRGHQIMKGYLNNPAATAETIDKDGWLHTGDIGLIDDDDELFIVDRLKELIKYKGFQVAPAELEALLIGHPDITDVAVVAMKEEAAGEVPVAFVVKSKDSELSEDDVKQFVSKQVVFYKRINKVFFTESIPKAPSGKILRKDLRAKLANGL

SEQ ID NO: 97234 - protein, 550 aa, Arabidopsis thaliana
  peptide (1)..(550): Ceres Seq. ID no. 12736619
  misc_feature (56)..(477): Pfam Name: AMP-binding enzyme Pfam Description: AMP-binding enzyme
  misc_feature (1)..(550): Homolog of NCBI NO: 15218002 NR Description: 4-coumarate:CoA ligase 1; protein id: supported by cDNA: gi_20466561, supported by cDNA: gi_609339
  misc_feature (1)..(550): Homolog of NCBI NO: 15232507 NR Description: putative 4-coumarate:CoA ligase 2; protein id: supported by cDNA: gi_20466457, supported by cDNA: gi_5702187
  misc_feature (1)..(550): Homolog of NCBI NO: 12229665 NR Description: 4-coumarate--CoA ligase 2 (4CL 2)
  misc_feature (1)..(550): Homolog of NCBI NO: 9651915 NR Description: 4-coumarate:coA ligase 2 [Rubus idaeus]
  misc_feature (1)..(550): Homolog of NCBI NO: 12229632 NR Description: 4-coumarate--CoA ligase 2 (4CL 2)
  misc_feature (7)..(546): Homolog of NCBI NO: 14289344 NR Description: 4-coumarate:CoA ligase 3 [Populus balsamifera
  misc_feature (11)..(547): Homolog of NCBI NO: 12229628 NR Description: 4-COUMARATE--COA LIGASE (4CL) (4-COUMAROYL-COA
  misc_feature (1)..(550): Homolog of NCBI NO: 12229631 NR Description: 4-coumarate--CoA ligase 1 (4CL 1)
  misc_feature (7)..(547): Homolog of NCBI NO: 15636677 NR Description: 4-coumarate:CoA ligase [Populus tomentosa]
  misc_feature (1)..(547): Homolog of NCBI NO: 1117778 NR Description: 4-coumarate:CoA ligase [Lithospermum
MEKQSNNNNSDVIFRSKLPDIYIPNHLSLHDYIFQNISEFATKPCLINGPTGHVYTYSDVHVISRQIAANFHKLGVNQNDVVMLLLPNCPEFVLSFLAASFRGATATAANPFFTPAEIAKQAKASNTKLIITEARYVDKIKPLQNDDGVVIVCIDDNESVPIPEGCLRFTELTQSTTEASEVIDSVEISPDDVVALPYSSGTTGLPKGVMLTHKGLVTSVAQQVDGENPNLYFHSDDVILCVLPMFHIYALNSIMLCGLRVGAAILIMPKFEINLLLELIQRCKVTVAPMVPPIVLAIAKSSETEKYDLSSIRVVKSGAAPLGKELEDAVNAKFPNAKLGQGYGMTEAGPVLAMSLGFAKEPFPVKSGACGTVVRNAEMKIVDPDTGDSLSRNQPGEICIRGHQIMKGYLNNPAATAETIDKDGWLHTGDIGLIDDDDELFIVDRLKELIKYKGFQVAPAELEALLIGHPDITDVAVVAMKEEAAGEVPVAFVVKSKDSELSEDDVKQFVSKQVVFYKRINKVFFTESIPKAPSGKILRKDLRAKLANGL

SEQ ID NO: 97235 - protein, 468 aa, Arabidopsis thaliana
  peptide (1)..(468): Ceres Seq. ID no. 12736620
  misc_feature (1)..(395): Pfam Name: AMP-binding enzyme Pfam Description: AMP-binding enzyme
  misc_feature (1)..(468): Homolog of NCBI NO: 15218002 NR Description: 4-coumarate:CoA ligase 1; protein id: supported by cDNA: gi_20466561, supported by cDNA: gi_609339
  misc_feature (1)..(468): Homolog of NCBI NO: 15232507 NR Description: putative 4-coumarate:CoA ligase 2; protein id: supported by cDNA: gi_20466457, supported by cDNA: gi_5702187
  misc_feature (1)..(468): Homolog of NCBI NO: 12229665 NR Description: 4-coumarate--CoA ligase 2 (4CL 2)
  misc_feature (1)..(468): Homolog of NCBI NO: 9651915 NR Description: 4-coumarate:coA ligase 2 [Rubus idaeus]
  misc_feature (1)..(468): Homolog of NCBI NO: 12229632 NR Description: 4-coumarate--CoA ligase 2 (4CL 2)
  misc_feature (1)..(464): Homolog of NCBI NO: 14289344 NR Description: 4-coumarate:CoA ligase 3 [Populus balsamifera
  misc_feature (1)..(465): Homolog of NCBI NO: 12229628 NR Description: 4-COUMARATE--COA LIGASE (4CL) (4-COUMAROYL-COA
  misc_feature (1)..(468): Homolog of NCBI NO: 12229631 NR Description: 4-coumarate--CoA ligase 1 (4CL 1)
  misc_feature (1)..(465): Homolog of NCBI NO: 15636677 NR Description: 4-coumarate:CoA ligase [Populus tomentosa]
  misc_feature (1)..(465): Homolog of NCBI NO: 1117778 NR Description: 4-coumarate:CoA ligase [Lithospermum
MLLLPNCPEFVLSFLAASFRGATATAANPFFTPAEIAKQAKASNTKLIITEARYVDKIKPLQNDDGVVIVCIDDNESVPIPEGCLRFTELTQSTTEASEVIDSVEISPDDVVALPYSSGTTGLPKGVMLTHKGLVTSVAQQVDGENPNLYFHSDDVILCVLPMFHIYALNSIMLCGLRVGAAILIMPKFEINLLLELIQRCKVTVAPMVPPIVLAIAKSSETEKYDLSSIRVVKSGAAPLGKELEDAVNAKFPNAKLGQGYGMTEAGPVLAMSLGFAKEPFPVKSGACGTVVRNAEMKIVDPDTGDSLSRNQPGEICIRGHQIMKGYLNNPAATAETIDKDGWLHTGDIGLIDDDDELFIVDRLKELIKYKGFQVAPAELEALLIGHPDITDVAVVAMKEEAAGEVPVAFVVKSKDSELSEDDVKQFVSKQVVFYKRINKVFFTESIPKAPSGKILRKDLRAKLANGL

SEQ ID NO: 97236 - DNA, 1992 bp, Arabidopsis thaliana
  misc_feature (1)..(1992): Ceres Seq. ID no. 12736624
  misc_feature: MA Experiment ID: 20000173 Result: Down-regulated in Transcription
  misc_feature: MA Experiment 20000173 PARAMETER Experiment Name: At_42deg_Heat_P Parameter: Age (day) Value: 14
  misc_feature: MA Experiment 20000173 PARAMETER Experiment Name: At_42deg_Heat_P Parameter: Organism Value: A. thaliana
  misc_feature: MA Experiment 20000173 PARAMETER Experiment Name: At_42deg_Heat_P Parameter: Plant Line Value: WS
  misc_feature: MA Experiment 20000173 PARAMETER Experiment Name: At_42deg_Heat_P Parameter: Temperature (deg C) Value: 42 vs. 22
  misc_feature: MA Experiment 20000173 PARAMETER Experiment Name: At_42deg_Heat_P Parameter: Timepoint (hr) Value: 6
  misc_feature: MA Experiment 20000173 PARAMETER Experiment Name: At_42deg_Heat_P Parameter: Tissue Value: Aerial
  misc_feature: MA Experiment ID: 20000179 Result: Up-regulated in Transcription
  misc_feature: MA Experiment 20000179 PARAMETER Experiment Name: At_Germinating_Seeds_P Parameter: Age (hr) Value: 6 vs. 0
  misc_feature: MA Experiment 20000179 PARAMETER Experiment Name: At_Germinating_Seeds_P Parameter: Tissue Value: Germinating Seeds
  misc_feature: MA Experiment ID: 20000180 Result: Up-regulated in Transcription
  misc_feature: MA Experiment 20000180 PARAMETER Experiment Name: At_Germinating_Seeds_P Parameter: Age (hr) Value: 24 vs. 0
  misc_feature: MA Experiment 20000180 PARAMETER Experiment Name: At_Germinating_Seeds_P Parameter: Tissue Value: Germinating Seeds
  misc_feature: MA Experiment ID: 20000184 Result: Down-regulated in Transcription
  misc_feature: MA Experiment 20000184 PARAMETER Experiment Name: At_Shoots__P Parameter: Age (day) Value: 7
  misc_feature: MA Experiment 20000184 PARAMETER Experiment Name: At_Shoots__P Parameter: Tissue Value: Shoots vs. Whole Plant
  misc_feature: MA Experiment ID: 20000227 Result: Up-regulated in Transcription
  misc_feature: MA Experiment 20000227 PARAMETER Experiment Name: At_Root-Tips-vs-Tops_P Parameter: Tissue Value: Root Tips vs. Root Tops
  misc_feature: MA Experiment ID: 20000438 Result: Down-regulated in Transcription
  misc_feature: MA Experiment 20000438 PARAMETER Experiment Name: At_Shoots__P Parameter: Age (day) Value: 14
  misc_feature: MA Experiment 20000438 PARAMETER Experiment Name: At_Shoots__P Parameter: Tissue Value: Shoots vs. Whole Plant
  misc_feature: MA Experiment ID: 20001247 Result: Up-regulated in Transcription
  misc_feature: MA Experiment 20001247 PARAMETER Experiment Name: At_Far-red-induction_P Parameter: Age (day) Value: 7
  misc_feature: MA Experiment 20001247 PARAMETER Experiment Name: At_Far-red-induction_P Parameter: Light Value: Far-red vs. White
  misc_feature: MA Experiment 20001247 PARAMETER Experiment Name: At_Far-red-induction_P Parameter: Organism Value: A. thaliana
  misc_feature: MA Experiment 20001247 PARAMETER Experiment Name: At_Far-red-induction_P Parameter: Plant Line Value: Columbia
  misc_feature: MA Experiment 20001247 PARAMETER Experiment Name: At_Far-red-induction_P Parameter: Timepoint (hr) Value: 1
  misc_feature: MA Experiment 20001247 PARAMETER Experiment Name: At_Far-red-induction_P Parameter: Tissue Value: Whole Plant
  misc_feature: MA Experiment ID: 20001451 Result: Up-regulated in Transcription
  misc_feature: MA Experiment 20001451 PARAMETER Experiment Name: At_Far-red-induction_P Parameter: Age (day) Value: 7
  misc_feature: MA Experiment 20001451 PARAMETER Experiment Name: At_Far-red-induction_P Parameter: Light Value: Far-red vs. White
  misc_feature: MA Experiment 20001451 PARAMETER Experiment Name: At_Far-red-induction_P Parameter: Organism Value: A. thaliana
  misc_feature: MA Experiment 20001451 PARAMETER Experiment Name: At_Far-red-induction_P Parameter: Plant Line Value: Columbia
  misc_feature: MA Experiment 20001451 PARAMETER Experiment Name: At_Far-red-induction_P Parameter: Timepoint (hr) Value: 24
  misc_feature: MA Experiment 20001451 PARAMETER Experiment Name: At_Far-red-induction_P Parameter: Tissue Value: Whole Plant
  misc_feature: MA Experiment ID: 20001556 Result: Down-regulated in Transcription
  misc_feature: MA Experiment 20001556 PARAMETER Experiment Name: At_Drought_Soil_Dry_P Parameter: Age (day) Value: 26
  misc_feature: MA Experiment 20001556 PARAMETER Experiment Name: At_Drought_Soil_Dry_P Parameter: Organism Value: A. thaliana
  misc_feature: MA Experiment 20001556 PARAMETER Experiment Name: At_Drought_Soil_Dry_P Parameter: Plant Line Value: WS
  misc_feature: MA Experiment 20001556 PARAMETER Experiment Name: At_Drought_Soil_Dry_P Parameter: Post Timepoint (hr) Value: None
  misc_feature: MA Experiment 20001556 PARAMETER Experiment Name: At_Drought_Soil_Dry_P Parameter: Post-Treatment Value: None
  misc_feature: MA Experiment 20001556 PARAMETER Experiment Name: At_Drought_Soil_Dry_P Parameter: Timepoint (day) Value: 12
  misc_feature: MA Experiment 20001556 PARAMETER Experiment Name: At_Drought_Soil_Dry_P Parameter: Treatment Value: Drought vs. No Drought
  misc_feature: MA Experiment ID: 20001558 Result: Up-regulated in Transcription
  misc_feature: MA Experiment 20001558 PARAMETER Experiment Name: At_Drought_Soil_Dry_P Parameter: Age (day) Value: 27
  misc_feature: MA Experiment 20001558 PARAMETER Experiment Name: At_Drought_Soil_Dry_P Parameter: Organism Value: A. thaliana
  misc_feature: MA Experiment 20001558 PARAMETER Experiment Name: At_Drought_Soil_Dry_P Parameter: Plant Line Value: WS
  misc_feature: MA Experiment 20001558 PARAMETER Experiment Name: At_Drought_Soil_Dry_P Parameter: Post Timepoint (hr) Value: 6
  misc_feature: MA Experiment 20001558 PARAMETER Experiment Name: At_Drought_Soil_Dry_P Parameter: Post-Treatment Value: Re-Water vs. No Drought
  misc_feature: MA Experiment 20001558 PARAMETER Experiment Name: At_Drought_Soil_Dry_P Parameter: Timepoint (day) Value: 13
  misc_feature: MA Experiment 20001558 PARAMETER Experiment Name: At_Drought_Soil_Dry_P Parameter: Treatment Value: Drought vs. No Drought
  misc_feature: MA Experiment ID: 20001560 Result: Up-regulated in Transcription
  misc_feature: MA Experiment 20001560 PARAMETER Experiment Name: At_Drought_Soil_Dry_P Parameter: Age (day) Value: 28
  misc_feature: MA Experiment 20001560 PARAMETER Experiment Name: At_Drought_Soil_Dry_P Parameter: Organism Value: A. thaliana
  misc_feature: MA Experiment 20001560 PARAMETER Experiment Name: At_Drought_Soil_Dry_P Parameter: Plant Line Value: WS
  misc_feature: MA Experiment 20001560 PARAMETER Experiment Name: At_Drought_Soil_Dry_P Parameter: Post Timepoint (hr) Value: None
  misc_feature: MA Experiment 20001560 PARAMETER Experiment Name: At_Drought_Soil_Dry_P Parameter: Post-Treatment Value: None
  misc_feature: MA Experiment 20001560 PARAMETER Experiment Name: At_Drought_Soil_Dry_P Parameter: Timepoint (day) Value: 14
  misc_feature: MA Experiment 20001560 PARAMETER Experiment Name: At_Drought_Soil_Dry_P Parameter: Treatment Value: Drought vs. No Drought
  misc_feature: MA Experiment ID: 20001905 Result: Down-regulated in Transcription
  misc_feature: MA Experiment 20001905 PARAMETER Experiment Name: At_Drought_Reproduction_P Parameter: Age (day) Value: 40
  misc_feature: MA Experiment 20001905 PARAMETER Experiment Name: At_Drought_Reproduction_P Parameter: Organism Value: A. thaliana
  misc_feature: MA Experiment 20001905 PARAMETER Experiment Name: At_Drought_Reproduction_P Parameter: Plant Line Value: WS
  misc_feature: MA Experiment 20001905 PARAMETER Experiment Name: At_Drought_Reproduction_P Parameter: Timepoint (day) Value: 10
  misc_feature: MA Experiment 20001905 PARAMETER Experiment Name: At_Drought_Reproduction_P Parameter: Tissue Value: Rosettes
  misc_feature: MA Experiment 20001905 PARAMETER Experiment Name: At_Drought_Reproduction_P Parameter: Treatment Value: Drought vs. No Drought
atggacgtaggagagagcaatgagagggtaaaagacgattctgcccttcaagcttcaccgaggagtcctctgagttctatagatcttgcaattgatggagctatgaatgcttctattgagcagttgtatcataacgtttgtgaaatggagagttctgatgatcagtctccgtccagggcgagttttatttcgtatggagctgaatctaggattgatttggagttgaggcatttggttggagatgtaggagaagaaggagagagcaagaaagagattatcttggagaagaaggaagaaagtaatggagaaggtagcttgagtcagaagaaacctctttcgaatggtaagaaggttgcgaaaacgagtcctaataatccgaagatgccgggttcgaggatctcttcgaggaaatcaccggatttggggaaggtttctgttgatgaggagagtcctgagcttggtgtggtgttgttgaagcaagccagagagttggtttcttcaggtgagaatttaaacaaggctcttgatttagcgttgagagcggtgaaagtgtttgagaaatgtggggaaggagagaaacaacttgggttgaatttggtgatgtctttgcatatcttggcagcgatatatgcagggttagggagatacaatgacgctgtgcctgttcttgaacgttctatcgagataccgatgattgaagatggtgaggatcacgcgttggcgaaatttgcagggtgtatgcagcttggtgacatgtatggtttgatgggtcaagttgaaaattcgattatgctatacaccgcgggtttggagattcaaagacaagttcttggagaatcggatgcacgagttggcgaaacttgtaggtacttagcggaagctcatgttcaagcaatgcagtttgaagaagcctcaaggctttgtcaaatggcattggacattcacaaagaaaacggtgctgccgctacagcttctattgaagaagctgcggatagaaaactgatgggacttatctgcgatgcgaaaggtgattatgaagttgcgcttgagcattatgttttagcgagcatggcaatgtcatctcagaaccatagagaagatgttgctgctgtagattgcagtattggtgatgcttacatgtcgctagctaggtttgatgaagcgatattcgcataccagaaggctttagctgtgtttaagcaaggaaaaggtgagactcattcctctgttgctttggtttacgttaggcttgctgacttgtacaacaagattgggaaaacacgcgattccaaatcgtactgcgaaaacgctctcaagatttacctaaaaccgactccaggaactcctatggaagaggttgcgactggttttatagagatttctgcgatatatcagtcaatgaatgaacttgatcaagctcttaagttgttgagacgggcgttgaagatatatgcaaacgctccaggtcaacagaacacgattgcaggtattgaagctcaaatgggtgtggttacttatatgatgggaaattactccgagtcctacgacatattcaagagcgcgatatcaaagttccgcaatagcggagagaaaaaaaccgctcttttcgggattgctttgaatcagatgggactagcttgcgttcagcgttacgcgatcaatgaagctgcagatttgtttgaagaagcgaaaactattcttgagaaagagtgtggaccgtaccatcccgatacattagcggtttacagtaaccttgctggaacgtacgacgcaatgggaaggttagatgatgctatagagatattggagtatgttgttgggacaagagaagagaagctcgggacggcaaatcccgaggttgaggacgagaagcagaggcttgctgcgttgttgaaagaagctggaagaggaaggagtaaaagaaacagagcacttcttacccttttggacaacaaccctgaaattgcaaatggacagagaccggtttattga

SEQ ID NO: 97237 - protein, 663 aa, Arabidopsis thaliana
  peptide (1)..(663): Ceres Seq. ID no. 12736625
  misc_feature (285)..(318): Pfam Name: TPR Domain Pfam Description: TPR Domain
  misc_feature (84)..(653): Homolog of NCBI NO: 19387245 NR Description: putative kinesin light chain gene [Oryza sativa
  misc_feature (11)..(153): Homolog of NCBI NO: 19387245 NR Description: putative kinesin light chain gene [Oryza sativa
  misc_feature (114)..(653): Homolog of NCBI NO: 20152971 NR Description: similar to A. thaliana protein BAB01483 similar
  misc_feature (6)..(179): Homolog of NCBI NO: 20152971 NR Description: similar to A. thaliana protein BAB01483 similar
  misc_feature (32)..(652): Homolog of NCBI NO: 26450936 NR Description: unknown protein [Arabidopsis thaliana]
  misc_feature (32)..(652): Homolog of NCBI NO: 9802538 NR Description: F17L21.29 [Arabidopsis thaliana]
  misc_feature (32)..(652): Homolog of NCBI NO: 15223528 NR Description: hypothetical protein; protein id: At1g27500.1
  misc_feature (111)..(652): Homolog of NCBI NO: 15236944 NR Description: putative protein; protein id: At4g10840.1, by cDNA: 2538., supported by cDNA: gi_18176147, supported by
  misc_feature (111)..(652): Homolog of NCBI NO: 21554384 NR Description: putative kinesin light chain [Arabidopsis
  misc_feature (149)..(645): Homolog of NCBI NO: 25408142 NR Description: probable kinesin light chain [imported] - thaliana >gi|4432819|gb|AAD20669.1| putative kinesin light chain
MDVGESNERVKDDSALQASPRSPLSSIDLAIDGAMNASIEQLYHNVCEMESSDDQSPSRASFISYGAESRIDLELRHLVGDVGEEGESKKEIILEKKEESNGEGSLSQKKPLSNGKKVAKTSPNNPKMPGSRISSRKSPDLGKVSVDEESPELGVVLLKQARELVSSGENLNKALDLALRAVKVFEKCGEGEKQLGLNLVMSLHILAAIYAGLGRYNDAVPVLERSIEIPMIEDGEDHALAKFAGCMQLGDMYGLMGQVENSIMLYTAGLEIQRQVLGESDARVGETCRYLAEAHVQAMQFEEASRLCQMALDIHKENGAAATASIEEAADRKLMGLICDAKGDYEVALEHYVLASMAMSSQNHREDVAAVDCSIGDAYMSLARFDEAIFAYQKALAVFKQGKGETHSSVALVYVRLADLYNKIGKTRDSKSYCENALKIYLKPTPGTPMEEVATGFIEISAIYQSMNELDQALKLLRRALKIYANAPGQQNTIAGIEAQMGVVTYMMGNYSESYDIFKSAISKFRNSGEKKTALFGIALNQMGLACVQRYAINEAADLFEEAKTILEKECGPYHPDTLAVYSNLAGTYDAMGRLDDAIEILEYVVGTREEKLGTANPEVEDEKQRLAALLKEAGRGRSKRNRALLTLLDNNPEIANGQRPVY

SEQ ID NO: 97238 - protein, 629 aa, Arabidopsis thaliana
  peptide (1)..(629): Ceres Seq. ID no. 12736626
  misc_feature (251)..(284): Pfam Name: TPR Domain Pfam Description: TPR Domain
  misc_feature (50)..(619): Homolog of NCBI NO: 19387245 NR Description: putative kinesin light chain gene [Oryza sativa
  misc_feature (1)..(119): Homolog of NCBI NO: 19387245 NR Description: putative kinesin light chain gene [Oryza sativa
  misc_feature (80)..(619): Homolog of NCBI NO: 20152971 NR Description: similar to A. thaliana protein BAB01483 similar
  misc_feature (1)..(145): Homolog of NCBI NO: 20152971 NR Description: similar to A. thaliana protein BAB01483 similar
  misc_feature (1)..(618): Homolog of NCBI NO: 26450936 NR Description: unknown protein [Arabidopsis thaliana]
  misc_feature (1)..(618): Homolog of NCBI NO: 9802538 NR Description: F17L21.29 [Arabidopsis thaliana]
  misc_feature (1)..(618): Homolog of NCBI NO: 15223528 NR Description: hypothetical protein; protein id: At1g27500.1
  misc_feature (77)..(618): Homolog of NCBI NO: 15236944 NR Description: putative protein; protein id: At4g10840.1, by cDNA: 2538., supported by cDNA: gi_18176147, supported by
  misc_feature (77)..(618): Homolog of NCBI NO: 21554384 NR Description: putative kinesin light chain [Arabidopsis
  misc_feature (115)..(611): Homolog of NCBI NO: 25408142 NR Description: probable kinesin light chain [imported] - thaliana >gi|4432819|gb|AAD20669.1| putative kinesin light chain
MNASIEQLYHNVCEMESSDDQSPSRASFISYGAESRIDLELRHLVGDVGEEGESKKEIILEKKEESNGEGSLSQKKPLSNGKKVAKTSPNNPKMPGSRISSRKSPDLGKVSVDEESPELGVVLLKQARELVSSGENLNKALDLALRAVKVFEKCGEGEKQLGLNLVMSLHILAAIYAGLGRYNDAVPVLERSIEIPMIEDGEDHALAKFAGCMQLGDMYGLMGQVENSIMLYTAGLEIQRQVLGESDARVGETCRYLAEAHVQAMQFEEASRLCQMALDIHKENGAAATASIEEAADRKLMGLICDAKGDYEVALEHYVLASMAMSSQNHREDVAAVDCSIGDAYMSLARFDEAIFAYQKALAVFKQGKGETHSSVALVYVRLADLYNKIGKTRDSKSYCENALKIYLKPTPGTPMEEVATGFIEISAIYQSMNELDQALKLLRRALKIYANAPGQQNTIAGIEAQMGVVTYMMGNYSESYDIFKSAISKFRNSGEKKTALFGIALNQMGLACVQRYAINEAADLFEEAKTILEKECGPYHPDTLAVYSNLAGTYDAMGRLDDAIEILEYVVGTREEKLGTANPEVEDEKQRLAALLKEAGRGRSKRNRALLTLLDNNPEIANGQRPVY

SEQ ID NO: 97239 - protein, 615 aa, Arabidopsis thaliana
  peptide (1)..(615): Ceres Seq. ID no. 12736627
  misc_feature (237)..(270): Pfam Name: TPR Domain Pfam Description: TPR Domain
  misc_feature (36)..(605): Homolog of NCBI NO: 19387245 NR Description: putative kinesin light chain gene [Oryza sativa
  misc_feature (1)..(105): Homolog of NCBI NO: 19387245 NR Description: putative kinesin light chain gene [Oryza sativa
  misc_feature (66)..(605): Homolog of NCBI NO: 20152971 NR Description: similar to A. thaliana protein BAB01483 similar
  misc_feature (1)..(131): Homolog of NCBI NO: 20152971 NR Description: similar to A. thaliana protein BAB01483 similar
  misc_feature (1)..(604): Homolog of NCBI NO: 26450936 NR Description: unknown protein [Arabidopsis thaliana]
  misc_feature (1)..(604): Homolog of NCBI NO: 9802538 NR Description: F17L21.29 [Arabidopsis thaliana]
  misc_feature (1)..(604): Homolog of NCBI NO: 15223528 NR Description: hypothetical protein; protein id: At1g27500.1
  misc_feature (63)..(604): Homolog of NCBI NO: 15236944 NR Description: putative protein; protein id: At4g10840.1, by cDNA: 2538., supported by cDNA: gi_18176147, supported by
  misc_feature (63)..(604): Homolog of NCBI NO: 21554384 NR Description: putative kinesin light chain [Arabidopsis
  misc_feature (101)..(597): Homolog of NCBI NO: 25408142 NR Description: probable kinesin light chain [imported] - thaliana >gi|4432819|gb|AAD20669.1| putative kinesin light chain
MESSDDQSPSRASFISYGAESRIDLELRHLVGDVGEEGESKKEIILEKKEESNGEGSLSQKKPLSNGKKVAKTSPNNPKMPGSRISSRKSPDLGKVSVDEESPELGVVLLKQARELVSSGENLNKALDLALRAVKVFEKCGEGEKQLGLNLVMSLHILAAIYAGLGRYNDAVPVLERSIEIPMIEDGEDHALAKFAGCMQLGDMYGLMGQVENSIMLYTAGLEIQRQVLGESDARVGETCRYLAEAHVQAMQFEEASRLCQMALDIHKENGAAATASIEEAADRKLMGLICDAKGDYEVALEHYVLASMAMSSQNHREDVAAVDCSIGDAYMSLARFDEAIFAYQKALAVFKQGKGETHSSVALVYVRLADLYNKIGKTRDSKSYCENALKIYLKPTPGTPMEEVATGFIEISAIYQSMNELDQALKLLRRALKIYANAPGQQNTIAGIEAQMGVVTYMMGNYSESYDIFKSAISKFRNSGEKKTALFGIALNQMGLACVQRYAINEAADLFEEAKTILEKECGPYHPDTLAVYSNLAGTYDAMGRLDDAIEILEYVVGTREEKLGTANPEVEDEKQRLAALLKEAGRGRSKRNRALLTLLDNNPEIANGQRPVY

SEQ ID NO: 97240 - DNA, 1297 bp, Arabidopsis thaliana
  misc_feature (1)..(1297): Ceres Seq. ID no. 12736645
  misc_feature: MA Experiment ID: 20000180 Result: Down-regulated in Transcription
  misc_feature: MA Experiment 20000180 PARAMETER Experiment Name: At_Germinating_Seeds_P Parameter: Age (hr) Value: 24 vs. 0
  misc_feature: MA Experiment 20000180 PARAMETER Experiment Name: At_Germinating_Seeds_P Parameter: Tissue Value: Germinating Seeds
  misc_feature: MA Experiment ID: 20000234 Result: Up-regulated in Transcription
  misc_feature: MA Experiment 20000234 PARAMETER Experiment Name: At_Siliques_P Parameter: Age (day) Value: 21
  misc_feature: MA Experiment 20000234 PARAMETER Experiment Name: At_Siliques_P Parameter: Organism Value: A. thaliana
  misc_feature: MA Experiment 20000234 PARAMETER Experiment Name: At_Siliques_P Parameter: Plant Line Value: WS
  misc_feature: MA Experiment 20000234 PARAMETER Experiment Name: At_Siliques_P Parameter: Tissue Value: Less Than 5mm Siliques vs. Whole Plant
  misc_feature: MA Experiment ID: 20001910 Result: Up-regulated in Transcription
  misc_feature: MA Experiment 20001910 PARAMETER Experiment Name: At_Drought_Reproduction_P Parameter: Age (day) Value: 37
  misc_feature: MA Experiment 20001910 PARAMETER Experiment Name: At_Drought_Reproduction_P Parameter: Organism Value: A. thaliana
  misc_feature: MA Experiment 20001910 PARAMETER Experiment Name: At_Drought_Reproduction_P Parameter: Plant Line Value: WS
  misc_feature: MA Experiment 20001910 PARAMETER Experiment Name: At_Drought_Reproduction_P Parameter: Timepoint (day) Value: 7
  misc_feature: MA Experiment 20001910 PARAMETER Experiment Name: At_Drought_Reproduction_P Parameter: Tissue Value: Flowers
  misc_feature: MA Experiment 20001910 PARAMETER Experiment Name: At_Drought_Reproduction_P Parameter: Treatment Value: Drought vs. No Drought
ggatgatcgacatgcaacgatgaaatcatcgtcatcgatttttcgtgaaacttcagagaaaaaatcagagagatggatgatgatgaacattggaagattttctccatttttcttgtcttccttttgtataactcttttcttcaccggtttctttgtttatcagaatccttttaaatccatcgctgatcaaaatgttctttctttccaacctcaaatcgatcctgagtgtgatttgttcaagggacattgggttccagacaaaagaggatctttatacacaaactcgagctgtgctacgattcccgactcgaagaactgcataaaacaagggagacccgacaaagatttcttgttctggagatggaaacccgatggttgcgatcttccgaggtttaatccaaaggcgtttctcagtatggttcgagggaagaagatgaattttattggtgattctgtggctaggaaccatatggaatctcttctttgcttgttgtcaatggaagaaactcctaaggacatctacaaggatggagaagatagaaacaggatttggtactttccgaagcacgattttactctctcgacctcgtggactaagtttcttgtggaggaacgagagagaagagatagtaacaatacaggtactggattgtttgatctagatatcggcaagatcgatgaagggtggtttaatggtctaccgaatacagacattgctattgtctcggctgctcattggttcttcagacctatatttatacatagaggagatgagacactgggttgcatttactgtaacttaccaaacatgactcagattagcccggaagaagggtttaagcttgtttactcagctgtccttaggcaaatcaatgagtgtgagatgtgtaagaaagatttagtgacggtactgaggactatttcacctgcgcatttcgagaatgggacttgggacaccggaggaacttgcagcaggacgagtcctttcggagaaaacaaaattgacctgcagagcaatgagatgaagatcaggaaatctcagattgaacagcttgaaggtataacaaaacgaggcaacaaagcaaagaagtttgcggtattggatgtgacaagggttatgcagatgagacctgatgggcatcccaatggttactggggaaataaatggatgaaaggttataatgattgcgtgcattggtgtttgcccgggccaatcgatgcgtggaacgactttttaatggcgataattagacagttaagatgatatgatttgtggatataaacattcttttacctt

SEQ ID NO: 97241 - protein, 420 aa, Arabidopsis thaliana
  peptide (1)..(420): Ceres Seq. ID no. 12736646
  misc_feature (7)..(420): Homolog of NCBI NO: 15232914 NR Description: hypothetical protein; protein id: At3g28150.1, by cDNA: gi_17979060 [Arabidopsis thaliana] emb|CAA23045.1~gene_id:MMG15.18~similar to unknown protein
  misc_feature (50)..(418): Homolog of NCBI NO: 15237213 NR Description: putative protein; protein id: At5g15900.1
  misc_feature (24)..(416): Homolog of NCBI NO: 7486743 NR Description: hypothetical protein F9D16.260 - Arabidopsis >gi|4454048|emb|CAA23045.1| putative protein [Arabidopsis >gi|7269228|emb|CAB81297.1| putative protein [Arabidopsis
  misc_feature (24)..(416): Homolog of NCBI NO: 30686312 NR Description: expressed protein [Arabidopsis thaliana]
  misc_feature (76)..(416): Homolog of NCBI NO: 34911880 NR Description: OSJNBb0032K15.17 [Oryza sativa (japonica
  misc_feature (33)..(420): Homolog of NCBI NO: 15234058 NR Description: hypothetical protein; protein id: At4g01080.1
  misc_feature (33)..(416): Homolog of NCBI NO: 34911888 NR Description: OSJNBb0032K15.21 [Oryza sativa (japonica
  misc_feature (64)..(416): Homolog of NCBI NO: 30678135 NR Description: expressed protein [Arabidopsis thaliana] unknown protein [Arabidopsis thaliana]
  misc_feature (75)..(420): Homolog of NCBI NO: 28393189 NR Description: unknown protein [Arabidopsis thaliana]
  misc_feature (24)..(416): Homolog of NCBI NO: 15237044 NR Description: putative protein; protein id: At4g11090.1
DDRHATMKSSSSIFRETSEKKSERWMMMNIGRFSPFFLSSFCITLFFTGFFVYQNPFKSIADQNVLSFQPQIDPECDLFKGHWVPDKRGSLYTNSSCATIPDSKNCIKQGRPDKDFLFWRWKPDGCDLPRFNPKAFLSMVRGKKMNFIGDSVARNHMESLLCLLSMEETPKDIYKDGEDRNRIWYFPKHDFTLSTSWTKFLVEERERRDSNNTGTGLFDLDIGKIDEGWFNGLPNTDIAIVSAAHWFFRPIFIHRGDETLGCIYCNLPNMTQISPEEGFKLVYSAVLRQINECEMCKKDLVTVLRTISPAHFENGTWDTGGTCSRTSPFGENKIDLQSNEMKIRKSQIEQLEGITKRGNKAKKFAVLDVTRVMQMRPDGHPNGYWGNKWMKGYNDCVHWCLPGPIDAWNDFLMAIIRQLR

SEQ ID NO: 97242 - protein, 414 aa, Arabidopsis thaliana
  peptide (1)..(414): Ceres Seq. ID no. 12736647
  misc_feature (1)..(414): Homolog of NCBI NO: 15232914 NR Description: hypothetical protein; protein id: At3g28150.1, by cDNA: gi_17979060 [Arabidopsis thaliana] emb|CAA23045.1~gene_id:MMG15.18~similar to unknown protein
  misc_feature (44)..(412): Homolog of NCBI NO: 15237213 NR Description: putative protein; protein id: At5g15900.1
  misc_feature (18)..(410): Homolog of NCBI NO: 7486743 NR Description: hypothetical protein F9D16.260 - Arabidopsis >gi|4454048|emb|CAA23045.1| putative protein [Arabidopsis >gi|7269228|emb|CAB81297.1| putative protein [Arabidopsis
  misc_feature (18)..(410): Homolog of NCBI NO: 30686312 NR Description: expressed protein [Arabidopsis thaliana]
  misc_feature (70)..(410): Homolog of NCBI NO: 34911880 NR Description: OSJNBb0032K15.17 [Oryza sativa (japonica
  misc_feature (27)..(414): Homolog of NCBI NO: 15234058 NR Description: hypothetical protein; protein id: At4g01080.1
  misc_feature (27)..(410): Homolog of NCBI NO: 34911888 NR Description: OSJNBb0032K15.21 [Oryza sativa (japonica
  misc_feature (58)..(410): Homolog of NCBI NO: 30678135 NR Description: expressed protein [Arabidopsis thaliana] unknown protein [Arabidopsis thaliana]
  misc_feature (69)..(414): Homolog of NCBI NO: 28393189 NR Description: unknown protein [Arabidopsis thaliana]
  misc_feature (18)..(410): Homolog of NCBI NO: 15237044 NR Description: putative protein; protein id: At4g11090.1
MKSSSSIFRETSEKKSERWMMMNIGRFSPFFLSSFCITLFFTGFFVYQNPFKSIADQNVLSFQPQIDPECDLFKGHWVPDKRGSLYTNSSCATIPDSKNCIKQGRPDKDFLFWRWKPDGCDLPRFNPKAFLSMVRGKKMNFIGDSVARNHMESLLCLLSMEETPKDIYKDGEDRNRIWYFPKHDFTLSTSWTKFLVEERERRDSNNTGTGLFDLDIGKIDEGWFNGLPNTDIAIVSAAHWFFRPIFIHRGDETLGCIYCNLPNMTQISPEEGFKLVYSAVLRQINECEMCKKDLVTVLRTISPAHFENGTWDTGGTCSRTSPFGENKIDLQSNEMKIRKSQIEQLEGITKRGNKAKKFAVLDVTRVMQMRPDGHPNGYWGNKWMKGYNDCVHWCLPGPIDAWNDFLMAIIRQLR

SEQ ID NO: 97243 - protein, 395 aa, Arabidopsis thaliana
  peptide (1)..(395): Ceres Seq. ID no. 12736648
  misc_feature (1)..(395): Homolog of NCBI NO: 15232914 NR Description: hypothetical protein; protein id: At3g28150.1, by cDNA: gi_17979060 [Arabidopsis thaliana] emb|CAA23045.1~gene_id:MMG15.18~similar to unknown protein
  misc_feature (25)..(393): Homolog of NCBI NO: 15237213 NR Description: putative protein; protein id: At5g15900.1
  misc_feature (1)..(391): Homolog of NCBI NO: 7486743 NR Description: hypothetical protein F9D16.260 - Arabidopsis >gi|4454048|emb|CAA23045.1| putative protein [Arabidopsis >gi|7269228|emb|CAB81297.1| putative protein [Arabidopsis
  misc_feature (1)..(391): Homolog of NCBI NO: 30686312 NR Description: expressed protein [Arabidopsis thaliana]
  misc_feature (51)..(391): Homolog of NCBI NO: 34911880 NR Description: OSJNBb0032K15.17 [Oryza sativa (japonica
  misc_feature (8)..(395): Homolog of NCBI NO: 15234058 NR Description: hypothetical protein; protein id: At4g01080.1
  misc_feature (8)..(391): Homolog of NCBI NO: 34911888 NR Description: OSJNBb0032K15.21 [Oryza sativa (japonica
  misc_feature (39)..(391): Homolog of NCBI NO: 30678135 NR Description: expressed protein [Arabidopsis thaliana] unknown protein [Arabidopsis thaliana]
  misc_feature (50)..(395): Homolog of NCBI NO: 28393189 NR Description: unknown protein [Arabidopsis thaliana]
  misc_feature (1)..(391): Homolog of NCBI NO: 15237044 NR Description: putative protein; protein id: At4g11090.1
MMMNIGRFSPFFLSSFCITLFFTGFFVYQNPFKSIADQNVLSFQPQIDPECDLFKGHWVPDKRGSLYTNSSCATIPDSKNCIKQGRPDKDFLFWRWKPDGCDLPRFNPKAFLSMVRGKKMNFIGDSVARNHMESLLCLLSMEETPKDIYKDGEDRNRIWYFPKHDFTLSTSWTKFLVEERERRDSNNTGTGLFDLDIGKIDEGWFNGLPNTDIAIVSAAHWFFRPIFIHRGDETLGCIYCNLPNMTQISPEEGFKLVYSAVLRQINECEMCKKDLVTVLRTISPAHFENGTWDTGGTCSRTSPFGENKIDLQSNEMKIRKSQIEQLEGITKRGNKAKKFAVLDVTRVMQMRPDGHPNGYWGNKWMKGYNDCVHWCLPGPIDAWNDFLMAIIRQLR

SEQ ID NO: 97244 - DNA, 1809 bp, Arabidopsis thaliana
  misc_feature (1)..(1809): Ceres Seq. ID no. 12736691
  misc_feature: MA Experiment ID: 20000182 Result: Up-regulated in Transcription
  misc_feature: MA Experiment 20000182 PARAMETER Experiment Name: At_2mM_SA_P Parameter: Age (day) Value: 14
  misc_feature: MA Experiment 20000182 PARAMETER Experiment Name: At_2mM_SA_P Parameter: Organism Value: A. thaliana
  misc_feature: MA Experiment 20000182 PARAMETER Experiment Name: At_2mM_SA_P Parameter: Plant Line Value: WS
  misc_feature: MA Experiment 20000182 PARAMETER Experiment Name: At_2mM_SA_P Parameter: Timepoint (hr) Value: 6
  misc_feature: MA Experiment 20000182 PARAMETER Experiment Name: At_2mM_SA_P Parameter: Tissue Value: Aerial
  misc_feature: MA Experiment 20000182 PARAMETER Experiment Name: At_2mM_SA_P Parameter: Treatment Value: 2mM SA vs. No Treatment
  misc_feature: MA Experiment ID: 20000184 Result: Down-regulated in Transcription
  misc_feature: MA Experiment 20000184 PARAMETER Experiment Name: At_Shoots__P Parameter: Age (day) Value: 7
  misc_feature: MA Experiment 20000184 PARAMETER Experiment Name: At_Shoots__P Parameter: Tissue Value: Shoots vs. Whole Plant
  misc_feature: MA Experiment ID: 20000185 Result: Down-regulated in Transcription
  misc_feature: MA Experiment 20000185 PARAMETER Experiment Name: At_Roots__P Parameter: Age (day) Value: 7 vs. 21
  misc_feature: MA Experiment 20000185 PARAMETER Experiment Name: At_Roots__P Parameter: Organism Value: A. thaliana
  misc_feature: MA Experiment 20000185 PARAMETER Experiment Name: At_Roots__P Parameter: Tissue Value: Roots vs. Whole Plant
  misc_feature: MA Experiment ID: 20000227 Result: Down-regulated in Transcription
  misc_feature: MA Experiment 20000227 PARAMETER Experiment Name: At_Root-Tips-vs-Tops_P Parameter: Tissue Value: Root Tips vs. Root Tops
  misc_feature: MA Experiment ID: 20000234 Result: Down-regulated in Transcription
  misc_feature: MA Experiment 20000234 PARAMETER Experiment Name: At_Siliques_P Parameter: Age (day) Value: 21
  misc_feature: MA Experiment 20000234 PARAMETER Experiment Name: At_Siliques_P Parameter: Organism Value: A. thaliana
  misc_feature: MA Experiment 20000234 PARAMETER Experiment Name: At_Siliques_P Parameter: Plant Line Value: WS
  misc_feature: MA Experiment 20000234 PARAMETER Experiment Name: At_Siliques_P Parameter: Tissue Value: Less Than 5mm Siliques vs. Whole Plant
  misc_feature: MA Experiment ID: 20000235 Result: Down-regulated in Transcription
  misc_feature: MA Experiment 20000235 PARAMETER Experiment Name: At_Siliques_P Parameter: Age (day) Value: 21
  misc_feature: MA Experiment 20000235 PARAMETER Experiment Name: At_Siliques_P Parameter: Organism Value: A. thaliana
  misc_feature: MA Experiment 20000235 PARAMETER Experiment Name: At_Siliques_P Parameter: Plant Line Value: WS
  misc_feature: MA Experiment 20000235 PARAMETER Experiment Name: At_Siliques_P Parameter: Tissue Value: 5-10mm Siliques vs. Whole Plant
  misc_feature: MA Experiment ID: 20000264 Result: Down-regulated in Transcription
  misc_feature: MA Experiment 20000264 PARAMETER Experiment Name: At_Open_Flower_P Parameter: Age (day) Value: 21
  misc_feature: MA Experiment 20000264 PARAMETER Experiment Name: At_Open_Flower_P Parameter: Plant Line Value: WS
  misc_feature: MA Experiment 20000264 PARAMETER Experiment Name: At_Open_Flower_P Parameter: Tissue Value: Open Flower vs. Whole Plant
  misc_feature: MA Experiment ID: 20000265 Result: Down-regulated in Transcription
  misc_feature: MA Experiment 20000265 PARAMETER Experiment Name: At_Open_Flower_P Parameter: Age (day) Value: 21
  misc_feature: MA Experiment 20000265 PARAMETER Experiment Name: At_Open_Flower_P Parameter: Plant Line Value: WS
  misc_feature: MA Experiment 20000265 PARAMETER Experiment Name: At_Open_Flower_P Parameter: Tissue Value: Closed Flower vs. Whole Plant
  misc_feature: MA Experiment ID: 20000286 Result: Down-regulated in Transcription
  misc_feature: MA Experiment 20000286 PARAMETER Experiment Name: At_Open_Flower_P Parameter: Age (day) Value: 21
  misc_feature: MA Experiment 20000286 PARAMETER Experiment Name: At_Open_Flower_P Parameter: Plant Line Value: WS
  misc_feature: MA Experiment 20000286 PARAMETER Experiment Name: At_Open_Flower_P Parameter: Tissue Value: Half Open vs. Whole Plant
  misc_feature: MA Experiment ID: 20000438 Result: Down-regulated in Transcription
  misc_feature: MA Experiment 20000438 PARAMETER Experiment Name: At_Shoots__P Parameter: Age (day) Value: 14
  misc_feature: MA Experiment 20000438 PARAMETER Experiment Name: At_Shoots__P Parameter: Tissue Value: Shoots vs. Whole Plant
  misc_feature: MA Experiment ID: 20000439 Result: Down-regulated in Transcription
  misc_feature: MA Experiment 20000439 PARAMETER Experiment Name: At_Roots__P Parameter: Age (day) Value: 14 vs. 21
  misc_feature: MA Experiment 20000439 PARAMETER Experiment Name: At_Roots__P Parameter: Organism Value: A. thaliana
  misc_feature: MA Experiment 20000439 PARAMETER Experiment Name: At_Roots__P Parameter: Tissue Value: Roots vs. Whole Plant
  misc_feature: MA Experiment ID: 20000456 Result: Up-regulated in Transcription
  misc_feature: MA Experiment 20000456 PARAMETER Experiment Name: At_100uM_BA_P Parameter: Age (day) Value: 14
  misc_feature: MA Experiment 20000456 PARAMETER Experiment Name: At_100uM_BA_P Parameter: Organism Value: A. thaliana
  misc_feature: MA Experiment 20000456 PARAMETER Experiment Name: At_100uM_BA_P Parameter: Plant Line Value: WS
  misc_feature: MA Experiment 20000456 PARAMETER Experiment Name: At_100uM_BA_P Parameter: Timepoint (hr) Value: 6
  misc_feature: MA Experiment 20000456 PARAMETER Experiment Name: At_100uM_BA_P Parameter: Tissue Value: Aerial
  misc_feature: MA Experiment 20000456 PARAMETER Experiment Name: At_100uM_BA_P Parameter: Treatment Value: 100uM BA vs. No Treatment
  misc_feature: MA Experiment ID: 20000573 Result: Up-regulated in Transcription
  misc_feature: MA Experiment 20000573 PARAMETER Experiment Name: At_100uM_ABA_Mutants__P Parameter: Organism Value: A. thaliana
  misc_feature: MA Experiment 20000573 PARAMETER Experiment Name: At_100uM_ABA_Mutants__P Parameter: Plant Line Value: CS22 vs. Ler wt
  misc_feature: MA Experiment 20000573 PARAMETER Experiment Name: At_100uM_ABA_Mutants__P Parameter: Timepoint (hr) Value: N/A
  misc_feature: MA Experiment 20000573 PARAMETER Experiment Name: At_100uM_ABA_Mutants__P Parameter: Tissue Value: Whole Plant
  misc_feature: MA Experiment 20000573 PARAMETER Experiment Name: At_100uM_ABA_Mutants__P Parameter: Treatment Value: None
  misc_feature: MA Experiment ID: 20000574 Result: Up-regulated in Transcription
  misc_feature: MA Experiment 20000574 PARAMETER Experiment Name: At_100uM_ABA_Mutants__P Parameter: Organism Value: A. thaliana
  misc_feature: MA Experiment 20000574 PARAMETER Experiment Name: At_100uM_ABA_Mutants__P Parameter: Plant Line Value: CS23 vs. Ler wt
  misc_feature: MA Experiment 20000574 PARAMETER Experiment Name: At_100uM_ABA_Mutants__P Parameter: Timepoint (hr) Value: N/A
  misc_feature: MA Experiment 20000574 PARAMETER Experiment Name: At_100uM_ABA_Mutants__P Parameter: Tissue Value: Whole Plant
  misc_feature: MA Experiment 20000574 PARAMETER Experiment Name: At_100uM_ABA_Mutants__P Parameter: Treatment Value: None
  misc_feature: MA Experiment ID: 20000794 Result: Down-regulated in Transcription
  misc_feature: MA Experiment 20000794 PARAMETER Experiment Name: At_Petals_P Parameter: Age (day) Value: 23-25 days
  misc_feature: MA Experiment 20000794 PARAMETER Experiment Name: At_Petals_P Parameter: Plant Line Value: WS
  misc_feature: MA Experiment 20000794 PARAMETER Experiment Name: At_Petals_P Parameter: Tissue Value: Petals vs. Whole plant
  misc_feature: MA Experiment ID: 20001556 Result: Down-regulated in Transcription
  misc_feature: MA Experiment 20001556 PARAMETER Experiment Name: At_Drought_Soil_Dry_P Parameter: Age (day) Value: 26
  misc_feature: MA Experiment 20001556 PARAMETER Experiment Name: At_Drought_Soil_Dry_P Parameter: Organism Value: A. thaliana
  misc_feature: MA Experiment 20001556 PARAMETER Experiment Name: At_Drought_Soil_Dry_P Parameter: Plant Line Value: WS
  misc_feature: MA Experiment 20001556 PARAMETER Experiment Name: At_Drought_Soil_Dry_P Parameter: Post Timepoint (hr) Value: None
  misc_feature: MA Experiment 20001556 PARAMETER Experiment Name: At_Drought_Soil_Dry_P Parameter: Post-Treatment Value: None
  misc_feature: MA Experiment 20001556 PARAMETER Experiment Name: At_Drought_Soil_Dry_P Parameter: Timepoint (day) Value: 12
  misc_feature: MA Experiment 20001556 PARAMETER Experiment Name: At_Drought_Soil_Dry_P Parameter: Treatment Value: Drought vs. No Drought
  misc_feature: MA Experiment ID: 20001755 Result: Down-regulated in Transcription
  misc_feature: MA Experiment 20001755 PARAMETER Experiment Name: At_50mM_NH4NO3_L-to-H_P Parameter: Timepoint (hr) Value: 2
  misc_feature: MA Experiment 20001755 PARAMETER Experiment Name: At_50mM_NH4NO3_L-to-H_P Parameter: Tissue Value: Leaf
  misc_feature: MA Experiment 20001755 PARAMETER Experiment Name: At_50mM_NH4NO3_L-to-H_P Parameter: Treatment Value: 50mM NH4NO3 vs 100mM Mannitol
  misc_feature: MA Experiment ID: 20001757 Result: Up-regulated in Transcription
  misc_feature: MA Experiment 20001757 PARAMETER Experiment Name: At_50mM_NH4NO3_L-to-H_P Parameter: Timepoint (hr) Value: 6
  misc_feature: MA Experiment 20001757 PARAMETER Experiment Name: At_50mM_NH4NO3_L-to-H_P Parameter: Tissue Value: Leaf
  misc_feature: MA Experiment 20001757 PARAMETER Experiment Name: At_50mM_NH4NO3_L-to-H_P Parameter: Treatment Value: 50mM NH4NO3 vs 100mM Mannitol
  misc_feature: MA Experiment ID: 20001768 Result: Up-regulated in Transcription
  misc_feature: MA Experiment 20001768 PARAMETER Experiment Name: At_Far-red-enriched-adult_P Parameter: Age (day) Value: 28
  misc_feature: MA Experiment 20001768 PARAMETER Experiment Name: At_Far-red-enriched-adult_P Parameter: Light Value: Far-red enriched vs. White
  misc_feature: MA Experiment 20001768 PARAMETER Experiment Name: At_Far-red-enriched-adult_P Parameter: Organism Value: A. thaliana
  misc_feature: MA Experiment 20001768 PARAMETER Experiment Name: At_Far-red-enriched-adult_P Parameter: Plant Line Value: Columbia
  misc_feature: MA Experiment 20001768 PARAMETER Experiment Name: At_Far-red-enriched-adult_P Parameter: Timepoint (hr) Value: 1
  misc_feature: MA Experiment 20001768 PARAMETER Experiment Name: At_Far-red-enriched-adult_P Parameter: Tissue Value: Aerial
  misc_feature: MA Experiment ID: 20001904 Result: Down-regulated in Transcription
  misc_feature: MA Experiment 20001904 PARAMETER Experiment Name: At_Drought_Reproduction_P Parameter: Age (day) Value: 37
  misc_feature: MA Experiment 20001904 PARAMETER Experiment Name: At_Drought_Reproduction_P Parameter: Organism Value: A. thaliana
  misc_feature: MA Experiment 20001904 PARAMETER Experiment Name: At_Drought_Reproduction_P Parameter: Plant Line Value: WS
  misc_feature: MA Experiment 20001904 PARAMETER Experiment Name: At_Drought_Reproduction_P Parameter: Timepoint (day) Value: 7
  misc_feature: MA Experiment 20001904 PARAMETER Experiment Name: At_Drought_Reproduction_P Parameter: Tissue Value: Rosettes
  misc_feature: MA Experiment 20001904 PARAMETER Experiment Name: At_Drought_Reproduction_P Parameter: Treatment Value: Drought vs. No Drought
caaatcacagatcacacttaccagatcacaagacaaacacaaactaatagtttcgtgtgacacaagtaaagagtttcgtgagatagaagcaacaccaaaagatgcttgaaactggagccatatggggaataaccggcacgacggtgacgagctttatgttcttctgggcgatttacaaacaatacgtccctgcccatttccgagcctatgtggagagatacttccacaagatgattggatggatctcttactacgttgacatcaaattcaccgagtacacagatgaaggtctgaagagaagccaagcctacgactccatacgcaactacttagcgtcgaaatcaacggctcttgctaaaagactaaaggccaacgaaacgaaaaacagcaaatctttggtgtttagtatggatgatcatgaggaaattgaagatgagttcgaaggtgtgaaggtgaagtggtattcgaatgtgaaagtgattcagcctcagtctaattatggtcaacgcagctcagaggagagaaggcactttactcttagtttccataggcgacaccgaggtatgatcattgagacttatcttgatcatgttttgagagaagggaaagctattggattgatgaacagagagaggaagctttacactaataactcaagtcaagaatggtatccttggaggtcaggaaagtggagcaacgttccttttcaccatccggcgacgtttgagactttggctatggatccagagaagaaagaagggattaagaaggatttgataaagtttagcaaagggaaagattattacaagaaggttgggaagccatggaagcgcggttatctcttgtttggcccgcccgggacagggaaatcgacgatgatagctgcaatagcgaatttcttggactatgatgtgtatgatcttgagctaacgacggtgaaggataactcagagctgaagaagttgttgttggatacaactagtaagtctatcattgtgattgaagatattgattgctcgcttgatcttacggggcagcgaaagaagaaaaaagaggaagatgaagaggaggatggagaggagaagaaggaaggtgagaagaagcccaaggtagatgataagcagagcaaggttactttgtcaggtttattaaactccattgatgggttatggtcagcttgtagtggtgagaagatcatagtgttcacaactaattttgtggataagcttgatccagcattgatacgtagaggaagaatggacaaccacattgagatgtcttattgcaagtttgaagcattcaaggttttggctaagaactacttggagattgaaacacacgacttgtatggagaaatcgaaagaaagctcgaagaaaccgatatgtcccccgcggatgttgcggagactttgatgccgaaatctgacgaagaagatgcagatatttgcatcaagcgtttggtcaagactttggaggaagagaaggagaaagcaaggaagttggctgaggaagaagagaagaagaaagcagagaaggaagcaaagaagatgaagaaagcagaggaagcagaggagaagaagaagaagacagaggaagatgagaagaaggagaaagtgaaggccaaggaggaaaacggcaacgtttctcaacaaaatggcaactcaattgatttgaacaagaaaagtgactcatgatgaattttagtttattgtataaggatgtaatttggcaattattcttctctcctcttatcatatgcttttaaagaatttgtatttactatctatagatttcatcattgtgttccat

SEQ ID NO: 97245 - protein, 530 aa, Arabidopsis thaliana
  peptide (1)..(530): Ceres Seq. ID no. 12736692
  misc_feature (245)..(447): Pfam Name: ATPase family associated with various cellular Pfam Description: ATPase family associated with various cellular
  misc_feature (1)..(530): Homolog of NCBI NO: 15233010 NR Description: hypothetical protein; protein id: At3g28510.1, by cDNA: gi_20466451 [Arabidopsis thaliana]
  misc_feature (1)..(522): Homolog of NCBI NO: 15233016 NR Description: hypothetical protein; protein id: At3g28540.1
  misc_feature (1)..(485): Homolog of NCBI NO: 9294102 NR Description: contains similarity to AAA-type
  misc_feature (15)..(485): Homolog of NCBI NO: 15233012 NR Description: hypothetical protein; protein id: At3g28520.1
  misc_feature (1)..(499): Homolog of NCBI NO: 15233037 NR Description: hypothetical protein; protein id: At3g28580.1, by cDNA: gi_18175626 [Arabidopsis thaliana]
  misc_feature (1)..(503): Homolog of NCBI NO: 15242536 NR Description: putative protein; protein id: At5g40010.1
  misc_feature (36)..(479): Homolog of NCBI NO: 29150372 NR Description: putative AAA-type ATPase [Oryza sativa (japonica
  misc_feature (12)..(485): Homolog of NCBI NO: 9294274 NR Description: mitochondrial protein-like [Arabidopsis thaliana]
  misc_feature (12)..(485): Homolog of NCBI NO: 15233040 NR Description: unknown protein; protein id: At3g28610.1
  misc_feature (12)..(486): Homolog of NCBI NO: 15233039 NR Description: unknown protein; protein id: At3g28600.1
MLETGAIWGITGTTVTSFMFFWAIYKQYVPAHFRAYVERYFHKMIGWISYYVDIKFTEYTDEGLKRSQAYDSIRNYLASKSTALAKRLKANETKNSKSLVFSMDDHEEIEDEFEGVKVKWYSNVKVIQPQSNYGQRSSEERRHFTLSFHRRHRGMIIETYLDHVLREGKAIGLMNRERKLYTNNSSQEWYPWRSGKWSNVPFHHPATFETLAMDPEKKEGIKKDLIKFSKGKDYYKKVGKPWKRGYLLFGPPGTGKSTMIAAIANFLDYDVYDLELTTVKDNSELKKLLLDTTSKSIIVIEDIDCSLDLTGQRKKKKEEDEEEDGEEKKEGEKKPKVDDKQSKVTLSGLLNSIDGLWSACSGEKIIVFTTNFVDKLDPALIRRGRMDNHIEMSYCKFEAFKVLAKNYLEIETHDLYGEIERKLEETDMSPADVAETLMPKSDEEDADICIKRLVKTLEEEKEKARKLAEEEEKKKAEKEAKKMKKAEEAEEKKKKTEEDEKKEKVKAKEENGNVSQQNGNSIDLNKKSDS

SEQ ID NO: 97246 - protein, 512 aa, Arabidopsis thaliana
  peptide (1)..(512): Ceres Seq. ID no. 12736693
  misc_feature (227)..(429): Pfam Name: ATPase family associated with various cellular Pfam Description: ATPase family associated with various cellular
  misc_feature (1)..(512): Homolog of NCBI NO: 15233010 NR Description: hypothetical protein; protein id: At3g28510.1, by cDNA: gi_20466451 [Arabidopsis thaliana]
  misc_feature (1)..(504): Homolog of NCBI NO: 15233016 NR Description: hypothetical protein; protein id: At3g28540.1
  misc_feature (1)..(467): Homolog of NCBI NO: 9294102 NR Description: contains similarity to AAA-type
  misc_feature (1)..(467): Homolog of NCBI NO: 15233012 NR Description: hypothetical protein; protein id: At3g28520.1
  misc_feature (1)..(481): Homolog of NCBI NO: 15233037 NR Description: hypothetical protein; protein id: At3g28580.1, by cDNA: gi_18175626 [Arabidopsis thaliana]
  misc_feature (1)..(485): Homolog of NCBI NO: 15242536 NR Description: putative protein; protein id: At5g40010.1
  misc_feature (18)..(461): Homolog of NCBI NO: 29150372 NR Description: putative AAA-type ATPase [Oryza sativa (japonica
  misc_feature (1)..(467): Homolog of NCBI NO: 9294274 NR Description: mitochondrial protein-like [Arabidopsis thaliana]
  misc_feature (1)..(467): Homolog of NCBI NO: 15233040 NR Description: unknown protein; protein id: At3g28610.1
  misc_feature (1)..(468): Homolog of NCBI NO: 15233039 NR Description: unknown protein; protein id: At3g28600.1
MFFWAIYKQYVPAHFRAYVERYFHKMIGWISYYVDIKFTEYTDEGLKRSQAYDSIRNYLASKSTALAKRLKANETKNSKSLVFSMDDHEEIEDEFEGVKVKWYSNVKVIQPQSNYGQRSSEERRHFTLSFHRRHRGMIIETYLDHVLREGKAIGLMNRERKLYTNNSSQEWYPWRSGKWSNVPFHHPATFETLAMDPEKKEGIKKDLIKFSKGKDYYKKVGKPWKRGYLLFGPPGTGKSTMIAAIANFLDYDVYDLELTTVKDNSELKKLLLDTTSKSIIVIEDIDCSLDLTGQRKKKKEEDEEEDGEEKKEGEKKPKVDDKQSKVTLSGLLNSIDGLWSACSGEKIIVFTTNFVDKLDPALIRRGRMDNHIEMSYCKFEAFKVLAKNYLEIETHDLYGEIERKLEETDMSPADVAETLMPKSDEEDADICIKRLVKTLEEEKEKARKLAEEEEKKKAEKEAKKMKKAEEAEEKKKKTEEDEKKEKVKAKEENGNVSQQNGNSIDLNKKSDS

SEQ ID NO: 97247 - protein, 487 aa, Arabidopsis thaliana
  peptide (1)..(487): Ceres Seq. ID no. 12736694
  misc_feature (202)..(404): Pfam Name: ATPase family associated with various cellular Pfam Description: ATPase family associated with various cellular
  misc_feature (1)..(487): Homolog of NCBI NO: 15233010 NR Description: hypothetical protein; protein id: At3g28510.1, by cDNA: gi_20466451 [Arabidopsis thaliana]
  misc_feature (1)..(479): Homolog of NCBI NO: 15233016 NR Description: hypothetical protein; protein id: At3g28540.1
  misc_feature (1)..(442): Homolog of NCBI NO: 9294102 NR Description: contains similarity to AAA-type
  misc_feature (1)..(442): Homolog of NCBI NO: 15233012 NR Description: hypothetical protein; protein id: At3g28520.1
  misc_feature (1)..(456): Homolog of NCBI NO: 15233037 NR Description: hypothetical protein; protein id: At3g28580.1, by cDNA: gi_18175626 [Arabidopsis thaliana]
  misc_feature (1)..(460): Homolog of NCBI NO: 15242536 NR Description: putative protein; protein id: At5g40010.1
  misc_feature (1)..(436): Homolog of NCBI NO: 29150372 NR Description: putative AAA-type ATPase [Oryza sativa (japonica
  misc_feature (1)..(442): Homolog of NCBI NO: 9294274 NR Description: mitochondrial protein-like [Arabidopsis thaliana]
  misc_feature (1)..(442): Homolog of NCBI NO: 15233040 NR Description: unknown protein; protein id: At3g28610.1
  misc_feature (1)..(443): Homolog of NCBI NO: 15233039 NR Description: unknown protein; protein id: At3g28600.1
MIGWISYYVDIKFTEYTDEGLKRSQAYDSIRNYLASKSTALAKRLKANETKNSKSLVFSMDDHEEIEDEFEGVKVKWYSNVKVIQPQSNYGQRSSEERRHFTLSFHRRHRGMIIETYLDHVLREGKAIGLMNRERKLYTNNSSQEWYPWRSGKWSNVPFHHPATFETLAMDPEKKEGIKKDLIKFSKGKDYYKKVGKPWKRGYLLFGPPGTGKSTMIAAIANFLDYDVYDLELTTVKDNSELKKLLLDTTSKSIIVIEDIDCSLDLTGQRKKKKEEDEEEDGEEKKEGEKKPKVDDKQSKVTLSGLLNSIDGLWSACSGEKIIVFTTNFVDKLDPALIRRGRMDNHIEMSYCKFEAFKVLAKNYLEIETHDLYGEIERKLEETDMSPADVAETLMPKSDEEDADICIKRLVKTLEEEKEKARKLAEEEEKKKAEKEAKKMKKAEEAEEKKKKTEEDEKKEKVKAKEENGNVSQQNGNSIDLNKKSDS

SEQ ID NO: 97248 - DNA, 1533 bp, Arabidopsis thaliana
  misc_feature (1)..(1533): Ceres Seq. ID no. 12736699
  misc_feature: MA Experiment ID: 20000314 Result: Down-regulated in Transcription
  misc_feature: MA Experiment 20000314 PARAMETER Experiment Name: At_14day_Shoots-Roots_Sub_P Parameter: Age (day) Value: 14
  misc_feature: MA Experiment 20000314 PARAMETER Experiment Name: At_14day_Shoots-Roots_Sub_P Parameter: Organism Value: A. thaliana
  misc_feature: MA Experiment 20000314 PARAMETER Experiment Name: At_14day_Shoots-Roots_Sub_P Parameter: Plant Line Value: WS
  misc_feature: MA Experiment 20000314 PARAMETER Experiment Name: At_14day_Shoots-Roots_Sub_P Parameter: Tissue Value: Roots vs. Whole Plant
  misc_feature: MA Experiment ID: 20000315 Result: Down-regulated in Transcription
  misc_feature: MA Experiment 20000315 PARAMETER Experiment Name: At_14day_Shoots-Roots_Sub_P Parameter: Age (day) Value: 14
  misc_feature: MA Experiment 20000315 PARAMETER Experiment Name: At_14day_Shoots-Roots_Sub_P Parameter: Organism Value: A. thaliana
  misc_feature: MA Experiment 20000315 PARAMETER Experiment Name: At_14day_Shoots-Roots_Sub_P Parameter: Plant Line Value: WS
  misc_feature: MA Experiment 20000315 PARAMETER Experiment Name: At_14day_Shoots-Roots_Sub_P Parameter: Tissue Value: Shoots vs. Whole Plant
  misc_feature: MA Experiment ID: 20000327 Result: Down-regulated in Transcription
  misc_feature: MA Experiment 20000327 PARAMETER Experiment Name: At_42deg_Heat_Sub_P Parameter: Age (day) Value: 14
  misc_feature: MA Experiment 20000327 PARAMETER Experiment Name: At_42deg_Heat_Sub_P Parameter: Organism Value: A. thaliana
  misc_feature: MA Experiment 20000327 PARAMETER Experiment Name: At_42deg_Heat_Sub_P Parameter: Plant Line Value: WS
  misc_feature: MA Experiment 20000327 PARAMETER Experiment Name: At_42deg_Heat_Sub_P Parameter: Temperature (deg C) Value: 42 vs. 22
  misc_feature: MA Experiment 20000327 PARAMETER Experiment Name: At_42deg_Heat_Sub_P Parameter: Timepoint (hr) Value: 1
  misc_feature: MA Experiment 20000327 PARAMETER Experiment Name: At_42deg_Heat_Sub_P Parameter: Tissue Value: Aerial
  misc_feature: MA Experiment ID: 20000328 Result: Down-regulated in Transcription
  misc_feature: MA Experiment 20000328 PARAMETER Experiment Name: At_42deg_Heat_Sub_P Parameter: Age (day) Value: 14
  misc_feature: MA Experiment 20000328 PARAMETER Experiment Name: At_42deg_Heat_Sub_P Parameter: Organism Value: A. thaliana
  misc_feature: MA Experiment 20000328 PARAMETER Experiment Name: At_42deg_Heat_Sub_P Parameter: Plant Line Value: WS
  misc_feature: MA Experiment 20000328 PARAMETER Experiment Name: At_42deg_Heat_Sub_P Parameter: Temperature (deg C) Value: 42 vs. 22
  misc_feature: MA Experiment 20000328 PARAMETER Experiment Name: At_42deg_Heat_Sub_P Parameter: Timepoint (hr) Value: 6
  misc_feature: MA Experiment 20000328 PARAMETER Experiment Name: At_42deg_Heat_Sub_P Parameter: Tissue Value: Aerial
  misc_feature: MA Experiment ID: 20000347 Result: Up-regulated in Transcription
  misc_feature: MA Experiment 20000347 PARAMETER Experiment Name: At_2mM_SA_Sub_P Parameter: Age (day) Value: 14
  misc_feature: MA Experiment 20000347 PARAMETER Experiment Name: At_2mM_SA_Sub_P Parameter: Organism Value: A. thaliana
  misc_feature: MA Experiment 20000347 PARAMETER Experiment Name: At_2mM_SA_Sub_P Parameter: Plant Line Value: WS
  misc_feature: MA Experiment 20000347 PARAMETER Experiment Name: At_2mM_SA_Sub_P Parameter: Timepoint (hr) Value: 6
  misc_feature: MA Experiment 20000347 PARAMETER Experiment Name: At_2mM_SA_Sub_P Parameter: Tissue Value: Aerial
  misc_feature: MA Experiment 20000347 PARAMETER Experiment Name: At_2mM_SA_Sub_P Parameter: Treatment Value: 2mM SA vs. No Treatment
  misc_feature: MA Experiment ID: 20000355 Result: Down-regulated in Transcription
  misc_feature: MA Experiment 20000355 PARAMETER Experiment Name: At_Siliques_Sub_P Parameter: Age (day) Value: 21
  misc_feature: MA Experiment 20000355 PARAMETER Experiment Name: At_Siliques_Sub_P Parameter: Organism Value: A. thaliana
  misc_feature: MA Experiment 20000355 PARAMETER Experiment Name: At_Siliques_Sub_P Parameter: Plant Line Value: WS
  misc_feature: MA Experiment 20000355 PARAMETER Experiment Name: At_Siliques_Sub_P Parameter: Tissue Value: Less Than 5mm Siliques vs. Whole Plant
  misc_feature: MA Experiment ID: 20000440 Result: Down-regulated in Transcription
  misc_feature: MA Experiment 20000440 PARAMETER Experiment Name: At_Closed-Flower__Sub_P Parameter: Tissue Value: Closed Flower vs. Whole Plant
  misc_feature: MA Experiment ID: 20000634 Result: Down-regulated in Transcription
  misc_feature: MA Experiment 20000634 PARAMETER Experiment Name: At_10percent_PEG_Sub_P Parameter: Age (day) Value: 12
  misc_feature: MA Experiment 20000634 PARAMETER Experiment Name: At_10percent_PEG_Sub_P Parameter: Organism Value: A. thaliana
  misc_feature: MA Experiment 20000634 PARAMETER Experiment Name: At_10percent_PEG_Sub_P Parameter: Plant Line Value: WS
  misc_feature: MA Experiment 20000634 PARAMETER Experiment Name: At_10percent_PEG_Sub_P Parameter: Timepoint (day) Value: 12
  misc_feature: MA Experiment 20000634 PARAMETER Experiment Name: At_10percent_PEG_Sub_P Parameter: Tissue Value: Whole Plant
  misc_feature: MA Experiment 20000634 PARAMETER Experiment Name: At_10percent_PEG_Sub_P Parameter: Treatment Value: 10% PEG vs. No Treatment
atgtttgaagccggaggattatttggtttcaccggcacgaccatggcaagtcttatgttcttctggtcagtgtacagacagtttgtgccataccaaatcagagactacttggagaagtgtttttacaagatgttcggtttggtctcaaattctgttcacatcaaattcactgaatacacagaagataaaggtctcaagaaaagccaagcctatgatttgatacgcaactacttatcctcgaaatcaacggctcgtgctcagaggttaaaggccaacgaatcaaaaaacagcaaatcgttggtgcttagtttggacaatcacgaagcagttgaagatgtgttccaaggtgtgaaggtggtgtggtctttgagcgtgtggaagagtaatgatcaggctgattctagcgagaaaaggtacttgactttgagtttccataatcggtatagggagatgatcacaacgacttatcttgatcatgttttgagagaagggaaagagattggtttgaagaacagagagaggaagctttacactaataactcgagtcaagattattcggcttggagagaaggaaggtggagcaacgttccttttgatcatcccgcaacgtttgagactttggctatggatcttgagaagaaagaagggatgaaaaaggatttgattaagtttactaaagggaaagattattataggaaggttgggaagccgtggaagagaggttatctgttgtttggaccgccggggacagggaaatcgacgatgatatcggctatggcgaacttcttggagtatgatgtgtatgatcttgagttgactactgtgaaggataactcggagttgaagaagctaatgttggatacaaaagggaagtctattgttgtgattgaagatatcgattgttcgcttgatcttacgggacagagaaagaagaagaaggaggaagatgaggatgaagaggaagaagaaaagaagaaagaagctgagaagttgttgaagagagaaagaggtgaaagagagagtaaggttactttgtcggggctattaaacgccattgatgggttgtggtcagcttgtagtggagagaagattattgtgtttactacgaattatttggataagcttgatccagctttgatacgtagaggaagaatggacaaccatattgagatgtcttattgtaggtttgaagcgtttaaggttttggctaagaactacttggagattgagtcacatgacttgtttggagaaatcaagcgattggtggaggaaactgacatgtctccagctgatgttgctgagaacttgatgccgaaatctgatgaagacgatgccgatatttgccttacgcggttggttaagtctttggaggaagagaaggagaaagcaaagaagttggctgaggaagaaaagatgaagaaagcagcgagggatgcaaggaggatcaagaagaaagcagaggaagaacacaaaaagaagaataaagtagaggaaaacggcgacgtatctcacgataatggtaaccatatttga

SEQ ID NO: 97249 - protein, 510 aa, Arabidopsis thaliana
  peptide (1)..(510): Ceres Seq. ID no. 12736700
  misc_feature (241)..(446): Pfam Name: ATPase family associated with various cellular Pfam Description: ATPase family associated with various cellular
  misc_feature (1)..(510): Homolog of NCBI NO: 15233016 NR Description: hypothetical protein; protein id: At3g28540.1
  misc_feature (1)..(510): Homolog of NCBI NO: 15233010 NR Description: hypothetical protein; protein id: At3g28510.1, by cDNA: gi_20466451 [Arabidopsis thaliana]
  misc_feature (1)..(497): Homolog of NCBI NO: 9294102 NR Description: contains similarity to AAA-type
  misc_feature (15)..(497): Homolog of NCBI NO: 15233012 NR Description: hypothetical protein; protein id: At3g28520.1
  misc_feature (1)..(498): Homolog of NCBI NO: 15242536 NR Description: putative protein; protein id: At5g40010.1
  misc_feature (5)..(498): Homolog of NCBI NO: 15233037 NR Description: hypothetical protein; protein id: At3g28580.1, by cDNA: gi_18175626 [Arabidopsis thaliana]
  misc_feature (5)..(471): Homolog of NCBI NO: 9294274 NR Description: mitochondrial protein-like [Arabidopsis thaliana]
  misc_feature (5)..(471): Homolog of NCBI NO: 15233040 NR Description: unknown protein; protein id: At3g28610.1
  misc_feature (1)..(473): Homolog of NCBI NO: 15242534 NR Description: putative protein; protein id: At5g40000.1
  misc_feature (5)..(473): Homolog of NCBI NO: 10176992 NR Description: contains similarity to AAA-type
MFEAGGLFGFTGTTMASLMFFWSVYRQFVPYQIRDYLEKCFYKMFGLVSNSVHIKFTEYTEDKGLKKSQAYDLIRNYLSSKSTARAQRLKANESKNSKSLVLSLDNHEAVEDVFQGVKVVWSLSVWKSNDQADSSEKRYLTLSFHNRYREMITTTYLDHVLREGKEIGLKNRERKLYTNNSSQDYSAWREGRWSNVPFDHPATFETLAMDLEKKEGMKKDLIKFTKGKDYYRKVGKPWKRGYLLFGPPGTGKSTMISAMANFLEYDVYDLELTTVKDNSELKKLMLDTKGKSIVVIEDIDCSLDLTGQRKKKKEEDEDEEEEEKKKEAEKLLKRERGERESKVTLSGLLNAIDGLWSACSGEKIIVFTTNYLDKLDPALIRRGRMDNHIEMSYCRFEAFKVLAKNYLEIESHDLFGEIKRLVEETDMSPADVAENLMPKSDEDDADICLTRLVKSLEEEKEKAKKLAEEEKMKKAARDARRIKKKAEEEHKKKNKVEENGDVSHDNGNHI

SEQ ID NO: 97250 - protein, 496 aa, Arabidopsis thaliana
  peptide (1)..(496): Ceres Seq. ID no. 12736701
  misc_feature (227)..(432): Pfam Name: ATPase family associated with various cellular Pfam Description: ATPase family associated with various cellular
  misc_feature (1)..(496): Homolog of NCBI NO: 15233016 NR Description: hypothetical protein; protein id: At3g28540.1
  misc_feature (1)..(496): Homolog of NCBI NO: 15233010 NR Description: hypothetical protein; protein id: At3g28510.1, by cDNA: gi_20466451 [Arabidopsis thaliana]
  misc_feature (1)..(483): Homolog of NCBI NO: 9294102 NR Description: contains similarity to AAA-type
  misc_feature (1)..(483): Homolog of NCBI NO: 15233012 NR Description: hypothetical protein; protein id: At3g28520.1
  misc_feature (1)..(484): Homolog of NCBI NO: 15242536 NR Description: putative protein; protein id: At5g40010.1
  misc_feature (1)..(484): Homolog of NCBI NO: 15233037 NR Description: hypothetical protein; protein id: At3g28580.1, by cDNA: gi_18175626 [Arabidopsis thaliana]
  misc_feature (1)..(457): Homolog of NCBI NO: 9294274 NR Description: mitochondrial protein-like [Arabidopsis thaliana]
  misc_feature (1)..(457): Homolog of NCBI NO: 15233040 NR Description: unknown protein; protein id: At3g28610.1
  misc_feature (1)..(459): Homolog of NCBI NO: 15242534 NR Description: putative protein; protein id: At5g40000.1
  misc_feature (1)..(459): Homolog of NCBI NO: 10176992 NR Description: contains similarity to AAA-type
MASLMFFWSVYRQFVPYQIRDYLEKCFYKMFGLVSNSVHIKFTEYTEDKGLKKSQAYDLIRNYLSSKSTARAQRLKANESKNSKSLVLSLDNHEAVEDVFQGVKVVWSLSVWKSNDQADSSEKRYLTLSFHNRYREMITTTYLDHVLREGKEIGLKNRERKLYTNNSSQDYSAWREGRWSNVPFDHPATFETLAMDLEKKEGMKKDLIKFTKGKDYYRKVGKPWKRGYLLFGPPGTGKSTMISAMANFLEYDVYDLELTTVKDNSELKKLMLDTKGKSIVVIEDIDCSLDLTGQRKKKKEEDEDEEEEEKKKEAEKLLKRERGERESKVTLSGLLNAIDGLWSACSGEKIIVFTTNYLDKLDPALIRRGRMDNHIEMSYCRFEAFKVLAKNYLEIESHDLFGEIKRLVEETDMSPADVAENLMPKSDEDDADICLTRLVKSLEEEKEKAKKLAEEEKMKKAARDARRIKKKAEEEHKKKNKVEENGDVSHDNGNHI

SEQ ID NO: 97251 - protein, 492 aa, Arabidopsis thaliana
  peptide (1)..(492): Ceres Seq. ID no. 12736702
  misc_feature (223)..(428): Pfam Name: ATPase family associated with various cellular Pfam Description: ATPase family associated with various cellular
  misc_feature (1)..(492): Homolog of NCBI NO: 15233016 NR Description: hypothetical protein; protein id: At3g28540.1
  misc_feature (1)..(492): Homolog of NCBI NO: 15233010 NR Description: hypothetical protein; protein id: At3g28510.1, by cDNA: gi_20466451 [Arabidopsis thaliana]
  misc_feature (1)..(479): Homolog of NCBI NO: 9294102 NR Description: contains similarity to AAA-type
  misc_feature (1)..(479): Homolog of NCBI NO: 15233012 NR Description: hypothetical protein; protein id: At3g28520.1
  misc_feature (1)..(480): Homolog of NCBI NO: 15242536 NR Description: putative protein; protein id: At5g40010.1
  misc_feature (1)..(480): Homolog of NCBI NO: 15233037 NR Description: hypothetical protein; protein id: At3g28580.1, by cDNA: gi_18175626 [Arabidopsis thaliana]
  misc_feature (1)..(453): Homolog of NCBI NO: 9294274 NR Description: mitochondrial protein-like [Arabidopsis thaliana]
  misc_feature (1)..(453): Homolog of NCBI NO: 15233040 NR Description: unknown protein; protein id: At3g28610.1
  misc_feature (1)..(455): Homolog of NCBI NO: 15242534 NR Description: putative protein; protein id: At5g40000.1
  misc_feature (1)..(455): Homolog of NCBI NO: 10176992 NR Description: contains similarity to AAA-type
MFFWSVYRQFVPYQIRDYLEKCFYKMFGLVSNSVHIKFTEYTEDKGLKKSQAYDLIRNYLSSKSTARAQRLKANESKNSKSLVLSLDNHEAVEDVFQGVKVVWSLSVWKSNDQADSSEKRYLTLSFHNRYREMITTTYLDHVLREGKEIGLKNRERKLYTNNSSQDYSAWREGRWSNVPFDHPATFETLAMDLEKKEGMKKDLIKFTKGKDYYRKVGKPWKRGYLLFGPPGTGKSTMISAMANFLEYDVYDLELTTVKDNSELKKLMLDTKGKSIVVIEDIDCSLDLTGQRKKKKEEDEDEEEEEKKKEAEKLLKRERGERESKVTLSGLLNAIDGLWSACSGEKIIVFTTNYLDKLDPALIRRGRMDNHIEMSYCRFEAFKVLAKNYLEIESHDLFGEIKRLVEETDMSPADVAENLMPKSDEDDADICLTRLVKSLEEEKEKAKKLAEEEKMKKAARDARRIKKKAEEEHKKKNKVEENGDVSHDNGNHI

SEQ ID NO: 97252 - DNA, 1356 bp, Arabidopsis thaliana
  misc_feature (1)..(1356): Ceres Seq. ID no. 12736707
  misc_feature: MA Experiment ID: 20001451 Result: Up-regulated in Transcription
  misc_feature: MA Experiment 20001451 PARAMETER Experiment Name: At_Far-red-induction_P Parameter: Age (day) Value: 7
  misc_feature: MA Experiment 20001451 PARAMETER Experiment Name: At_Far-red-induction_P Parameter: Light Value: Far-red vs. White
  misc_feature: MA Experiment 20001451 PARAMETER Experiment Name: At_Far-red-induction_P Parameter: Organism Value: A. thaliana
  misc_feature: MA Experiment 20001451 PARAMETER Experiment Name: At_Far-red-induction_P Parameter: Plant Line Value: Columbia
  misc_feature: MA Experiment 20001451 PARAMETER Experiment Name: At_Far-red-induction_P Parameter: Timepoint (hr) Value: 24
  misc_feature: MA Experiment 20001451 PARAMETER Experiment Name: At_Far-red-induction_P Parameter: Tissue Value: Whole Plant
atgtttgcagaaaacctaacgaggattggatcaaacgtggcgggtctgttcttcgtctggtcaactctcaagagatacttccctcgacagattcagcaacttctcttcaatgcaatccaacgaataccaattttcaagaggctctcagacaagatcctcgaattcttctcaccttacgcttacatcagattccgtgaaatcgaagggtatagatacaactacgcttttgcagctgtgaagacctaccttggtgcaaaagttaactctgaagtgaagaatctcaaagggaatcaggttaaagagaacatgtctttggatttgaaacgagacgatgttaagatagaagaggagtatgaaggtgtgaagatgtggtgggagatctttagatgtgttaaagggaagaaaatctgtaggcttacttttcatagaagtaattgggatgttgtgactggttcttacttacgctacgttgttgaagaagggaaatcgattaaggcgaggaagaagaaagtgatggtgttgatgaataatccgagtttgaattggaaaacaagtatgaaaggtctttggacttgcactgagttcgagcatcccgcaacgtttgatacattggctatggatattgacaagaaagatgagattttcagagatcttgtggcgtttagagatggtaaagagtattacgataggattgggaaagcttggaagaggggttacttgttgtatggacctccagggacgggtaagtctacgatgatcgcggctatggcgaatcttatgaagtataatatctatgatcttgagttaacttcgatagggaacaactgggagttgaagaagctgttgatagctacgactaataagtctatcattgtgattgaggatattgattgttccttggatctcacgggagagagggaggttaaagacctaaaaggcgataaagaagggaagaagagtaatgcagttacactctcagggttattgaactttatagatgggatatggtcagcttgtggacaagagaggattcttgtgtttacaacgaatcatgtagggaaacttgaccaagctttgattagaagaggtcgtatggatatgcatattgagctatcttattgtacgtttggtgcgttcaagattcttgctaagaactatctgaatattgattcgcatcacttgtttggagagattgagtctttgcttaaagaaacgaagattacaccggctgatgttgcggagcatatgatggcgaaagaagttgatggttcacttaagggtttgattcgagctttggagaggattaagtggagtcaaaacgttaaagtcgaagaacaattacaacaaggagattaa

SEQ ID NO: 97253 - protein, 451 aa, Arabidopsis thaliana
  peptide (1)..(451): Ceres Seq. ID no. 12736708
  misc_feature (238)..(425): Pfam Name: ATPase family associated with various cellular Pfam Description: ATPase family associated with various cellular
  misc_feature (1)..(451): Homolog of NCBI NO: 9294271 NR Description: mitochondrial protein-like [Arabidopsis thaliana]
  misc_feature (1)..(451): Homolog of NCBI NO: 15233036 NR Description: unknown protein; protein id: At3g28570.1
  misc_feature (10)..(445): Homolog of NCBI NO: 9294274 NR Description: mitochondrial protein-like [Arabidopsis thaliana]
  misc_feature (10)..(445): Homolog of NCBI NO: 15233040 NR Description: unknown protein; protein id: At3g28610.1
  misc_feature (10)..(445): Homolog of NCBI NO: 15233039 NR Description: unknown protein; protein id: At3g28600.1
  misc_feature (1)..(446): Homolog of NCBI NO: 10176992 NR Description: contains similarity to AAA-type
  misc_feature (1)..(446): Homolog of NCBI NO: 15242534 NR Description: putative protein; protein id: At5g40000.1
  misc_feature (10)..(325): Homolog of NCBI NO: 15233016 NR Description: hypothetical protein; protein id: At3g28540.1
  misc_feature (305)..(446): Homolog of NCBI NO: 15233016 NR Description: hypothetical protein; protein id: At3g28540.1
  misc_feature (10)..(419): Homolog of NCBI NO: 15233010 NR Description: hypothetical protein; protein id: At3g28510.1, by cDNA: gi_20466451 [Arabidopsis thaliana]
MFAENLTRIGSNVAGLFFVWSTLKRYFPRQIQQLLFNAIQRIPIFKRLSDKILEFFSPYAYIRFREIEGYRYNYAFAAVKTYLGAKVNSEVKNLKGNQVKENMSLDLKRDDVKIEEEYEGVKMWWEIFRCVKGKKICRLTFHRSNWDVVTGSYLRYVVEEGKSIKARKKKVMVLMNNPSLNWKTSMKGLWTCTEFEHPATFDTLAMDIDKKDEIFRDLVAFRDGKEYYDRIGKAWKRGYLLYGPPGTGKSTMIAAMANLMKYNIYDLELTSIGNNWELKKLLIATTNKSIIVIEDIDCSLDLTGEREVKDLKGDKEGKKSNAVTLSGLLNFIDGIWSACGQERILVFTTNHVGKLDQALIRRGRMDMHIELSYCTFGAFKILAKNYLNIDSHHLFGEIESLLKETKITPADVAEHMMAKEVDGSLKGLIRALERIKWSQNVKVEEQLQQGD

SEQ ID NO: 97254 - protein, 349 aa, Arabidopsis thaliana
  peptide (1)..(349): Ceres Seq. ID no. 12736709
  misc_feature (136)..(323): Pfam Name: ATPase family associated with various cellular Pfam Description: ATPase family associated with various cellular
  misc_feature (1)..(349): Homolog of NCBI NO: 9294271 NR Description: mitochondrial protein-like [Arabidopsis thaliana]
  misc_feature (1)..(349): Homolog of NCBI NO: 15233036 NR Description: unknown protein; protein id: At3g28570.1
  misc_feature (1)..(343): Homolog of NCBI NO: 9294274 NR Description: mitochondrial protein-like [Arabidopsis thaliana]
  misc_feature (1)..(343): Homolog of NCBI NO: 15233040 NR Description: unknown protein; protein id: At3g28610.1
  misc_feature (1)..(343): Homolog of NCBI NO: 15233039 NR Description: unknown protein; protein id: At3g28600.1
  misc_feature (1)..(344): Homolog of NCBI NO: 10176992 NR Description: contains similarity to AAA-type
  misc_feature (1)..(344): Homolog of NCBI NO: 15242534 NR Description: putative protein; protein id: At5g40000.1
  misc_feature (1)..(223): Homolog of NCBI NO: 15233016 NR Description: hypothetical protein; protein id: At3g28540.1
  misc_feature (203)..(344): Homolog of NCBI NO: 15233016 NR Description: hypothetical protein; protein id: At3g28540.1
  misc_feature (1)..(317): Homolog of NCBI NO: 15233010 NR Description: hypothetical protein; protein id: At3g28510.1, by cDNA: gi_20466451 [Arabidopsis thaliana]
MSLDLKRDDVKIEEEYEGVKMWWEIFRCVKGKKICRLTFHRSNWDVVTGSYLRYVVEEGKSIKARKKKVMVLMNNPSLNWKTSMKGLWTCTEFEHPATFDTLAMDIDKKDEIFRDLVAFRDGKEYYDRIGKAWKRGYLLYGPPGTGKSTMIAAMANLMKYNIYDLELTSIGNNWELKKLLIATTNKSIIVIEDIDCSLDLTGEREVKDLKGDKEGKKSNAVTLSGLLNFIDGIWSACGQERILVFTTNHVGKLDQALIRRGRMDMHIELSYCTFGAFKILAKNYLNIDSHHLFGEIESLLKETKITPADVAEHMMAKEVDGSLKGLIRALERIKWSQNVKVEEQLQQGD

SEQ ID NO: 97255 - protein, 329 aa, Arabidopsis thaliana
  peptide (1)..(329): Ceres Seq. ID no. 12736710
  misc_feature (116)..(303): Pfam Name: ATPase family associated with various cellular Pfam Description: ATPase family associated with various cellular
  misc_feature (1)..(329): Homolog of NCBI NO: 9294271 NR Description: mitochondrial protein-like [Arabidopsis thaliana]
  misc_feature (1)..(329): Homolog of NCBI NO: 15233036 NR Description: unknown protein; protein id: At3g28570.1
  misc_feature (1)..(323): Homolog of NCBI NO: 9294274 NR Description: mitochondrial protein-like [Arabidopsis thaliana]
  misc_feature (1)..(323): Homolog of NCBI NO: 15233040 NR Description: unknown protein; protein id: At3g28610.1
  misc_feature (1)..(323): Homolog of NCBI NO: 15233039 NR Description: unknown protein; protein id: At3g28600.1
  misc_feature (1)..(324): Homolog of NCBI NO: 10176992 NR Description: contains similarity to AAA-type
  misc_feature (1)..(324): Homolog of NCBI NO: 15242534 NR Description: putative protein; protein id: At5g40000.1
  misc_feature (1)..(203): Homolog of NCBI NO: 15233016 NR Description: hypothetical protein; protein id: At3g28540.1
  misc_feature (183)..(324): Homolog of NCBI NO: 15233016 NR Description: hypothetical protein; protein id: At3g28540.1
  misc_feature (1)..(297): Homolog of NCBI NO: 15233010 NR Description: hypothetical protein; protein id: At3g28510.1, by cDNA: gi_20466451 [Arabidopsis thaliana]
MWWEIFRCVKGKKICRLTFHRSNWDVVTGSYLRYVVEEGKSIKARKKKVMVLMNNPSLNWKTSMKGLWTCTEFEHPATFDTLAMDIDKKDEIFRDLVAFRDGKEYYDRIGKAWKRGYLLYGPPGTGKSTMIAAMANLMKYNIYDLELTSIGNNWELKKLLIATTNKSIIVIEDIDCSLDLTGEREVKDLKGDKEGKKSNAVTLSGLLNFIDGIWSACGQERILVFTTNHVGKLDQALIRRGRMDMHIELSYCTFGAFKILAKNYLNIDSHHLFGEIESLLKETKITPADVAEHMMAKEVDGSLKGLIRALERIKWSQNVKVEEQLQQGD

SEQ ID NO: 97256 - DNA, 1595 bp, Arabidopsis thaliana
  misc_feature (1)..(1595): Ceres Seq. ID no. 12736732
  misc_feature: MA Experiment ID: 20000171 Result: Up-regulated in Transcription
  misc_feature: MA Experiment 20000171 PARAMETER Experiment Name: At_42deg_Heat_P Parameter: Age (day) Value: 14
  misc_feature: MA Experiment 20000171 PARAMETER Experiment Name: At_42deg_Heat_P Parameter: Organism Value: A. thaliana
  misc_feature: MA Experiment 20000171 PARAMETER Experiment Name: At_42deg_Heat_P Parameter: Plant Line Value: WS
  misc_feature: MA Experiment 20000171 PARAMETER Experiment Name: At_42deg_Heat_P Parameter: Temperature (deg C) Value: 42 vs. 22
  misc_feature: MA Experiment 20000171 PARAMETER Experiment Name: At_42deg_Heat_P Parameter: Timepoint (hr) Value: 1
  misc_feature: MA Experiment 20000171 PARAMETER Experiment Name: At_42deg_Heat_P Parameter: Tissue Value: Aerial
  misc_feature: MA Experiment ID: 20000179 Result: Down-regulated in Transcription
  misc_feature: MA Experiment 20000179 PARAMETER Experiment Name: At_Germinating_Seeds_P Parameter: Age (hr) Value: 6 vs. 0
  misc_feature: MA Experiment 20000179 PARAMETER Experiment Name: At_Germinating_Seeds_P Parameter: Tissue Value: Germinating Seeds
  misc_feature: MA Experiment ID: 20000180 Result: Down-regulated in Transcription
  misc_feature: MA Experiment 20000180 PARAMETER Experiment Name: At_Germinating_Seeds_P Parameter: Age (hr) Value: 24 vs. 0
  misc_feature: MA Experiment 20000180 PARAMETER Experiment Name: At_Germinating_Seeds_P Parameter: Tissue Value: Germinating Seeds
  misc_feature: MA Experiment ID: 20000182 Result: Up-regulated in Transcription
  misc_feature: MA Experiment 20000182 PARAMETER Experiment Name: At_2mM_SA_P Parameter: Age (day) Value: 14
  misc_feature: MA Experiment 20000182 PARAMETER Experiment Name: At_2mM_SA_P Parameter: Organism Value: A. thaliana
  misc_feature: MA Experiment 20000182 PARAMETER Experiment Name: At_2mM_SA_P Parameter: Plant Line Value: WS
  misc_feature: MA Experiment 20000182 PARAMETER Experiment Name: At_2mM_SA_P Parameter: Timepoint (hr) Value: 6
  misc_feature: MA Experiment 20000182 PARAMETER Experiment Name: At_2mM_SA_P Parameter: Tissue Value: Aerial
  misc_feature: MA Experiment 20000182 PARAMETER Experiment Name: At_2mM_SA_P Parameter: Treatment Value: 2mM SA vs. No Treatment
  misc_feature: MA Experiment ID: 20000185 Result: Up-regulated in Transcription
  misc_feature: MA Experiment 20000185 PARAMETER Experiment Name: At_Roots__P Parameter: Age (day) Value: 7 vs. 21
  misc_feature: MA Experiment 20000185 PARAMETER Experiment Name: At_Roots__P Parameter: Organism Value: A. thaliana
  misc_feature: MA Experiment 20000185 PARAMETER Experiment Name: At_Roots__P Parameter: Tissue Value: Roots vs. Whole Plant
  misc_feature: MA Experiment ID: 20000234 Result: Down-regulated in Transcription
  misc_feature: MA Experiment 20000234 PARAMETER Experiment Name: At_Siliques_P Parameter: Age (day) Value: 21
  misc_feature: MA Experiment 20000234 PARAMETER Experiment Name: At_Siliques_P Parameter: Organism Value: A. thaliana
  misc_feature: MA Experiment 20000234 PARAMETER Experiment Name: At_Siliques_P Parameter: Plant Line Value: WS
  misc_feature: MA Experiment 20000234 PARAMETER Experiment Name: At_Siliques_P Parameter: Tissue Value: Less Than 5mm Siliques vs. Whole Plant
  misc_feature: MA Experiment ID: 20000235 Result: Down-regulated in Transcription
  misc_feature: MA Experiment 20000235 PARAMETER Experiment Name: At_Siliques_P Parameter: Age (day) Value: 21
  misc_feature: MA Experiment 20000235 PARAMETER Experiment Name: At_Siliques_P Parameter: Organism Value: A. thaliana
  misc_feature: MA Experiment 20000235 PARAMETER Experiment Name: At_Siliques_P Parameter: Plant Line Value: WS
  misc_feature: MA Experiment 20000235 PARAMETER Experiment Name: At_Siliques_P Parameter: Tissue Value: 5-10mm Siliques vs. Whole Plant
  misc_feature: MA Experiment ID: 20000267 Result: Down-regulated in Transcription
  misc_feature: MA Experiment 20000267 PARAMETER Experiment Name: At_Drought_P Parameter: Age (day) Value: 7
  misc_feature: MA Experiment 20000267 PARAMETER Experiment Name: At_Drought_P Parameter: Organism Value: A. thaliana
  misc_feature: MA Experiment 20000267 PARAMETER Experiment Name: At_Drought_P Parameter: Plant Line Value: WS
  misc_feature: MA Experiment 20000267 PARAMETER Experiment Name: At_Drought_P Parameter: Timepoint (hr) Value: 6
  misc_feature: MA Experiment 20000267 PARAMETER Experiment Name: At_Drought_P Parameter: Tissue Value: Whole Plant
  misc_feature: MA Experiment 20000267 PARAMETER Experiment Name: At_Drought_P Parameter: Treatment Value: Drought vs. No Drought
  misc_feature: MA Experiment ID: 20000308 Result: Down-regulated in Transcription
  misc_feature: MA Experiment 20000308 PARAMETER Experiment Name: At_100mM_NaCl__P Parameter: Age (day) Value: 17
  misc_feature: MA Experiment 20000308 PARAMETER Experiment Name: At_100mM_NaCl__P Parameter: Organism Value: A. thaliana
  misc_feature: MA Experiment 20000308 PARAMETER Experiment Name: At_100mM_NaCl__P Parameter: Plant Line Value: WS
  misc_feature: MA Experiment 20000308 PARAMETER Experiment Name: At_100mM_NaCl__P Parameter: Timepoint (hr) Value: 72
  misc_feature: MA Experiment 20000308 PARAMETER Experiment Name: At_100mM_NaCl__P Parameter: Tissue Value: Whole Plant
  misc_feature: MA Experiment 20000308 PARAMETER Experiment Name: At_100mM_NaCl__P Parameter: Treatment Value: 100mM NaCl vs. No Treatment
  misc_feature: MA Experiment ID: 20000436 Result: Down-regulated in Transcription
  misc_feature: MA Experiment 20000436 PARAMETER Experiment Name: At_Drought_P Parameter: Age (day) Value: 7
  misc_feature: MA Experiment 20000436 PARAMETER Experiment Name: At_Drought_P Parameter: Organism Value: A. thaliana
  misc_feature: MA Experiment 20000436 PARAMETER Experiment Name: At_Drought_P Parameter: Plant Line Value: WS
  misc_feature: MA Experiment 20000436 PARAMETER Experiment Name: At_Drought_P Parameter: Timepoint (hr) Value: 12
  misc_feature: MA Experiment 20000436 PARAMETER Experiment Name: At_Drought_P Parameter: Tissue Value: Whole Plant
  misc_feature: MA Experiment 20000436 PARAMETER Experiment Name: At_Drought_P Parameter: Treatment Value: Drought vs. No Drought
  misc_feature: MA Experiment ID: 20000437 Result: Down-regulated in Transcription
  misc_feature: MA Experiment 20000437 PARAMETER Experiment Name: At_Drought_P Parameter: Age (day) Value: 8
  misc_feature: MA Experiment 20000437 PARAMETER Experiment Name: At_Drought_P Parameter: Organism Value: A. thaliana
  misc_feature: MA Experiment 20000437 PARAMETER Experiment Name: At_Drought_P Parameter: Plant Line Value: WS
  misc_feature: MA Experiment 20000437 PARAMETER Experiment Name: At_Drought_P Parameter: Timepoint (hr) Value: 24
  misc_feature: MA Experiment 20000437 PARAMETER Experiment Name: At_Drought_P Parameter: Tissue Value: Whole Plant
  misc_feature: MA Experiment 20000437 PARAMETER Experiment Name: At_Drought_P Parameter: Treatment Value: Drought vs. No Drought
  misc_feature: MA Experiment ID: 20000439 Result: Up-regulated in Transcription
  misc_feature: MA Experiment 20000439 PARAMETER Experiment Name: At_Roots__P Parameter: Age (day) Value: 14 vs. 21
  misc_feature: MA Experiment 20000439 PARAMETER Experiment Name: At_Roots__P Parameter: Organism Value: A. thaliana
  misc_feature: MA Experiment 20000439 PARAMETER Experiment Name: At_Roots__P Parameter: Tissue Value: Roots vs. Whole Plant
  misc_feature: MA Experiment ID: 20000443 Result: Down-regulated in Transcription
  misc_feature: MA Experiment 20000443 PARAMETER Experiment Name: At_1uM_BR-BRZ__P Parameter: Tissue Value: Shoot Apices
  misc_feature: MA Experiment 20000443 PARAMETER Experiment Name: At_1uM_BR-BRZ__P Parameter: Treatment Value: 1uM BRZ vs. No Treatment
  misc_feature: MA Experiment ID: 20000453 Result: Up-regulated in Transcription
  misc_feature: MA Experiment 20000453 PARAMETER Experiment Name: At_100uM_ABA_P Parameter: Age (day) Value: 15
  misc_feature: MA Experiment 20000453 PARAMETER Experiment Name: At_100uM_ABA_P Parameter: Organism Value: A. thaliana
  misc_feature: MA Experiment 20000453 PARAMETER Experiment Name: At_100uM_ABA_P Parameter: Plant Line Value: WS
  misc_feature: MA Experiment 20000453 PARAMETER Experiment Name: At_100uM_ABA_P Parameter: Timepoint (hr) Value: 24
  misc_feature: MA Experiment 20000453 PARAMETER Experiment Name: At_100uM_ABA_P Parameter: Tissue Value: Aerial
  misc_feature: MA Experiment 20000453 PARAMETER Experiment Name: At_100uM_ABA_P Parameter: Treatment Value: 100uM ABA vs. No Treatment
  misc_feature: MA Experiment ID: 20000527 Result: Down-regulated in Transcription
  misc_feature: MA Experiment 20000527 PARAMETER Experiment Name: At_10percent_PEG_P Parameter: Age (day) Value: 20
  misc_feature: MA Experiment 20000527 PARAMETER Experiment Name: At_10percent_PEG_P Parameter: Organism Value: A. thaliana
  misc_feature: MA Experiment 20000527 PARAMETER Experiment Name: At_10percent_PEG_P Parameter: Plant Line Value: WS
  misc_feature: MA Experiment 20000527 PARAMETER Experiment Name: At_10percent_PEG_P Parameter: Timepoint (day) Value: 20
  misc_feature: MA Experiment 20000527 PARAMETER Experiment Name: At_10percent_PEG_P Parameter: Tissue Value: Whole Plant
  misc_feature: MA Experiment 20000527 PARAMETER Experiment Name: At_10percent_PEG_P Parameter: Treatment Value: 10percent PEG vs. No Treatment
  misc_feature: MA Experiment ID: 20000606 Result: Down-regulated in Transcription
  misc_feature: MA Experiment 20000606 PARAMETER Experiment Name: At_CS8548_Mutant_P Parameter: Age (day) Value: 14
  misc_feature: MA Experiment 20000606 PARAMETER Experiment Name: At_CS8548_Mutant_P Parameter: Plant Line Value: CS8548 vs. wt
  misc_feature: MA Experiment 20000606 PARAMETER Experiment Name: At_CS8548_Mutant_P Parameter: Tissue Value: Whole Plant
  misc_feature: MA Experiment ID: 20000709 Result: Up-regulated in Transcription
  misc_feature: MA Experiment 20000709 PARAMETER Experiment Name: At_15mM_NH4NO3_L-to-H_P Parameter: Age (hr) Value: 14
  misc_feature: MA Experiment 20000709 PARAMETER Experiment Name: At_15mM_NH4NO3_L-to-H_P Parameter: Organism Value: A. thaliana
  misc_feature: MA Experiment 20000709 PARAMETER Experiment Name: At_15mM_NH4NO3_L-to-H_P Parameter: Plant Line Value: WS
  misc_feature: MA Experiment 20000709 PARAMETER Experiment Name: At_15mM_NH4NO3_L-to-H_P Parameter: Timepoint (hr) Value: 4
  misc_feature: MA Experiment 20000709 PARAMETER Experiment Name: At_15mM_NH4NO3_L-to-H_P Parameter: Tissue Value: Aerial
  misc_feature: MA Experiment 20000709 PARAMETER Experiment Name: At_15mM_NH4NO3_L-to-H_P Parameter: Treatment Value: 15mM NH4NO3 vs. 30mM Mannitol
  misc_feature: MA Experiment ID: 20001451 Result: Down-regulated in Transcription
  misc_feature: MA Experiment 20001451 PARAMETER Experiment Name: At_Far-red-induction_P Parameter: Age (day) Value: 7
  misc_feature: MA Experiment 20001451 PARAMETER Experiment Name: At_Far-red-induction_P Parameter: Light Value: Far-red vs. White
  misc_feature: MA Experiment 20001451 PARAMETER Experiment Name: At_Far-red-induction_P Parameter: Organism Value: A. thaliana
  misc_feature: MA Experiment 20001451 PARAMETER Experiment Name: At_Far-red-induction_P Parameter: Plant Line Value: Columbia
  misc_feature: MA Experiment 20001451 PARAMETER Experiment Name: At_Far-red-induction_P Parameter: Timepoint (hr) Value: 24
  misc_feature: MA Experiment 20001451 PARAMETER Experiment Name: At_Far-red-induction_P Parameter: Tissue Value: Whole Plant
  misc_feature: MA Experiment ID: 20001560 Result: Up-regulated in Transcription
  misc_feature: MA Experiment 20001560 PARAMETER Experiment Name: At_Drought_Soil_Dry_P Parameter: Age (day) Value: 28
  misc_feature: MA Experiment 20001560 PARAMETER Experiment Name: At_Drought_Soil_Dry_P Parameter: Organism Value: A. thaliana
  misc_feature: MA Experiment 20001560 PARAMETER Experiment Name: At_Drought_Soil_Dry_P Parameter: Plant Line Value: WS
  misc_feature: MA Experiment 20001560 PARAMETER Experiment Name: At_Drought_Soil_Dry_P Parameter: Post Timepoint (hr) Value: None
  misc_feature: MA Experiment 20001560 PARAMETER Experiment Name: At_Drought_Soil_Dry_P Parameter: Post-Treatment Value: None
  misc_feature: MA Experiment 20001560 PARAMETER Experiment Name: At_Drought_Soil_Dry_P Parameter: Timepoint (day) Value: 14
  misc_feature: MA Experiment 20001560 PARAMETER Experiment Name: At_Drought_Soil_Dry_P Parameter: Treatment Value: Drought vs. No Drought
aatgtcatcaacaaagacaataatggaaactatatacctaattctctctctcttcttcttcttcatcttcctatctctcaaactcttgttcggaccacggccgcgtaaactaaacctaccgccgagtccgagtcgaccatttccgatcatcggacacctccaccttctaaagctaccactccaccgtagatttctctctctctcagaatctttaaacaacgccaagattttctctctcagcctcggctctcgtctagtttttgttgtttcttctcacgccgtcgcggaagaatgtttcactaagaacgacgtcgtgttagctaaccggccggagtttctcgtcgggaaacatatagggtacaactctacgaccatggttggtgcggcttatggagatagttggaggaatcttcgacgtattggcaccattgagatcttctcgtctcttaggcttaatagcttcgtatctatccgtcaagatgagatccgacggctcataatttgtctagcgaaaaactctcaacatgggtttgtgaaagtggagatgaaaccattgtttatgtgtttaactatcaacaacatcattagaatggtggccggaaaaagattctacggtgatggaacagagaacgacaacgaggctaaacacgtgagacagctaattgccgaggtagttgttagcggcggcgcagggaacgcagcagactacttccctatccttcgttacgtaacgaactatgagaaacatgttaagaagttagcaggtcgtgttgatgagtttttgcaaagtctagttaacgagaaacgtgtggagaaagtaaaaggtaacacaatgatcgatcatttactttctctacaagaaactcagcctgattactacacggatgtgatcatcaaaggaatcatacttgttatgatacttgccgggactgatacatcagctggaacgttagaatgggcgatgtcgaatttgttgaaccatccagaagtattacgaaaggcaaagaccgaaatcgacgaccaaatcggtgtagaccggttagtagaggaacaagacattgtgaaacttccttaccttcagcacattgtgtcagagactttacggctttatccggtggctccaatgcttttaccccacttagcatcagaagattgtatagttgatggctatgacgttccacgcggcacaatcatcttggtgaatgcatgggccatccatagagatccaaagttatgggaagagccagaaaaatttaagccggagaggtttgagaaaaaaggagaggataaaaagttgatgccatttgggattggacgacgatcttgccctggttcagggctagctcaacggctagtgactttggctcttggatcattggtccaatgttttgagtgggagagggttgaagaaaagtatctagacatgagagaaagtgaaaaaggaaccacaatgcgaaaagctacatcgttgcaagctatgtgtaaagctcgtcccattgtccataaggttttagatgcttcttgtccataactttcatcatacagaacctcttgtataacaatttcgatagaaacacgatctgttttgttgcttc

SEQ ID NO: 97257 - protein, 509 aa, Arabidopsis thaliana
  peptide (1)..(509): Ceres Seq. ID no. 12736733
  misc_feature (1)..(509): Homolog of NCBI NO: 15228472 NR Description: cytochrome p450 family; protein id: At3g28740.1, by cDNA: gi_15292830, supported by cDNA: gi_21280798 [Arabidopsis >gi|11994781|dbj|BAB03171.1| cytochrome P450 [Arabidopsis
  misc_feature (7)..(506): Homolog of NCBI NO: 15227789 NR Description: cytochrome p450 family; protein id: At2g23190.1
  misc_feature (8)..(507): Homolog of NCBI NO: 15235536 NR Description: cytochrome p450 family; protein id: At4g37370.1, by cDNA: 253698., supported by cDNA: gi_17473897 [Arabidopsis
  misc_feature (8)..(506): Homolog of NCBI NO: 15227792 NR Description: cytochrome p450, putative; protein id: [Arabidopsis thaliana] >gi|7430669|pir||T00510 probable
  misc_feature (8)..(505): Homolog of NCBI NO: 21554381 NR Description: cytochrome P450-like protein [Arabidopsis
  misc_feature (14)..(504): Homolog of NCBI NO: 15235517 NR Description: cytochrome p450 family; protein id: At4g37320.1
  misc_feature (8)..(507): Homolog of NCBI NO: 15235535 NR Description: cytochrome p450 family; protein id: At4g37360.1
  misc_feature (16)..(507): Homolog of NCBI NO: 15235534 NR Description: cytochrome P450 monooxygenase, putative; protein
  misc_feature (14)..(504): Homolog of NCBI NO: 15235533 NR Description: cytochrome p450 family; protein id: At4g37330.1
  misc_feature (1)..(504): Homolog of NCBI NO: 30692923 NR Description: cytochrome P450 91A1 [Arabidopsis thaliana] Cytochrome P450 81D1 >gi|9759034|dbj|BAB09361.1| cytochrome P450 thaliana] >gi|20147351|gb|AAM10388.1| AT5g36220/T30G6_3
MSSTKTIMETIYLILSLFFFFIFLSLKLLFGPRPRKLNLPPSPSRPFPIIGHLHLLKLPLHRRFLSLSESLNNAKIFSLSLGSRLVFVVSSHAVAEECFTKNDVVLANRPEFLVGKHIGYNSTTMVGAAYGDSWRNLRRIGTIEIFSSLRLNSFVSIRQDEIRRLIICLAKNSQHGFVKVEMKPLFMCLTINNIIRMVAGKRFYGDGTENDNEAKHVRQLIAEVVVSGGAGNAADYFPILRYVTNYEKHVKKLAGRVDEFLQSLVNEKRVEKVKGNTMIDHLLSLQETQPDYYTDVIIKGIILVMILAGTDTSAGTLEWAMSNLLNHPEVLRKAKTEIDDQIGVDRLVEEQDIVKLPYLQHIVSETLRLYPVAPMLLPHLASEDCIVDGYDVPRGTIILVNAWAIHRDPKLWEEPEKFKPERFEKKGEDKKLMPFGIGRRSCPGSGLAQRLVTLALGSLVQCFEWERVEEKYLDMRESEKGTTMRKATSLQAMCKARPIVHKVLDASCP

SEQ ID NO: 97258 - protein, 502 aa, Arabidopsis thaliana
  peptide (1)..(502): Ceres Seq. ID no. 12736734
  misc_feature (1)..(502): Homolog of NCBI NO: 15228472 NR Description: cytochrome p450 family; protein id: At3g28740.1, by cDNA: gi_15292830, supported by cDNA: gi_21280798 [Arabidopsis >gi|11994781|dbj|BAB03171.1| cytochrome P450 [Arabidopsis
  misc_feature (1)..(499): Homolog of NCBI NO: 15227789 NR Description: cytochrome p450 family; protein id: At2g23190.1
  misc_feature (1)..(500): Homolog of NCBI NO: 15235536 NR Description: cytochrome p450 family; protein id: At4g37370.1, by cDNA: 253698., supported by cDNA: gi_17473897 [Arabidopsis
  misc_feature (1)..(499): Homolog of NCBI NO: 15227792 NR Description: cytochrome p450, putative; protein id: [Arabidopsis thaliana] >gi|7430669|pir||T00510 probable
  misc_feature (1)..(498): Homolog of NCBI NO: 21554381 NR Description: cytochrome P450-like protein [Arabidopsis
  misc_feature (7)..(497): Homolog of NCBI NO: 15235517 NR Description: cytochrome p450 family; protein id: At4g37320.1
  misc_feature (1)..(500): Homolog of NCBI NO: 15235535 NR Description: cytochrome p450 family; protein id: At4g37360.1
  misc_feature (9)..(500): Homolog of NCBI NO: 15235534 NR Description: cytochrome P450 monooxygenase, putative; protein
  misc_feature (7)..(497): Homolog of NCBI NO: 15235533 NR Description: cytochrome p450 family; protein id: At4g37330.1
  misc_feature (1)..(497): Homolog of NCBI NO: 30692923 NR Description: cytochrome P450 91A1 [Arabidopsis thaliana] Cytochrome P450 81D1 >gi|9759034|dbj|BAB09361.1| cytochrome P450 thaliana] >gi|20147351|gb|AAM10388.1| AT5g36220/T30G6_3
METIYLILSLFFFFIFLSLKLLFGPRPRKLNLPPSPSRPFPIIGHLHLLKLPLHRRFLSLSESLNNAKIFSLSLGSRLVFVVSSHAVAEECFTKNDVVLANRPEFLVGKHIGYNSTTMVGAAYGDSWRNLRRIGTIEIFSSLRLNSFVSIRQDEIRRLIICLAKNSQHGFVKVEMKPLFMCLTINNIIRMVAGKRFYGDGTENDNEAKHVRQLIAEVVVSGGAGNAADYFPILRYVTNYEKHVKKLAGRVDEFLQSLVNEKRVEKVKGNTMIDHLLSLQETQPDYYTDVIIKGIILVMILAGTDTSAGTLEWAMSNLLNHPEVLRKAKTEIDDQIGVDRLVEEQDIVKLPYLQHIVSETLRLYPVAPMLLPHLASEDCIVDGYDVPRGTIILVNAWAIHRDPKLWEEPEKFKPERFEKKGEDKKLMPFGIGRRSCPGSGLAQRLVTLALGSLVQCFEWERVEEKYLDMRESEKGTTMRKATSLQAMCKARPIVHKVLDASCP

SEQ ID NO: 97259 - protein, 385 aa, Arabidopsis thaliana
  peptide (1)..(385): Ceres Seq. ID no. 12736735
  misc_feature (1)..(385): Homolog of NCBI NO: 15228472 NR Description: cytochrome p450 family; protein id: At3g28740.1, by cDNA: gi_15292830, supported by cDNA: gi_21280798 [Arabidopsis >gi|11994781|dbj|BAB03171.1| cytochrome P450 [Arabidopsis
  misc_feature (1)..(382): Homolog of NCBI NO: 15227789 NR Description: cytochrome p450 family; protein id: At2g23190.1
  misc_feature (1)..(383): Homolog of NCBI NO: 15235536 NR Description: cytochrome p450 family; protein id: At4g37370.1, by cDNA: 253698., supported by cDNA: gi_17473897 [Arabidopsis
  misc_feature (1)..(382): Homolog of NCBI NO: 15227792 NR Description: cytochrome p450, putative; protein id: [Arabidopsis thaliana] >gi|7430669|pir||T00510 probable
  misc_feature (1)..(381): Homolog of NCBI NO: 21554381 NR Description: cytochrome P450-like protein [Arabidopsis
  misc_feature (1)..(380): Homolog of NCBI NO: 15235517 NR Description: cytochrome p450 family; protein id: At4g37320.1
  misc_feature (1)..(383): Homolog of NCBI NO: 15235535 NR Description: cytochrome p450 family; protein id: At4g37360.1
  misc_feature (1)..(383): Homolog of NCBI NO: 15235534 NR Description: cytochrome P450 monooxygenase, putative; protein
  misc_feature (1)..(380): Homolog of NCBI NO: 15235533 NR Description: cytochrome p450 family; protein id: At4g37330.1
  misc_feature (1)..(380): Homolog of NCBI NO: 30692923 NR Description: cytochrome P450 91A1 [Arabidopsis thaliana] Cytochrome P450 81D1 >gi|9759034|dbj|BAB09361.1| cytochrome P450 thaliana] >gi|20147351|gb|AAM10388.1| AT5g36220/T30G6_3
MVGAAYGDSWRNLRRIGTIEIFSSLRLNSFVSIRQDEIRRLIICLAKNSQHGFVKVEMKPLFMCLTINNIIRMVAGKRFYGDGTENDNEAKHVRQLIAEVVVSGGAGNAADYFPILRYVTNYEKHVKKLAGRVDEFLQSLVNEKRVEKVKGNTMIDHLLSLQETQPDYYTDVIIKGIILVMILAGTDTSAGTLEWAMSNLLNHPEVLRKAKTEIDDQIGVDRLVEEQDIVKLPYLQHIVSETLRLYPVAPMLLPHLASEDCIVDGYDVPRGTIILVNAWAIHRDPKLWEEPEKFKPERFEKKGEDKKLMPFGIGRRSCPGSGLAQRLVTLALGSLVQCFEWERVEEKYLDMRESEKGTTMRKATSLQAMCKARPIVHKVLDASCP

SEQ ID NO: 97260 - DNA, 1287 bp, Arabidopsis thaliana
  misc_feature (1)..(1287): Ceres Seq. ID no. 12736756
  misc_feature: MA Experiment ID: 20000184 Result: Down-regulated in Transcription
  misc_feature: MA Experiment 20000184 PARAMETER Experiment Name: At_Shoots__P Parameter: Age (day) Value: 7
  misc_feature: MA Experiment 20000184 PARAMETER Experiment Name: At_Shoots__P Parameter: Tissue Value: Shoots vs. Whole Plant
  misc_feature: MA Experiment ID: 20000234 Result: Down-regulated in Transcription
  misc_feature: MA Experiment 20000234 PARAMETER Experiment Name: At_Siliques_P Parameter: Age (day) Value: 21
  misc_feature: MA Experiment 20000234 PARAMETER Experiment Name: At_Siliques_P Parameter: Organism Value: A. thaliana
  misc_feature: MA Experiment 20000234 PARAMETER Experiment Name: At_Siliques_P Parameter: Plant Line Value: WS
  misc_feature: MA Experiment 20000234 PARAMETER Experiment Name: At_Siliques_P Parameter: Tissue Value: Less Than 5mm Siliques vs. Whole Plant
  misc_feature: MA Experiment ID: 20000235 Result: Down-regulated in Transcription
  misc_feature: MA Experiment 20000235 PARAMETER Experiment Name: At_Siliques_P Parameter: Age (day) Value: 21
  misc_feature: MA Experiment 20000235 PARAMETER Experiment Name: At_Siliques_P Parameter: Organism Value: A. thaliana
  misc_feature: MA Experiment 20000235 PARAMETER Experiment Name: At_Siliques_P Parameter: Plant Line Value: WS
  misc_feature: MA Experiment 20000235 PARAMETER Experiment Name: At_Siliques_P Parameter: Tissue Value: 5-10mm Siliques vs. Whole Plant
  misc_feature: MA Experiment ID: 20000264 Result: Down-regulated in Transcription
  misc_feature: MA Experiment 20000264 PARAMETER Experiment Name: At_Open_Flower_P Parameter: Age (day) Value: 21
  misc_feature: MA Experiment 20000264 PARAMETER Experiment Name: At_Open_Flower_P Parameter: Plant Line Value: WS
  misc_feature: MA Experiment 20000264 PARAMETER Experiment Name: At_Open_Flower_P Parameter: Tissue Value: Open Flower vs. Whole Plant
  misc_feature: MA Experiment ID: 20000265 Result: Down-regulated in Transcription
  misc_feature: MA Experiment 20000265 PARAMETER Experiment Name: At_Open_Flower_P Parameter: Age (day) Value: 21
  misc_feature: MA Experiment 20000265 PARAMETER Experiment Name: At_Open_Flower_P Parameter: Plant Line Value: WS
  misc_feature: MA Experiment 20000265 PARAMETER Experiment Name: At_Open_Flower_P Parameter: Tissue Value: Closed Flower vs. Whole Plant
  misc_feature: MA Experiment ID: 20000286 Result: Down-regulated in Transcription
  misc_feature: MA Experiment 20000286 PARAMETER Experiment Name: At_Open_Flower_P Parameter: Age (day) Value: 21
  misc_feature: MA Experiment 20000286 PARAMETER Experiment Name: At_Open_Flower_P Parameter: Plant Line Value: WS
  misc_feature: MA Experiment 20000286 PARAMETER Experiment Name: At_Open_Flower_P Parameter: Tissue Value: Half Open vs. Whole Plant
  misc_feature: MA Experiment ID: 20000438 Result: Down-regulated in Transcription
  misc_feature: MA Experiment 20000438 PARAMETER Experiment Name: At_Shoots__P Parameter: Age (day) Value: 14
  misc_feature: MA Experiment 20000438 PARAMETER Experiment Name: At_Shoots__P Parameter: Tissue Value: Shoots vs. Whole Plant
  misc_feature: MA Experiment ID: 20000495 Result: Down-regulated in Transcription
  misc_feature: MA Experiment 20000495 PARAMETER Experiment Name: At_Guard_Cells_P Parameter: Harvest Date Value: 8/2/2002
  misc_feature: MA Experiment 20000495 PARAMETER Experiment Name: At_Guard_Cells_P Parameter: Organism Value: A. thaliana
  misc_feature: MA Experiment 20000495 PARAMETER Experiment Name: At_Guard_Cells_P Parameter: Tissue Value: Guard Cells vs. Leaves
atgggttgtgcgagttcgaagcatcgtaagcgttgtctccattgccggagaggatattctcctccggtggatgtacagagaagtcactcagtgcatcacgcatcgcaaaactctgaagatagttgtcacatggtggctctaagttcctcaagccttggatctctcaagctatgtgattcttcttttgggcataatcacaaacacttggcggactttagcgagaagcttgtttctggcgaatctgtgaaaactggaaatgggtttggtccgaatgttgtcagagagaagtcagataaagagaaatcgaatttggaattgcaagctaagcttatggaagcaaaggtatggtcaagtatgatgaatgagaagataccgaagattgtaccgaaaactcccattgttacgcctcctggtgagccagaaacgattaatacttgggaaatgatggatggtcttgaagatgttttgagtcctttacgatcacctaatcatgttaagagtttctcgtttgatgttggtcctaatggaggtaagtctaatggtagtgttaagccggtatggcttcaaatggaggaggaagaagaagggtttgaagattttgatcctgagatcatttcttcgtttaggaaatcgcttcaagaacttccttctgatcatccgtttcacatttcgaaccacgatttcgaattgaaaccgcggttcaatttctctgatgaggaaaaggaggaggaggaacaaagtgttggtaaagagagagtgatactttactttacaagtcttagaggtataaggaagacttatgaagaaagctgtgatgttcgggttatactaaaaagcctcgggattagagtggatgagcgagatgtgtcgatgcattcgggtttcaaagacgagttgaaggagctactaggggaaaagtttaacaaaggtgttgggattactttacctagagttttcttgggaaggaagtatattgggggagcagaggagattcggaagttaaacgaagatgggaagcttgagaagcttcttggagggtgtgagagggtggaagaaaaccaaaatggtaatggtctagaatgtgaagcttgtggagatgtaaggtttgtgccgtgtgagacatgttcagggagctgcaaagtgtactatgaatatgaagatgatgatgatgatgatgatgaaggtgatgatgatgaaagtgttaaggaagaaagagagtatgggtttcaaacatgtcctgattgtaatgagaatggtctcattagatgtcctgtttgttgtgattag

SEQ ID NO: 97261 - protein, 428 aa, Arabidopsis thaliana
  peptide (1)..(428): Ceres Seq. ID no. 12736757
  misc_feature (252)..(344): Pfam Name: Glutaredoxin Pfam Description: Glutaredoxin
  misc_feature (1)..(428): Homolog of NCBI NO: 15228503 NR Description: hypothetical protein; protein id: At3g28850.1 thaliana] >gi|11994793|dbj|BAB03183.1|
  misc_feature (1)..(212): Homolog of NCBI NO: 22327469 NR Description: Expressed protein; protein id: At5g39865.1, by cDNA: gi_19347748 [Arabidopsis thaliana] gb|AAC78540.1~gene_id:MYH19.5~similar to unknown protein
  misc_feature (244)..(428): Homolog of NCBI NO: 22327469 NR Description: Expressed protein; protein id: At5g39865.1, by cDNA: gi_19347748 [Arabidopsis thaliana] gb|AAC78540.1~gene_id:MYH19.5~similar to unknown protein
  misc_feature (196)..(427): Homolog of NCBI NO: 19071642 NR Description: hypothetical protein [Oryza sativa (japonica
  misc_feature (126)..(172): Homolog of NCBI NO: 19071642 NR Description: hypothetical protein [Oryza sativa (japonica
  misc_feature (249)..(415): Homolog of NCBI NO: 32490043 NR Description: OSJNBa0063C18.3 [Oryza sativa (japonica
  misc_feature (127)..(232): Homolog of NCBI NO: 32490043 NR Description: OSJNBa0063C18.3 [Oryza sativa (japonica
  misc_feature (249)..(420): Homolog of NCBI NO: 10241626 NR Description: Contains similarity to F1N 19.7 [Oryza sativa
  misc_feature (127)..(232): Homolog of NCBI NO: 10241626 NR Description: Contains similarity to F1N 19.7 [Oryza sativa
  misc_feature (250)..(387): Homolog of NCBI NO: 15240723 NR Description: putative protein; protein id: At5g13810.1, by cDNA: 124023., supported by cDNA: gi_14532459, supported by gi_16974532 [Arabidopsis thaliana] >gi|10177647|dbj|BAB11109.1|
MGCASSKHRKRCLHCRRGYSPPVDVQRSHSVHHASQNSEDSCHMVALSSSSLGSLKLCDSSFGHNHKHLADFSEKLVSGESVKTGNGFGPNVVREKSDKEKSNLELQAKLMEAKVWSSMMNEKIPKIVPKTPIVTPPGEPETINTWEMMDGLEDVLSPLRSPNHVKSFSFDVGPNGGKSNGSVKPVWLQMEEEEEGFEDFDPEIISSFRKSLQELPSDHPFHISNHDFELKPRFNFSDEEKEEEEQSVGKERVILYFTSLRGIRKTYEESCDVRVILKSLGIRVDERDVSMHSGFKDELKELLGEKFNKGVGITLPRVFLGRKYIGGAEEIRKLNEDGKLEKLLGGCERVEENQNGNGLECEACGDVRFVPCETCSGSCKVYYEYEDDDDDDDEGDDDESVKEEREYGFQTCPDCNENGLIRCPVCCD

SEQ ID NO: 97262 - protein, 385 aa, Arabidopsis thaliana
  peptide (1)..(385): Ceres Seq. ID no. 12736758
  misc_feature (209)..(301): Pfam Name: Glutaredoxin Pfam Description: Glutaredoxin
  misc_feature (1)..(385): Homolog of NCBI NO: 15228503 NR Description: hypothetical protein; protein id: At3g28850.1 thaliana] >gi|11994793|dbj|BAB03183.1|
  misc_feature (1)..(169): Homolog of NCBI NO: 22327469 NR Description: Expressed protein; protein id: At5g39865.1, by cDNA: gi_19347748 [Arabidopsis thaliana] gb|AAC78540.1~gene_id:MYH19.5~similar to unknown protein
  misc_feature (201)..(385): Homolog of NCBI NO: 22327469 NR Description: Expressed protein; protein id: At5g39865.1, by cDNA: gi_19347748 [Arabidopsis thaliana] gb|AAC78540.1~gene_id:MYH19.5~similar to unknown protein
  misc_feature (153)..(384): Homolog of NCBI NO: 19071642 NR Description: hypothetical protein [Oryza sativa (japonica
  misc_feature (83)..(129): Homolog of NCBI NO: 19071642 NR Description: hypothetical protein [Oryza sativa (japonica
  misc_feature (206)..(372): Homolog of NCBI NO: 32490043 NR Description: OSJNBa0063C18.3 [Oryza sativa (japonica
  misc_feature (84)..(189): Homolog of NCBI NO: 32490043 NR Description: OSJNBa0063C18.3 [Oryza sativa (japonica
  misc_feature (206)..(377): Homolog of NCBI NO: 10241626 NR Description: Contains similarity to F1N 19.7 [Oryza sativa
  misc_feature (84)..(189): Homolog of NCBI NO: 10241626 NR Description: Contains similarity to F1N 19.7 [Oryza sativa
  misc_feature (207)..(344): Homolog of NCBI NO: 15240723 NR Description: putative protein; protein id: At5g13810.1, by cDNA: 124023., supported by cDNA: gi_14532459, supported by gi_16974532 [Arabidopsis thaliana] >gi|10177647|dbj|BAB11109.1|
MVALSSSSLGSLKLCDSSFGHNHKHLADFSEKLVSGESVKTGNGFGPNVVREKSDKEKSNLELQAKLMEAKVWSSMMNEKIPKIVPKTPIVTPPGEPETINTWEMMDGLEDVLSPLRSPNHVKSFSFDVGPNGGKSNGSVKPVWLQMEEEEEGFEDFDPEIISSFRKSLQELPSDHPFHISNHDFELKPRFNFSDEEKEEEEQSVGKERVILYFTSLRGIRKTYEESCDVRVILKSLGIRVDERDVSMHSGFKDELKELLGEKFNKGVGITLPRVFLGRKYIGGAEEIRKLNEDGKLEKLLGGCERVEENQNGNGLECEACGDVRFVPCETCSGSCKVYYEYEDDDDDDDEGDDDESVKEEREYGFQTCPDCNENGLIRCPVCCD

SEQ ID NO: 97263 - protein, 318 aa, Arabidopsis thaliana
  peptide (1)..(318): Ceres Seq. ID no. 12736759
  misc_feature (142)..(234): Pfam Name: Glutaredoxin Pfam Description: Glutaredoxin
  misc_feature (1)..(318): Homolog of NCBI NO: 15228503 NR Description: hypothetical protein; protein id: At3g28850.1 thaliana] >gi|11994793|dbj|BAB03183.1|
  misc_feature (1)..(102): Homolog of NCBI NO: 22327469 NR Description: Expressed protein; protein id: At5g39865.1, by cDNA: gi_19347748 [Arabidopsis thaliana] gb|AAC78540.1~gene_id:MYH19.5~similar to unknown protein
  misc_feature (134)..(318): Homolog of NCBI NO: 22327469 NR Description: Expressed protein; protein id: At5g39865.1, by cDNA: gi_19347748 [Arabidopsis thaliana] gb|AAC78540.1~gene_id:MYH19.5~similar to unknown protein
  misc_feature (86)..(317): Homolog of NCBI NO: 19071642 NR Description: hypothetical protein [Oryza sativa (japonica
  misc_feature (16)..(62): Homolog of NCBI NO: 19071642 NR Description: hypothetical protein [Oryza sativa (japonica
  misc_feature (139)..(305): Homolog of NCBI NO: 32490043 NR Description: OSJNBa0063C18.3 [Oryza sativa (japonica
  misc_feature (17)..(122): Homolog of NCBI NO: 32490043 NR Description: OSJNBa0063C18.3 [Oryza sativa (japonica
  misc_feature (139)..(310): Homolog of NCBI NO: 10241626 NR Description: Contains similarity to F1N 19.7 [Oryza sativa
  misc_feature (17)..(122): Homolog of NCBI NO: 10241626 NR Description: Contains similarity to F1N 19.7 [Oryza sativa
  misc_feature (140)..(277): Homolog of NCBI NO: 15240723 NR Description: putative protein; protein id: At5g13810.1, by cDNA: 124023., supported by cDNA: gi_14532459, supported by gi_16974532 [Arabidopsis thaliana] >gi|10177647|dbj|BAB11109.1|
MEAKVWSSMMNEKIPKIVPKTPIVTPPGEPETINTWEMMDGLEDVLSPLRSPNHVKSFSFDVGPNGGKSNGSVKPVWLQMEEEEEGFEDFDPEIISSFRKSLQELPSDHPFHISNHDFELKPRFNFSDEEKEEEEQSVGKERVILYFTSLRGIRKTYEESCDVRVILKSLGIRVDERDVSMHSGFKDELKELLGEKFNKGVGITLPRVFLGRKYIGGAEEIRKLNEDGKLEKLLGGCERVEENQNGNGLECEACGDVRFVPCETCSGSCKVYYEYEDDDDDDDEGDDDESVKEEREYGFQTCPDCNENGLIRCPVCCD

SEQ ID NO: 97264 - DNA, 666 bp, Arabidopsis thaliana
  misc_feature (1)..(666): Ceres Seq. ID no. 12736793
  misc_feature: MA Experiment ID: 20000328 Result: Down-regulated in Transcription
  misc_feature: MA Experiment 20000328 PARAMETER Experiment Name: At_42deg_Heat_Sub_P Parameter: Age (day) Value: 14
  misc_feature: MA Experiment 20000328 PARAMETER Experiment Name: At_42deg_Heat_Sub_P Parameter: Organism Value: A. thaliana
  misc_feature: MA Experiment 20000328 PARAMETER Experiment Name: At_42deg_Heat_Sub_P Parameter: Plant Line Value: WS
  misc_feature: MA Experiment 20000328 PARAMETER Experiment Name: At_42deg_Heat_Sub_P Parameter: Temperature (deg C) Value: 42 vs. 22
  misc_feature: MA Experiment 20000328 PARAMETER Experiment Name: At_42deg_Heat_Sub_P Parameter: Timepoint (hr) Value: 6
  misc_feature: MA Experiment 20000328 PARAMETER Experiment Name: At_42deg_Heat_Sub_P Parameter: Tissue Value: Aerial
  misc_feature: MA Experiment ID: 20000355 Result: Up-regulated in Transcription
  misc_feature: MA Experiment 20000355 PARAMETER Experiment Name: At_Siliques_Sub_P Parameter: Age (day) Value: 21
  misc_feature: MA Experiment 20000355 PARAMETER Experiment Name: At_Siliques_Sub_P Parameter: Organism Value: A. thaliana
  misc_feature: MA Experiment 20000355 PARAMETER Experiment Name: At_Siliques_Sub_P Parameter: Plant Line Value: WS
  misc_feature: MA Experiment 20000355 PARAMETER Experiment Name: At_Siliques_Sub_P Parameter: Tissue Value: Less Than 5mm Siliques vs. Whole Plant
  misc_feature: MA Experiment ID: 20000440 Result: Up-regulated in Transcription
  misc_feature: MA Experiment 20000440 PARAMETER Experiment Name: At_Closed-Flower__Sub_P Parameter: Tissue Value: Closed Flower vs. Whole Plant
atgagtcaaggtttcgaaagatatgagagacaatactgtgagatttctgcaaatctctcaaagaaatgtacttcagctattgctcttgatggagaacaaaagaagcagaatctatctgaaataaaatctggggttgaggaagcagaagctttggttaagaaaatggacctcgaggcaagaaaccttccacccaatgttaaatccagtctccttgtcaaattaagggaatacaaatctgatcttaacaatttcaagacggaagtgaagagaatcacatctggaaacttaaacgctactgctcgagatgagttactagaagctggtatggctgacacattgacggcttcagctgatcaaagatcaagattgatgatgtcaacagaccatttaggccgaaccacagacagaatcaaggacagtaggagaacgatactggagacagaagagcttggtgtttcaatccttcaggatttgcacgggcagagacagtctctcttacgggcccatgaaacgcttcatggagtcgatgataacgtcggaaagagcaagaaaatattgacaacaatgactaggagaatgaatagaaacaaatggaccatcggtgcgataatcacagtccttgtcctcgccattatctttatcttgtacttcaaactcaccaggtga

SEQ ID NO: 97265 - protein, 221 aa, Arabidopsis thaliana
  peptide (1)..(221): Ceres Seq. ID no. 12736794
  misc_feature (41)..(196): Pfam Name: Vesicle transport v-SNARE protein Pfam Description: Vesicle transport v-SNARE protein
  misc_feature (1)..(221): Homolog of NCBI NO: 15228600 NR Description: SNARE protein AtVTI13; protein id: At3g29100.1
  misc_feature (1)..(221): Homolog of NCBI NO: 6690274 NR Description: v-SNARE AtVTI1a [Arabidopsis thaliana]
  misc_feature (1)..(221): Homolog of NCBI NO: 15241780 NR Description: v-SNARE AtVTI1a (ZIG); protein id: At5g39510.1, by cDNA: gi_17979269, supported by cDNA: gi_20147178, supported
  misc_feature (55)..(221): Homolog of NCBI NO: 26451552 NR Description: putative vesicle transport protein [Arabidopsis
  misc_feature (1)..(219): Homolog of NCBI NO: 34910406 NR Description: putative vesicle transport v-SNARE protein [Oryza
  misc_feature (1)..(218): Homolog of NCBI NO: 34914100 NR Description: similar to vesicle transport protein [Oryza
  misc_feature (1)..(220): Homolog of NCBI NO: 18396008 NR Description: v-SNARE protein AtVTI1b, putative; protein id: supported by cDNA: gi_6690275 [Arabidopsis thaliana]
  misc_feature (1)..(220): Homolog of NCBI NO: 6690276 NR Description: v-SNARE AtVTI1b [Arabidopsis thaliana]
  misc_feature (1)..(220): Homolog of NCBI NO: 27805772 NR Description: Vesicle transport v-SNARE 12 (AtVTI12) (Vesicle v- SNARE protein VTI1b) (Vesicle soluble NSF attachment protein
  misc_feature (1)..(221): Homolog of NCBI NO: 15241823 NR Description: SNARE protein AtMEMB11; protein id: At5g39630.1
MSQGFERYERQYCEISANLSKKCTSAIALDGEQKKQNLSEIKSGVEEAEALVKKMDLEARNLPPNVKSSLLVKLREYKSDLNNFKTEVKRITSGNLNATARDELLEAGMADTLTASADQRSRLMMSTDHLGRTTDRIKDSRRTILETEELGVSILQDLHGQRQSLLRAHETLHGVDDNVGKSKKILTTMTRRMNRNKWTIGAIITVLVLAIIFILYFKLTR

SEQ ID NO: 97266 - protein, 167 aa, Arabidopsis thaliana; identical to SEQ ID NO: 89257
  peptide (1)..(167): Ceres Seq. ID no. 12736795
  misc_feature (1)..(142): Pfam Name: Vesicle transport v-SNARE protein Pfam Description: Vesicle transport v-SNARE protein
  misc_feature (1)..(167): Homolog of NCBI NO: 15228600 NR Description: SNARE protein AtVTI13; protein id: At3g29100.1
  misc_feature (1)..(167): Homolog of NCBI NO: 6690274 NR Description: v-SNARE AtVTI1a [Arabidopsis thaliana]
  misc_feature (1)..(167): Homolog of NCBI NO: 15241780 NR Description: v-SNARE AtVTI1a (ZIG); protein id: At5g39510.1, by cDNA: gi_17979269, supported by cDNA: gi_20147178, supported
  misc_feature (1)..(167): Homolog of NCBI NO: 26451552 NR Description: putative vesicle transport protein [Arabidopsis
  misc_feature (1)..(165): Homolog of NCBI NO: 34910406 NR Description: putative vesicle transport v-SNARE protein [Oryza
  misc_feature (1)..(164): Homolog of NCBI NO: 34914100 NR Description: similar to vesicle transport protein [Oryza
  misc_feature (1)..(166): Homolog of NCBI NO: 18396008 NR Description: v-SNARE protein AtVTI1b, putative; protein id: supported by cDNA: gi_6690275 [Arabidopsis thaliana]
  misc_feature (1)..(166): Homolog of NCBI NO: 6690276 NR Description: v-SNARE AtVTI1b [Arabidopsis thaliana]
  misc_feature (1)..(166): Homolog of NCBI NO: 27805772 NR Description: Vesicle transport v-SNARE 12 (AtVTI12) (Vesicle v- SNARE protein VTI1b) (Vesicle soluble NSF attachment protein
  misc_feature (1)..(167): Homolog of NCBI NO: 15241823 NR Description: SNARE protein AtMEMB11; protein id: At5g39630.1

SEQ ID NO: 97267 - protein, 113 aa, Arabidopsis thaliana; identical to SEQ ID NO: 89258
  peptide (1)..(113): Ceres Seq. ID no. 12736796
  misc_feature (1)..(88): Pfam Name: Vesicle transport v-SNARE protein Pfam Description: Vesicle transport v-SNARE protein
  misc_feature (1)..(113): Homolog of NCBI NO: 15228600 NR Description: SNARE protein AtVTI13; protein id: At3g29100.1
  misc_feature (1)..(113): Homolog of NCBI NO: 6690274 NR Description: v-SNARE AtVTI1a [Arabidopsis thaliana]
  misc_feature (1)..(113): Homolog of NCBI NO: 15241780 NR Description: v-SNARE AtVTI1a (ZIG); protein id: At5g39510.1, by cDNA: gi_17979269, supported by cDNA: gi_20147178, supported
  misc_feature (1)..(113): Homolog of NCBI NO: 26451552 NR Description: putative vesicle transport protein [Arabidopsis
  misc_feature (1)..(111): Homolog of NCBI NO: 34910406 NR Description: putative vesicle transport v-SNARE protein [Oryza
  misc_feature (1)..(110): Homolog of NCBI NO: 34914100 NR Description: similar to vesicle transport protein [Oryza
  misc_feature (1)..(112): Homolog of NCBI NO: 18396008 NR Description: v-SNARE protein AtVTI1b, putative; protein id: supported by cDNA: gi_6690275 [Arabidopsis thaliana]
  misc_feature (1)..(112): Homolog of NCBI NO: 6690276 NR Description: v-SNARE AtVTI1b [Arabidopsis thaliana]
  misc_feature (1)..(112): Homolog of NCBI NO: 27805772 NR Description: Vesicle transport v-SNARE 12 (AtVTI12) (Vesicle v- SNARE protein VTI1b) (Vesicle soluble NSF attachment protein
  misc_feature (1)..(113): Homolog of NCBI NO: 15241823 NR Description: SNARE protein AtMEMB11; protein id: At5g39630.1

SEQ ID NO: 97268 - DNA, 780 bp, Arabidopsis thaliana
  misc_feature (1)..(780): Ceres Seq. ID no. 12736804
  misc_feature: MA Experiment ID: 20000173 Result: Up-regulated in Transcription
  misc_feature: MA Experiment 20000173 PARAMETER Experiment Name: At_42deg_Heat_P Parameter: Age (day) Value: 14
  misc_feature: MA Experiment 20000173 PARAMETER Experiment Name: At_42deg_Heat_P Parameter: Organism Value: A. thaliana
  misc_feature: MA Experiment 20000173 PARAMETER Experiment Name: At_42deg_Heat_P Parameter: Plant Line Value: WS
  misc_feature: MA Experiment 20000173 PARAMETER Experiment Name: At_42deg_Heat_P Parameter: Temperature (deg C) Value: 42 vs. 22
  misc_feature: MA Experiment 20000173 PARAMETER Experiment Name: At_42deg_Heat_P Parameter: Timepoint (hr) Value: 6
  misc_feature: MA Experiment 20000173 PARAMETER Experiment Name: At_42deg_Heat_P Parameter: Tissue Value: Aerial
atgtcgggacaaagattggatggcaagatcgtaattataacaggcggggctagtgggatcggagctgaagcagcgaggttgttcacggaccatggagctaaagttgtcatcgttgacttacaagaggagcttggtcaaaacgtcgccgtttcgatcgggctagacaaagcaagtttttaccgttgcgatataacggatgagacggaagttgagaacgccgttaagttcaccgttgaaaaacacggaaagcttgacgttctgtttagtaacgccggggtcatggaaccgcatggaagcattcttgatttggatcttgaggcgtttgatcgaacgatggccgtcaacgttcgcggtgcggctgcgtttataaaacatgcagcgcgttcgatggtggctagtggaactcgtggctccattgtttgtacaacgagtgtgacggctgagattggtggtccgggacctcacagttacacagcgtcgaaacacgcgcttctcgggttggttcgatcagcgtgtggcgggttggggaagtacgggattagagtcaacggtgttgcaccgtatggagtagcaacggggttaactagctacaacgaggaaactgtgaagatggttgaggattactgttcagccacggcgattctcaaaggtgttgtacttaaagctcgacatgtggcagatgcagctttgtttttggcttctgatgattcggtttatattagtggtcaaaacttgggggttgacggcggttatagcgtcgttaagctgacatcgaattaa

SEQ ID NO: 97269 - protein, 259 aa, Arabidopsis thaliana
  peptide (1)..(259): Ceres Seq. ID no. 12736805
  misc_feature (1)..(259): Homolog of NCBI NO: 15228656 NR Description: short-chain alcohol dehydrogenase, putative;
  misc_feature (1)..(256): Homolog of NCBI NO: 9293918 NR Description: alcohol dehydrogenase-like protein [Arabidopsis
  misc_feature (1)..(255): Homolog of NCBI NO: 15226503 NR Description: (NM_130281) putative alcohol dehydrogenase; id: At2g47130.1 [Arabidopsis thaliana] >gi|7431088|pir||T02175
  misc_feature (13)..(256): Homolog of NCBI NO: 22331405 NR Description: short-chain alcohol dehydrogenase, putative;
  misc_feature (1)..(255): Homolog of NCBI NO: 15226500 NR Description: (NM_130280) putative alcohol dehydrogenase; id: At2g47120.1 [Arabidopsis thaliana] >gi|7431089|pir||T02176
  misc_feature (1)..(255): Homolog of NCBI NO: 18407273 NR Description: putative alcohol dehydrogenase; protein id: supported by cDNA: gi_13878112, supported by cDNA: gi_17104782 thaliana] >gi|13878113|gb|AAK44134.1|AF370319_1 putative alcohol
  misc_feature (5)..(255): Homolog of NCBI NO: 7431087 NR Description: probable alcohol dehydrogenase [imported] -
  misc_feature (94)..(259): Homolog of NCBI NO: 9293921 NR Description: contains similarity to alcohol
  misc_feature (2)..(255): Homolog of NCBI NO: 15983819 NR Description: 3-beta-hydroxysteroiddehydrogenase [Digitalis
  misc_feature (1)..(254): Homolog of NCBI NO: 40714675 NR Description: putative hydroxysteroiddehydrogenase [Oryza
MSGQRLDGKIVIITGGASGIGAEAARLFTDHGAKVVIVDLQEELGQNVAVSIGLDKASFYRCDITDETEVENAVKFTVEKHGKLDVLFSNAGVMEPHGSILDLDLEAFDRTMAVNVRGAAAFIKHAARSMVASGTRGSIVCTTSVTAEIGGPGPHSYTASKHALLGLVRSACGGLGKYGIRVNGVAPYGVATGLTSYNEETVKMVEDYCSATAILKGVVLKARHVADAALFLASDDSVYISGQNLGVDGGYSVVKLTSN

SEQ ID NO: 97270 - protein, 166 aa, Arabidopsis thaliana; identical to SEQ ID NO: 89262
  peptide (1)..(166): Ceres Seq. ID no. 12736806
  misc_feature (1)..(166): Homolog of NCBI NO: 15228656 NR Description: short-chain alcohol dehydrogenase, putative;
  misc_feature (1)..(163): Homolog of NCBI NO: 9293918 NR Description: alcohol dehydrogenase-like protein [Arabidopsis
  misc_feature (1)..(162): Homolog of NCBI NO: 15226503 NR Description: (NM_130281) putative alcohol dehydrogenase; id: At2g47130.1 [Arabidopsis thaliana] >gi|7431088|pir||T02175
  misc_feature (1)..(163): Homolog of NCBI NO: 22331405 NR Description: short-chain alcohol dehydrogenase, putative;
  misc_feature (1)..(162): Homolog of NCBI NO: 15226500 NR Description: (NM_130280) putative alcohol dehydrogenase; id: At2g47120.1 [Arabidopsis thaliana] >gi|7431089|pir||T02176
  misc_feature (1)..(162): Homolog of NCBI NO: 18407273 NR Description: putative alcohol dehydrogenase; protein id: supported by cDNA: gi_13878112, supported by cDNA: gi_17104782 thaliana] >gi|13878113|gb|AAK44134.1|AF370319_1 putative alcohol
  misc_feature (1)..(162): Homolog of NCBI NO: 7431087 NR Description: probable alcohol dehydrogenase [imported] -
  misc_feature (1)..(166): Homolog of NCBI NO: 9293921 NR Description: contains similarity to alcohol
  misc_feature (1)..(162): Homolog of NCBI NO: 15983819 NR Description: 3-beta-hydroxysteroiddehydrogenase [Digitalis
  misc_feature (1)..(161): Homolog of NCBI NO: 40714675 NR Description: putative hydroxysteroiddehydrogenase [Oryza

SEQ ID NO: 97271 - protein, 148 aa, Arabidopsis thaliana; identical to SEQ ID NO: 89263
  peptide (1)..(148): Ceres Seq. ID no. 12736807
  misc_feature (1)..(148): Homolog of NCBI NO: 15228656 NR Description: short-chain alcohol dehydrogenase, putative;
  misc_feature (1)..(145): Homolog of NCBI NO: 9293918 NR Description: alcohol dehydrogenase-like protein [Arabidopsis
  misc_feature (1)..(144): Homolog of NCBI NO: 15226503 NR Description: (NM_130281) putative alcohol dehydrogenase; id: At2g47130.1 [Arabidopsis thaliana] >gi|7431088|pir||T02175
  misc_feature (1)..(145): Homolog of NCBI NO: 22331405 NR Description: short-chain alcohol dehydrogenase, putative;
  misc_feature (1)..(144): Homolog of NCBI NO: 15226500 NR Description: (NM_130280) putative alcohol dehydrogenase; id: At2g47120.1 [Arabidopsis thaliana] >gi|7431089|pir||T02176
  misc_feature (1)..(144): Homolog of NCBI NO: 18407273 NR Description: putative alcohol dehydrogenase; protein id: supported by cDNA: gi_13878112, supported by cDNA: gi_17104782 thaliana] >gi|13878113|gb|AAK44134.1|AF370319_1 putative alcohol
  misc_feature (1)..(144): Homolog of NCBI NO: 7431087 NR Description: probable alcohol dehydrogenase [imported] -
  misc_feature (1)..(148): Homolog of NCBI NO: 9293921 NR Description: contains similarity to alcohol
  misc_feature (1)..(144): Homolog of NCBI NO: 15983819 NR Description: 3-beta-hydroxysteroiddehydrogenase [Digitalis
  misc_feature (1)..(143): Homolog of NCBI NO: 40714675 NR Description: putative hydroxysteroiddehydrogenase [Oryza

SEQ ID NO: 97272 - DNA, 1350 bp, Arabidopsis thaliana
  misc_feature (1)..(1350): Ceres Seq. ID no. 12736866
  misc_feature: MA Experiment ID: 20000180 Result: Up-regulated in Transcription
  misc_feature: MA Experiment 20000180 PARAMETER Experiment Name: At_Germinating_Seeds_P Parameter: Age (hr) Value: 24 vs. 0
  misc_feature: MA Experiment 20000180 PARAMETER Experiment Name: At_Germinating_Seeds_P Parameter: Tissue Value: Germinating Seeds
  misc_feature: MA Experiment ID: 20000184 Result: Up-regulated in Transcription
  misc_feature: MA Experiment 20000184 PARAMETER Experiment Name: At_Shoots__P Parameter: Age (day) Value: 7
  misc_feature: MA Experiment 20000184 PARAMETER Experiment Name: At_Shoots__P Parameter: Tissue Value: Shoots vs. Whole Plant
  misc_feature: MA Experiment ID: 20000264 Result: Up-regulated in Transcription
  misc_feature: MA Experiment 20000264 PARAMETER Experiment Name: At_Open_Flower_P Parameter: Age (day) Value: 21
  misc_feature: MA Experiment 20000264 PARAMETER Experiment Name: At_Open_Flower_P Parameter: Plant Line Value: WS
  misc_feature: MA Experiment 20000264 PARAMETER Experiment Name: At_Open_Flower_P Parameter: Tissue Value: Open Flower vs. Whole Plant
  misc_feature: MA Experiment ID: 20000267 Result: Up-regulated in Transcription
  misc_feature: MA Experiment 20000267 PARAMETER Experiment Name: At_Drought_P Parameter: Age (day) Value: 7
  misc_feature: MA Experiment 20000267 PARAMETER Experiment Name: At_Drought_P Parameter: Organism Value: A. thaliana
  misc_feature: MA Experiment 20000267 PARAMETER Experiment Name: At_Drought_P Parameter: Plant Line Value: WS
  misc_feature: MA Experiment 20000267 PARAMETER Experiment Name: At_Drought_P Parameter: Timepoint (hr) Value: 6
  misc_feature: MA Experiment 20000267 PARAMETER Experiment Name: At_Drought_P Parameter: Tissue Value: Whole Plant
  misc_feature: MA Experiment 20000267 PARAMETER Experiment Name: At_Drought_P Parameter: Treatment Value: Drought vs. No Drought
  misc_feature: MA Experiment ID: 20000308 Result: Up-regulated in Transcription
  misc_feature: MA Experiment 20000308 PARAMETER Experiment Name: At_100mM_NaCl__P Parameter: Age (day) Value: 17
  misc_feature: MA Experiment 20000308 PARAMETER Experiment Name: At_100mM_NaCl__P Parameter: Organism Value: A. thaliana
  misc_feature: MA Experiment 20000308 PARAMETER Experiment Name: At_100mM_NaCl__P Parameter: Plant Line Value: WS
  misc_feature: MA Experiment 20000308 PARAMETER Experiment Name: At_100mM_NaCl__P Parameter: Timepoint (hr) Value: 72
  misc_feature: MA Experiment 20000308 PARAMETER Experiment Name: At_100mM_NaCl__P Parameter: Tissue Value: Whole Plant
  misc_feature: MA Experiment 20000308 PARAMETER Experiment Name: At_100mM_NaCl__P Parameter: Treatment Value: 100mM NaCl vs. No Treatment
  misc_feature: MA Experiment ID: 20001248 Result: Down-regulated in Transcription
  misc_feature: MA Experiment 20001248 PARAMETER Experiment Name: At_Far-red-induction_P Parameter: Age (day) Value: 7
  misc_feature: MA Experiment 20001248 PARAMETER Experiment Name: At_Far-red-induction_P Parameter: Light Value: Far-red vs. White
  misc_feature: MA Experiment 20001248 PARAMETER Experiment Name: At_Far-red-induction_P Parameter: Organism Value: A. thaliana
  misc_feature: MA Experiment 20001248 PARAMETER Experiment Name: At_Far-red-induction_P Parameter: Plant Line Value: Columbia
  misc_feature: MA Experiment 20001248 PARAMETER Experiment Name: At_Far-red-induction_P Parameter: Timepoint (hr) Value: 4
  misc_feature: MA Experiment 20001248 PARAMETER Experiment Name: At_Far-red-induction_P Parameter: Tissue Value: Whole Plant
  misc_feature: MA Experiment ID: 20001458 Result: Down-regulated in Transcription
  misc_feature: MA Experiment 20001458 PARAMETER Experiment Name: At_50mM_NH4NO3_L-to-H_P Parameter: Age (day) Value: Undefined
  misc_feature: MA Experiment 20001458 PARAMETER Experiment Name: At_50mM_NH4NO3_L-to-H_P Parameter: Organism Value: Undefined
  misc_feature: MA Experiment 20001458 PARAMETER Experiment Name: At_50mM_NH4NO3_L-to-H_P Parameter: Plant Line Value: Undefined
  misc_feature: MA Experiment 20001458 PARAMETER Experiment Name: At_50mM_NH4NO3_L-to-H_P Parameter: Timepoint (hr) Value: 2
  misc_feature: MA Experiment 20001458 PARAMETER Experiment Name: At_50mM_NH4NO3_L-to-H_P Parameter: Tissue Value: Siliques
  misc_feature: MA Experiment 20001458 PARAMETER Experiment Name: At_50mM_NH4NO3_L-to-H_P Parameter: Treatment Value: 50mM NH4NO3 vs. 100mM Manitol
  misc_feature: MA Experiment ID: 20001556 Result: Up-regulated in Transcription
  misc_feature: MA Experiment 20001556 PARAMETER Experiment Name: At_Drought_Soil_Dry_P Parameter: Age (day) Value: 26
  misc_feature: MA Experiment 20001556 PARAMETER Experiment Name: At_Drought_Soil_Dry_P Parameter: Organism Value: A. thaliana
  misc_feature: MA Experiment 20001556 PARAMETER Experiment Name: At_Drought_Soil_Dry_P Parameter: Plant Line Value: WS
  misc_feature: MA Experiment 20001556 PARAMETER Experiment Name: At_Drought_Soil_Dry_P Parameter: Post Timepoint (hr) Value: None
  misc_feature: MA Experiment 20001556 PARAMETER Experiment Name: At_Drought_Soil_Dry_P Parameter: Post-Treatment Value: None
  misc_feature: MA Experiment 20001556 PARAMETER Experiment Name: At_Drought_Soil_Dry_P Parameter: Timepoint (day) Value: 12
  misc_feature: MA Experiment 20001556 PARAMETER Experiment Name: At_Drought_Soil_Dry_P Parameter: Treatment Value: Drought vs. No Drought
  misc_feature: MA Experiment ID: 20001757 Result: Down-regulated in Transcription
  misc_feature: MA Experiment 20001757 PARAMETER Experiment Name: At_50mM_NH4NO3_L-to-H_P Parameter: Timepoint (hr) Value: 6
  misc_feature: MA Experiment 20001757 PARAMETER Experiment Name: At_50mM_NH4NO3_L-to-H_P Parameter: Tissue Value: Leaf
  misc_feature: MA Experiment 20001757 PARAMETER Experiment Name: At_50mM_NH4NO3_L-to-H_P Parameter: Treatment Value: 50mM NH4NO3 vs 100mM Mannitol
  misc_feature: MA Experiment ID: 20001761 Result: Down-regulated in Transcription
  misc_feature: MA Experiment 20001761 PARAMETER Experiment Name: At_50mM_NH4NO3_L-to-H_P Parameter: Timepoint (hr) Value: 4
  misc_feature: MA Experiment 20001761 PARAMETER Experiment Name: At_50mM_NH4NO3_L-to-H_P Parameter: Tissue Value: Siliques
  misc_feature: MA Experiment 20001761 PARAMETER Experiment Name: At_50mM_NH4NO3_L-to-H_P Parameter: Treatment Value: 50mM NH4NO3 vs 100mM Mannitol
  misc_feature: MA Experiment ID: 20001904 Result: Up-regulated in Transcription
  misc_feature: MA Experiment 20001904 PARAMETER Experiment Name: At_Drought_Reproduction_P Parameter: Age (day) Value: 37
  misc_feature: MA Experiment 20001904 PARAMETER Experiment Name: At_Drought_Reproduction_P Parameter: Organism Value: A. thaliana
  misc_feature: MA Experiment 20001904 PARAMETER Experiment Name: At_Drought_Reproduction_P Parameter: Plant Line Value: WS
  misc_feature: MA Experiment 20001904 PARAMETER Experiment Name: At_Drought_Reproduction_P Parameter: Timepoint (day) Value: 7
  misc_feature: MA Experiment 20001904 PARAMETER Experiment Name: At_Drought_Reproduction_P Parameter: Tissue Value: Rosettes
  misc_feature: MA Experiment 20001904 PARAMETER Experiment Name: At_Drought_Reproduction_P Parameter: Treatment Value: Drought vs. No Drought
atggtgaatttcaactcagccgttaacatacttgaggtggtccaagttagcccgccgtcttctaactcgctcacactcccactcacttactttgacttgggttggctcaaacttcaccccgttgaccgagttcttttctaccacgtccccgagctgactcgctcttctctcatctctaaacttaagtcctctctctcagccacgctcctccactatctcccactcgccggccgcctcgtgtgggattcaatcaaaaccaaaccatccattgtctattctcctgacgacaaagatgccgtgtatctcacggtagctgagtctaacggtgacctttcccatctttccggagatgaacctcgtcccgccacggagtttcattctttagtccctgagttaccggtttccgacgaatcagctcgcgttctcgccgttcaggtaacgtttttcccaaaccaaggattttctctcggcgtaaccgcacatcatgccgttttagatggtaaaacaacagccatgtttctcaaagcatgggctcacaactgtaaacaagaacaagaagctctgccacacgatctagtaccgtctttagatcgtatcattgttcaagacccaacgggactcgagacaaaactcttgaaccggtggatatcagcttccaacaacaaaccaagcttaaaactgtttccttccaaaataattggatccgatattctccgagtcacgtaccggttaactcgagaagacatcaagaagctacgtgaacgagtggagaccgagtcacacgctaagcagctccgtttgtcgacttttgtcattacttacgcttacgttataacatgcatggtgaagatgcgtggaggtgacccgacccggtttgtgtgcgttggttttgcatcagactttcggtcacggttaaaccctccgttaccgccgacgttcttcgggaactgcattgtcgggtcgggagatttcgacgtgaaagcagaaccaatattggaagaaggagaaggaaaaggtttcatcacggcggtggagactttgaccggatgggtcaacggattgtgtccggagaatatagagaagaatatgcttttaccgtttgaagcgtttaagaggatggaaccgggaaggcaaatgatatcggttgctgggtcgacccggttagggatttacgggtctgattttgggtggggaaaaccggtcaaggtagagattgtgacgattgataaggatgcttcggtttcattgtcggagagtggagatggaagtggtggtgttgaggttggtgtttgtttgaagaaagatgatgtggaacgttttggttcattattctccatcgggttggaataa

SEQ ID NO: 97273 - protein, 449 aa, Arabidopsis thaliana
  peptide (1)..(449): Ceres Seq. ID no. 12736867
  misc_feature (4)..(447): Pfam Name: Transferase family Pfam Description: Transferase family
  misc_feature (1)..(449): Homolog of NCBI NO: 15230013 NR Description: Anthocyanin 5-aromatic acyltransferase, putative; id: At3g29590.1 [Arabidopsis thaliana]
  misc_feature (1)..(449): Homolog of NCBI NO: 15450469 NR Description: AT5g39050/MXF12_60 [Arabidopsis thaliana]
  misc_feature (1)..(449): Homolog of NCBI NO: 10177550 NR Description: anthocyanin acyltransferase-like protein
  misc_feature (5)..(449): Homolog of NCBI NO: 15241632 NR Description: acyltransferase -like protein; protein id:
  misc_feature (8)..(448): Homolog of NCBI NO: 15230048 NR Description: anthocyanin 5-aromatic acyltransferase, putative; id: At3g29670.1 [Arabidopsis thaliana]
  misc_feature (7)..(449): Homolog of NCBI NO: 15230034 NR Description: hypothetical protein; protein id: At3g29635.1
  misc_feature (7)..(445): Homolog of NCBI NO: 15230049 NR Description: anthocyanin 5-aromatic acyltransferase, putative; id: At3g29680.1 [Arabidopsis thaliana]
  misc_feature (7)..(444): Homolog of NCBI NO: 15240152 NR Description: anthocyanin 5-aromatic acyltransferase - like protein id: At5g61160.1, supported by cDNA: gi_14335039
  misc_feature (6)..(438): Homolog of NCBI NO: 21593292 NR Description: acyltransferase-like protein [Arabidopsis
  misc_feature (1)..(318): Homolog of NCBI NO: 18421824 NR Description: acyltransferase - like protein; protein id:
MVNFNSAVNILEVVQVSPPSSNSLTLPLTYFDLGWLKLHPVDRVLFYHVPELTRSSLISKLKSSLSATLLHYLPLAGRLVWDSIKTKPSIVYSPDDKDAVYLTVAESNGDLSHLSGDEPRPATEFHSLVPELPVSDESARVLAVQVTFFPNQGFSLGVTAHHAVLDGKTTAMFLKAWAHNCKQEQEALPHDLVPSLDRIIVQDPTGLETKLLNRWISASNNKPSLKLFPSKIIGSDILRVTYRLTREDIKKLRERVETESHAKQLRLSTFVITYAYVITCMVKMRGGDPTRFVCVGFASDFRSRLNPPLPPTFFGNCIVGSGDFDVKAEPILEEGEGKGFITAVETLTGWVNGLCPENIEKNMLLPFEAFKRMEPGRQMISVAGSTRLGIYGSDFGWGKPVKVEIVTIDKDASVSLSESGDGSGGVEVGVCLKKDDVERFGSLFSIGLE

SEQ ID NO: 97274 - protein, 278 aa, Arabidopsis thaliana
  peptide (1)..(278): Ceres Seq. ID no. 12736868
  misc_feature (1)..(276): Pfam Name: Transferase family Pfam Description: Transferase family
  misc_feature (1)..(278): Homolog of NCBI NO: 15230013 NR Description: Anthocyanin 5-aromatic acyltransferase, putative; id: At3g29590.1 [Arabidopsis thaliana]
  misc_feature (1)..(278): Homolog of NCBI NO: 15450469 NR Description: AT5g39050/MXF12_60 [Arabidopsis thaliana]
  misc_feature (1)..(278): Homolog of NCBI NO: 10177550 NR Description: anthocyanin acyltransferase-like protein
  misc_feature (1)..(278): Homolog of NCBI NO: 15241632 NR Description: acyltransferase -like protein; protein id:
  misc_feature (1)..(277): Homolog of NCBI NO: 15230048 NR Description: anthocyanin 5-aromatic acyltransferase, putative; id: At3g29670.1 [Arabidopsis thaliana]
  misc_feature (1)..(278): Homolog of NCBI NO: 15230034 NR Description: hypothetical protein; protein id: At3g29635.1
  misc_feature (1)..(274): Homolog of NCBI NO: 15230049 NR Description: anthocyanin 5-aromatic acyltransferase, putative; id: At3g29680.1 [Arabidopsis thaliana]
  misc_feature (1)..(273): Homolog of NCBI NO: 15240152 NR Description: anthocyanin 5-aromatic acyltransferase - like protein id: At5g61160.1, supported by cDNA: gi_14335039
  misc_feature (1)..(267): Homolog of NCBI NO: 21593292 NR Description: acyltransferase-like protein [Arabidopsis
  misc_feature (1)..(147): Homolog of NCBI NO: 18421824 NR Description: acyltransferase - like protein; protein id:
MFLKAWAHNCKQEQEALPHDLVPSLDRIIVQDPTGLETKLLNRWISASNNKPSLKLFPSKIIGSDILRVTYRLTREDIKKLRERVETESHAKQLRLSTFVITYAYVITCMVKMRGGDPTRFVCVGFASDFRSRLNPPLPPTFFGNCIVGSGDFDVKAEPILEEGEGKGFITAVETLTGWVNGLCPENIEKNMLLPFEAFKRMEPGRQMISVAGSTRLGIYGSDFGWGKPVKVEIVTIDKDASVSLSESGDGSGGVEVGVCLKKDDVERFGSLFSIGLE

SEQ ID NO: 97275 - DNA, 1347 bp, Arabidopsis thaliana
  misc_feature (1)..(1347): Ceres Seq. ID no. 12736873
  misc_feature: MA Experiment ID: 20000314 Result: Up-regulated in Transcription
  misc_feature: MA Experiment 20000314 PARAMETER Experiment Name: At_14day_Shoots-Roots_Sub_P Parameter: Age (day) Value: 14
  misc_feature: MA Experiment 20000314 PARAMETER Experiment Name: At_14day_Shoots-Roots_Sub_P Parameter: Organism Value: A. thaliana
  misc_feature: MA Experiment 20000314 PARAMETER Experiment Name: At_14day_Shoots-Roots_Sub_P Parameter: Plant Line Value: WS
  misc_feature: MA Experiment 20000314 PARAMETER Experiment Name: At_14day_Shoots-Roots_Sub_P Parameter: Tissue Value: Roots vs. Whole Plant
atggggtcaaagtttcatgcttttctttatccatggtttggttttggtcatatgattccgtatcttcatctagctaacaaattagctgaaaaaggtcatagggttactttcttggctcccaagaaagctcagaaacaactcgaacctctcaacttgttcccaaacagcattcacttcgagaatgttactcttcctcatgttgatggtctccctgttggcgcagagacaaccgcggatctcccgaactcatctaagagagtcctcgctgatgccatggatcttctacgcgaacagattgaagttaagattcgttctttgaaacctgacctaattttcttcgattttgttgattggattccacaaatggcaaaagaattaggaatcaaaagtgtaagttaccagatcatatcggcagcttttatagctatgtttttcgctcctcgtgctgaattaggttctcctccacctgggtttccttcatcaaaagtagcattacgtggacatgacgctaacatctattcactcttcgcaaacacccgcaaatttctctttgatcgagtcaccacaggccttaagaactgcgacgtcattgccataaggacatgtgcagaaatcgaaggtaacttatgtgatttcatcgaaagacaatgtcagagaaaagttctcttaaccggtccaatgttccttgatccacaagggaagagtggtaagccgctagaagatcgatggaataattggttaaacggatttgaaccaagctcggtagtgtactgtgcgtttggcacccatttctttttcgagatagatcaatttcaagaactctgtttaggaatggagctcacgggtctaccttttttggtagcggttatgccaccgagagggtcttcaacgattcaagaagcattaccagaagggttcgaagaacggattaaagggcgtggaattgtttggggaggatgggtggaacaacctttgatattgtctcatccatcaataggttgctttgtgaaccattgcgggttcggttcaatgtgggagtctttggttagtgattgccagattgtgtttattccacaattggttgatcaagttctcacaacgagattgttgaccgaagaactcgaggtctccgtgaaagtaaagagagatgaaattactggttggttttcgaaggagagcttgagggatacggtcaaatctgtgatggataaaaatagtgagattgggaatctagtgaggaggaatcataagaaactgaaggaaactttggttagtcctggattgttgagtagttatgctgataagtttgttgacgaattagagaatcatatccacagtaagaattga

SEQ ID NO: 97276 - protein, 448 aa, Arabidopsis thaliana
  peptide (1)..(448): Ceres Seq. ID no. 12736874
  misc_feature (1)..(448): Homolog of NCBI NO: 15230017 NR Description: flavonol 3-O-Glucosyltransferase, putative;
  misc_feature (1)..(446): Homolog of NCBI NO: 15223589 NR Description: putative indole-3-acetate protein id: At1g50580.1 [Arabidopsis thaliana]
  misc_feature (1)..(448): Homolog of NCBI NO: 15239523 NR Description: flavonol 3-O-glucosyltransferase-like protein; id: At5g53990.1, supported by cDNA: gi_17529305, supported by gi_20465446 [Arabidopsis thaliana] >gi|10177261|dbj|BAB10729.1|
  misc_feature (1)..(444): Homolog of NCBI NO: 15233903 NR Description: putative protein; protein id: At4g09500.1
  misc_feature (1)..(448): Homolog of NCBI NO: 15239525 NR Description: flavonol 3-O-glucosyltransferase-like protein;
  misc_feature (1)..(447): Homolog of NCBI NO: 15217796 NR Description: anthocyanidin-3-glucoside rhamnosyltransferase, protein id: At1g64920.1 [Arabidopsis thaliana]
  misc_feature (1)..(442): Homolog of NCBI NO: 15217773 NR Description: rhamnosyltransferase, putative; protein id:
  misc_feature (2)..(448): Homolog of NCBI NO: 15234195 NR Description: UDP rhamnose-anthocyanidin-3-glucoside
  misc_feature (2)..(442): Homolog of NCBI NO: 15234196 NR Description: UDP rhamnose--anthocyanidin-3-glucoside
  misc_feature (1)..(444): Homolog of NCBI NO: 15227766 NR Description: putative flavonol 3-O-glucosyltransferase;
MGSKFHAFLYPWFGFGHMIPYLHLANKLAEKGHRVTFLAPKKAQKQLEPLNLFPNSIHFENVTLPHVDGLPVGAETTADLPNSSKRVLADAMDLLREQIEVKIRSLKPDLIFFDFVDWIPQMAKELGIKSVSYQIISAAFIAMFFAPRAELGSPPPGFPSSKVALRGHDANIYSLFANTRKFLFDRVTTGLKNCDVIAIRTCAEIEGNLCDFIERQCQRKVLLTGPMFLDPQGKSGKPLEDRWNNWLNGFEPSSVVYCAFGTHFFFEIDQFQELCLGMELTGLPFLVAVMPPRGSSTIQEALPEGFEERIKGRGIVWGGWVEQPLILSHPSIGCFVNHCGFGSMWESLVSDCQIVFIPQLVDQVLTTRLLTEELEVSVKVKRDEITGWFSKESLRDTVKSVMDKNSEIGNLVRRNHKKLKETLVSPGLLSSYADKFVDELENHIHSKN

SEQ ID NO: 97277 - protein, 431 aa, Arabidopsis thaliana
  peptide (1)..(431): Ceres Seq. ID no. 12736875
  misc_feature (1)..(431): Homolog of NCBI NO: 15230017 NR Description: flavonol 3-O-Glucosyltransferase, putative;
  misc_feature (1)..(429): Homolog of NCBI NO: 15223589 NR Description: putative indole-3-acetate protein id: At1g50580.1 [Arabidopsis thaliana]
  misc_feature (1)..(431): Homolog of NCBI NO: 15239523 NR Description: flavonol 3-O-glucosyltransferase-like protein; id: At5g53990.1, supported by cDNA: gi_17529305, supported by gi_20465446 [Arabidopsis thaliana] >gi|10177261|dbj|BAB10729.1|
  misc_feature (1)..(427): Homolog of NCBI NO: 15233903 NR Description: putative protein; protein id: At4g09500.1
  misc_feature (1)..(431): Homolog of NCBI NO: 15239525 NR Description: flavonol 3-O-glucosyltransferase-like protein;
  misc_feature (1)..(430): Homolog of NCBI NO: 15217796 NR Description: anthocyanidin-3-glucoside rhamnosyltransferase, protein id: At1g64920.1 [Arabidopsis thaliana]
  misc_feature (1)..(425): Homolog of NCBI NO: 15217773 NR Description: rhamnosyltransferase, putative; protein id:
  misc_feature (1)..(431): Homolog of NCBI NO: 15234195 NR Description: UDP rhamnose-anthocyanidin-3-glucoside
  misc_feature (1)..(425): Homolog of NCBI NO: 15234196 NR Description: UDP rhamnose--anthocyanidin-3-glucoside
  misc_feature (1)..(427): Homolog of NCBI NO: 15227766 NR Description: putative flavonol 3-O-glucosyltransferase;
MIPYLHLANKLAEKGHRVTFLAPKKAQKQLEPLNLFPNSIHFENVTLPHVDGLPVGAETTADLPNSSKRVLADAMDLLREQIEVKIRSLKPDLIFFDFVDWIPQMAKELGIKSVSYQIISAAFIAMFFAPRAELGSPPPGFPSSKVALRGHDANIYSLFANTRKFLFDRVTTGLKNCDVIAIRTCAEIEGNLCDFIERQCQRKVLLTGPMFLDPQGKSGKPLEDRWNNWLNGFEPSSVVYCAFGTHFFFEIDQFQELCLGMELTGLPFLVAVMPPRGSSTIQEALPEGFEERIKGRGIVWGGWVEQPLILSHPSIGCFVNHCGFGSMWESLVSDCQIVFIPQLVDQVLTTRLLTEELEVSVKVKRDEITGWFSKESLRDTVKSVMDKNSEIGNLVRRNHKKLKETLVSPGLLSSYADKFVDELENHIHSKN

SEQ ID NO: 97278 - protein, 357 aa, Arabidopsis thaliana
  peptide (1)..(357): Ceres Seq. ID no. 12736876
  misc_feature (1)..(357): Homolog of NCBI NO: 15230017 NR Description: flavonol 3-O-Glucosyltransferase, putative;
  misc_feature (1)..(355): Homolog of NCBI NO: 15223589 NR Description: putative indole-3-acetate protein id: At1g50580.1 [Arabidopsis thaliana]
  misc_feature (1)..(357): Homolog of NCBI NO: 15239523 NR Description: flavonol 3-O-glucosyltransferase-like protein; id: At5g53990.1, supported by cDNA: gi_17529305, supported by gi_20465446 [Arabidopsis thaliana] >gi|10177261|dbj|BAB10729.1|
  misc_feature (1)..(353): Homolog of NCBI NO: 15233903 NR Description: putative protein; protein id: At4g09500.1
  misc_feature (1)..(357): Homolog of NCBI NO: 15239525 NR Description: flavonol 3-O-glucosyltransferase-like protein;
  misc_feature (1)..(356): Homolog of NCBI NO: 15217796 NR Description: anthocyanidin-3-glucoside rhamnosyltransferase, protein id: At1g64920.1 [Arabidopsis thaliana]
  misc_feature (1)..(351): Homolog of NCBI NO: 15217773 NR Description: rhamnosyltransferase, putative; protein id:
  misc_feature (1)..(357): Homolog of NCBI NO: 15234195 NR Description: UDP rhamnose-anthocyanidin-3-glucoside
  misc_feature (1)..(351): Homolog of NCBI NO: 15234196 NR Description: UDP rhamnose--anthocyanidin-3-glucoside
  misc_feature (1)..(353): Homolog of NCBI NO: 15227766 NR Description: putative flavonol 3-O-glucosyltransferase;
MDLLREQIEVKIRSLKPDLIFFDFVDWIPQMAKELGIKSVSYQIISAAFIAMFFAPRAELGSPPPGFPSSKVALRGHDANIYSLFANTRKFLFDRVTTGLKNCDVIAIRTCAEIEGNLCDFIERQCQRKVLLTGPMFLDPQGKSGKPLEDRWNNWLNGFEPSSVVYCAFGTHFFFEIDQFQELCLGMELTGLPFLVAVMPPRGSSTIQEALPEGFEERIKGRGIVWGGWVEQPLILSHPSIGCFVNHCGFGSMWESLVSDCQIVFIPQLVDQVLTTRLLTEELEVSVKVKRDEITGWFSKESLRDTVKSVMDKNSEIGNLVRRNHKKLKETLVSPGLLSSYADKFVDELENHIHSKN

SEQ ID NO: 97279 - DNA, 1377 bp, Arabidopsis thaliana
  misc_feature (1)..(1377): Ceres Seq. ID no. 12736877
  misc_feature: MA Experiment ID: 20000327 Result: Up-regulated in Transcription
  misc_feature: MA Experiment 20000327 PARAMETER Experiment Name: At_42deg_Heat_Sub_P Parameter: Age (day) Value: 14
  misc_feature: MA Experiment 20000327 PARAMETER Experiment Name: At_42deg_Heat_Sub_P Parameter: Organism Value: A. thaliana
  misc_feature: MA Experiment 20000327 PARAMETER Experiment Name: At_42deg_Heat_Sub_P Parameter: Plant Line Value: WS
  misc_feature: MA Experiment 20000327 PARAMETER Experiment Name: At_42deg_Heat_Sub_P Parameter: Temperature (deg C) Value: 42 vs. 22
  misc_feature: MA Experiment 20000327 PARAMETER Experiment Name: At_42deg_Heat_Sub_P Parameter: Timepoint (hr) Value: 1
  misc_feature: MA Experiment 20000327 PARAMETER Experiment Name: At_42deg_Heat_Sub_P Parameter: Tissue Value: Aerial
  misc_feature: MA Experiment ID: 20000328 Result: Up-regulated in Transcription
  misc_feature: MA Experiment 20000328 PARAMETER Experiment Name: At_42deg_Heat_Sub_P Parameter: Age (day) Value: 14
  misc_feature: MA Experiment 20000328 PARAMETER Experiment Name: At_42deg_Heat_Sub_P Parameter: Organism Value: A. thaliana
  misc_feature: MA Experiment 20000328 PARAMETER Experiment Name: At_42deg_Heat_Sub_P Parameter: Plant Line Value: WS
  misc_feature: MA Experiment 20000328 PARAMETER Experiment Name: At_42deg_Heat_Sub_P Parameter: Temperature (deg C) Value: 42 vs. 22
  misc_feature: MA Experiment 20000328 PARAMETER Experiment Name: At_42deg_Heat_Sub_P Parameter: Timepoint (hr) Value: 6
  misc_feature: MA Experiment 20000328 PARAMETER Experiment Name: At_42deg_Heat_Sub_P Parameter: Tissue Value: Aerial
atggcgctaaaggtaaccaagatctcccaagtcagcccagcaagtaactcgtccaatgactcagccaactcgatggttcttccactgacgttcttcgacttacgttggttacaattccatcccaccgaaagagttatcttctacaaactcatcaaagactcatctcttgagtccttcctctccgtgatcctccccaaacttgagctctctctctccatcgtccttcgtcactacctcccgctcgctggccgcctcacatggagctcacaagatcctaaacctagcatcatcgtctctccgaacgactatgtttccttgactgtcgcggagagtgatgctgatttctcccgtatctccggtaaagggatacgtcccgaatcggagatacgctctttggtgcccgagttatcgctttcttgtgactcaccttcggttctttctttgcaagtcactttgttccccaaccaagggttttgtattggtatcgcttctcatcattctgttatggacgggaaaacagtggttaggtttataaaatcatgggctcacatttgtaaacatggagccatggatttaccggaggatttgactccggttttagatcgtacggttatcaatgtccctgcaagtcttgatgcaaaaatcattgaacttttgtcatatttctcagaagtgaaagatagtttcagatcattgaagctgcttcctcccaaggagatcagccccgacctagtacggatctcgctcgagttgactcgagagaatatagagaaacttagggagcaagccaagagggagtcagctcgctctcatcatgagcttcacttgtcaacgttcgttgttgccaacgcgtatctttggacatgcttggtaaagacgcgtggaggagatgagaacagaccggtccgtttcatgtatgctgctgatttcaggaaccggttagatccaccggttcctgagatgtatttcgggaactgcgtgttcccgataggttgctttggttacaaggcgaatgtgtttttgggagaagatgggtttgttaatatggtcgaaattctaagtgattcggttagaagtattggtttacgaaagttggaaacaatttgcgaattgtacattaatggaacaaagagtgtgaaaccaggtacacagattggatccattgccggttcgaaccagtttgggctatacgggtcagatttcgggtggggaaaaccatgtaacagtgagattgcgtccattgaccgaaacgaggcgttttcgatgtcggagaggagggatgaacccggaggtgtggagatcggcttgtgtttgaagaaatgtgagatggacatatttatttatctgtttcaaaatggtttagaaatggttctttag

SEQ ID NO: 97280 - protein, 458 aa, Arabidopsis thaliana
  peptide (1)..(458): Ceres Seq. ID no. 12736878
  misc_feature (3)..(453): Pfam Name: Transferase family Pfam Description: Transferase family
  misc_feature (1)..(458): Homolog of NCBI NO: 15230034 NR Description: hypothetical protein; protein id: At3g29635.1
  misc_feature (1)..(456): Homolog of NCBI NO: 15230049 NR Description: anthocyanin 5-aromatic acyltransferase, putative; id: At3g29680.1 [Arabidopsis thaliana]
  misc_feature (1)..(450): Homolog of NCBI NO: 15240152 NR Description: anthocyanin 5-aromatic acyltransferase - like protein id: At5g61160.1, supported by cDNA: gi_14335039
  misc_feature (1)..(454): Homolog of NCBI NO: 15230048 NR Description: anthocyanin 5-aromatic acyltransferase, putative; id: At3g29670.1 [Arabidopsis thaliana]
  misc_feature (2)..(455): Homolog of NCBI NO: 15450469 NR Description: AT5g39050/MXF12_60 [Arabidopsis thaliana]
  misc_feature (2)..(455): Homolog of NCBI NO: 15241632 NR Description: acyltransferase -like protein; protein id:
  misc_feature (2)..(455): Homolog of NCBI NO: 10177550 NR Description: anthocyanin acyltransferase-like protein
  misc_feature (2)..(455): Homolog of NCBI NO: 15230013 NR Description: Anthocyanin 5-aromatic acyltransferase, putative; id: At3g29590.1 [Arabidopsis thaliana]
  misc_feature (2)..(449): Homolog of NCBI NO: 21593292 NR Description: acyltransferase-like protein [Arabidopsis
  misc_feature (2)..(449): Homolog of NCBI NO: 15241631 NR Description: acyltransferase -like protein; protein id: supported by cDNA: 37806. [Arabidopsis thaliana]
MALKVTKISQVSPASNSSNDSANSMVLPLTFFDLRWLQFHPTERVIFYKLIKDSSLESFLSVILPKLELSLSIVLRHYLPLAGRLTWSSQDPKPSIIVSPNDYVSLTVAESDADFSRISGKGIRPESEIRSLVPELSLSCDSPSVLSLQVTLFPNQGFCIGIASHHSVMDGKTVVRFIKSWAHICKHGAMDLPEDLTPVLDRTVINVPASLDAKIIELLSYFSEVKDSFRSLKLLPPKEISPDLVRISLELTRENIEKLREQAKRESARSHHELHLSTFVVANAYLWTCLVKTRGGDENRPVRFMYAADFRNRLDPPVPEMYFGNCVFPIGCFGYKANVFLGEDGFVNMVEILSDSVRSIGLRKLETICELYINGTKSVKPGTQIGSIAGSNQFGLYGSDFGWGKPCNSEIASIDRNEAFSMSERRDEPGGVEIGLCLKKCEMDIFIYLFQNGLEMVL

SEQ ID NO: 97281 - protein, 434 aa, Arabidopsis thaliana
  peptide (1)..(434): Ceres Seq. ID no. 12736879
  misc_feature (1)..(429): Pfam Name: Transferase family Pfam Description: Transferase family
  misc_feature (1)..(434): Homolog of NCBI NO: 15230034 NR Description: hypothetical protein; protein id: At3g29635.1
  misc_feature (1)..(432): Homolog of NCBI NO: 15230049 NR Description: anthocyanin 5-aromatic acyltransferase, putative; id: At3g29680.1 [Arabidopsis thaliana]
  misc_feature (1)..(426): Homolog of NCBI NO: 15240152 NR Description: anthocyanin 5-aromatic acyltransferase - like protein id: At5g61160.1, supported by cDNA: gi_14335039
  misc_feature (1)..(430): Homolog of NCBI NO: 15230048 NR Description: anthocyanin 5-aromatic acyltransferase, putative; id: At3g29670.1 [Arabidopsis thaliana]
  misc_feature (1)..(431): Homolog of NCBI NO: 15450469 NR Description: AT5g39050/MXF12_60 [Arabidopsis thaliana]
  misc_feature (1)..(431): Homolog of NCBI NO: 15241632 NR Description: acyltransferase -like protein; protein id:
  misc_feature (1)..(431): Homolog of NCBI NO: 10177550 NR Description: anthocyanin acyltransferase-like protein
  misc_feature (1)..(431): Homolog of NCBI NO: 15230013 NR Description: Anthocyanin 5-aromatic acyltransferase, putative; id: At3g29590.1 [Arabidopsis thaliana]
  misc_feature (1)..(425): Homolog of NCBI NO: 21593292 NR Description: acyltransferase-like protein [Arabidopsis
  misc_feature (1)..(425): Homolog of NCBI NO: 15241631 NR Description: acyltransferase -like protein; protein id: supported by cDNA: 37806. [Arabidopsis thaliana]
MVLPLTFFDLRWLQFHPTERVIFYKLIKDSSLESFLSVILPKLELSLSIVLRHYLPLAGRLTWSSQDPKPSIIVSPNDYVSLTVAESDADFSRISGKGIRPESEIRSLVPELSLSCDSPSVLSLQVTLFPNQGFCIGIASHHSVMDGKTVVRFIKSWAHICKHGAMDLPEDLTPVLDRTVINVPASLDAKIIELLSYFSEVKDSFRSLKLLPPKEISPDLVRISLELTRENIEKLREQAKRESARSHHELHLSTFVVANAYLWTCLVKTRGGDENRPVRFMYAADFRNRLDPPVPEMYFGNCVFPIGCFGYKANVFLGEDGFVNMVEILSDSVRSIGLRKLETICELYINGTKSVKPGTQIGSIAGSNQFGLYGSDFGWGKPCNSEIASIDRNEAFSMSERRDEPGGVEIGLCLKKCEMDIFIYLFQNGLEMVL

SEQ ID NO: 97282 - protein, 290 aa, Arabidopsis thaliana
  peptide (1)..(290): Ceres Seq. ID no. 12736880
  misc_feature (1)..(285): Pfam Name: Transferase family Pfam Description: Transferase family
  misc_feature (1)..(290): Homolog of NCBI NO: 15230034 NR Description: hypothetical protein; protein id: At3g29635.1
  misc_feature (1)..(288): Homolog of NCBI NO: 15230049 NR Description: anthocyanin 5-aromatic acyltransferase, putative; id: At3g29680.1 [Arabidopsis thaliana]
  misc_feature (1)..(282): Homolog of NCBI NO: 15240152 NR Description: anthocyanin 5-aromatic acyltransferase - like protein id: At5g61160.1, supported by cDNA: gi_14335039
  misc_feature (1)..(286): Homolog of NCBI NO: 15230048 NR Description: anthocyanin 5-aromatic acyltransferase, putative; id: At3g29670.1 [Arabidopsis thaliana]
  misc_feature (1)..(287): Homolog of NCBI NO: 15450469 NR Description: AT5g39050/MXF12_60 [Arabidopsis thaliana]
  misc_feature (1)..(287): Homolog of NCBI NO: 15241632 NR Description: acyltransferase -like protein; protein id:
  misc_feature (1)..(287): Homolog of NCBI NO: 10177550 NR Description: anthocyanin acyltransferase-like protein
  misc_feature (1)..(287): Homolog of NCBI NO: 15230013 NR Description: Anthocyanin 5-aromatic acyltransferase, putative; id: At3g29590.1 [Arabidopsis thaliana]
  misc_feature (1)..(281): Homolog of NCBI NO: 21593292 NR Description: acyltransferase-like protein [Arabidopsis
  misc_feature (1)..(281): Homolog of NCBI NO: 15241631 NR Description: acyltransferase -like protein; protein id: supported by cDNA: 37806. [Arabidopsis thaliana]
MDGKTVVRFIKSWAHICKHGAMDLPEDLTPVLDRTVINVPASLDAKIIELLSYFSEVKDSFRSLKLLPPKEISPDLVRISLELTRENIEKLREQAKRESARSHHELHLSTFVVANAYLWTCLVKTRGGDENRPVRFMYAADFRNRLDPPVPEMYFGNCVFPIGCFGYKANVFLGEDGFVNMVEILSDSVRSIGLRKLETICELYINGTKSVKPGTQIGSIAGSNQFGLYGSDFGWGKPCNSEIASIDRNEAFSMSERRDEPGGVEIGLCLKKCEMDIFIYLFQNGLEMVL

SEQ ID NO: 97283 - DNA, 1372 bp, Arabidopsis thaliana
  misc_feature (1)..(1372): Ceres Seq. ID no. 12736923
  misc_feature: MA Experiment ID: 108461 Result: Up-regulated in Transcription
  misc_feature: MA Experiment 108461 PARAMETER Experiment Name: At_Germinating_Seeds_cDNA_P Parameter: Age (day) Value: 1 vs. 0
  misc_feature: MA Experiment 108461 PARAMETER Experiment Name: At_Germinating_Seeds_cDNA_P Parameter: Tissue Value: Germinating Seeds
  misc_feature: MA Experiment ID: 108462 Result: Up-regulated in Transcription
  misc_feature: MA Experiment 108462 PARAMETER Experiment Name: At_Germinating_Seeds_cDNA_P Parameter: Age (day) Value: 2 vs. 0
  misc_feature: MA Experiment 108462 PARAMETER Experiment Name: At_Germinating_Seeds_cDNA_P Parameter: Tissue Value: Germinating Seeds
  misc_feature: MA Experiment ID: 108463 Result: Up-regulated in Transcription
  misc_feature: MA Experiment 108463 PARAMETER Experiment Name: At_Germinating_Seeds_cDNA_P Parameter: Age (day) Value: 3 vs. 0
  misc_feature: MA Experiment 108463 PARAMETER Experiment Name: At_Germinating_Seeds_cDNA_P Parameter: Tissue Value: Germinating Seeds
  misc_feature: MA Experiment ID: 108464 Result: Up-regulated in Transcription
  misc_feature: MA Experiment 108464 PARAMETER Experiment Name: At_Germinating_Seeds_cDNA_P Parameter: Age (day) Value: 4 vs. 0
  misc_feature: MA Experiment 108464 PARAMETER Experiment Name: At_Germinating_Seeds_cDNA_P Parameter: Tissue Value: Germinating Seeds
  misc_feature: MA Experiment ID: 20000306 Result: Up-regulated in Transcription
  misc_feature: MA Experiment 20000306 PARAMETER Experiment Name: At_Germinating_Seeds_Sub_P Parameter: Age (hr) Value: 6 vs. 0
  misc_feature: MA Experiment 20000306 PARAMETER Experiment Name: At_Germinating_Seeds_Sub_P Parameter: Organism Value: A. thaliana
  misc_feature: MA Experiment 20000306 PARAMETER Experiment Name: At_Germinating_Seeds_Sub_P Parameter: Plant Line Value: WS
  misc_feature: MA Experiment 20000306 PARAMETER Experiment Name: At_Germinating_Seeds_Sub_P Parameter: Tissue Value: Germinating Seeds
  misc_feature: MA Experiment ID: 20000307 Result: Up-regulated in Transcription
  misc_feature: MA Experiment 20000307 PARAMETER Experiment Name: At_Germinating_Seeds_Sub_P Parameter: Age (hr) Value: 24 vs. 0
  misc_feature: MA Experiment 20000307 PARAMETER Experiment Name: At_Germinating_Seeds_Sub_P Parameter: Organism Value: A. thaliana
  misc_feature: MA Experiment 20000307 PARAMETER Experiment Name: At_Germinating_Seeds_Sub_P Parameter: Plant Line Value: WS
  misc_feature: MA Experiment 20000307 PARAMETER Experiment Name: At_Germinating_Seeds_Sub_P Parameter: Tissue Value: Germinating Seeds
  misc_feature: MA Experiment ID: 20000327 Result: Down-regulated in Transcription
  misc_feature: MA Experiment 20000327 PARAMETER Experiment Name: At_42deg_Heat_Sub_P Parameter: Age (day) Value: 14
  misc_feature: MA Experiment 20000327 PARAMETER Experiment Name: At_42deg_Heat_Sub_P Parameter: Organism Value: A. thaliana
  misc_feature: MA Experiment 20000327 PARAMETER Experiment Name: At_42deg_Heat_Sub_P Parameter: Plant Line Value: WS
  misc_feature: MA Experiment 20000327 PARAMETER Experiment Name: At_42deg_Heat_Sub_P Parameter: Temperature (deg C) Value: 42 vs. 22
  misc_feature: MA Experiment 20000327 PARAMETER Experiment Name: At_42deg_Heat_Sub_P Parameter: Timepoint (hr) Value: 1
  misc_feature: MA Experiment 20000327 PARAMETER Experiment Name: At_42deg_Heat_Sub_P Parameter: Tissue Value: Aerial
  misc_feature: MA Experiment ID: 20000328 Result: Down-regulated in Transcription
  misc_feature: MA Experiment 20000328 PARAMETER Experiment Name: At_42deg_Heat_Sub_P Parameter: Age (day) Value: 14
  misc_feature: MA Experiment 20000328 PARAMETER Experiment Name: At_42deg_Heat_Sub_P Parameter: Organism Value: A. thaliana
  misc_feature: MA Experiment 20000328 PARAMETER Experiment Name: At_42deg_Heat_Sub_P Parameter: Plant Line Value: WS
  misc_feature: MA Experiment 20000328 PARAMETER Experiment Name: At_42deg_Heat_Sub_P Parameter: Temperature (deg C) Value: 42 vs. 22
  misc_feature: MA Experiment 20000328 PARAMETER Experiment Name: At_42deg_Heat_Sub_P Parameter: Timepoint (hr) Value: 6
  misc_feature: MA Experiment 20000328 PARAMETER Experiment Name: At_42deg_Heat_Sub_P Parameter: Tissue Value: Aerial
atgactacaaaacgcatagacagagatctcccatcttccgacgatccttcctccgctaaacgccgtatcgaattccccgaagaaacactcgaaaacgacggtgctgccgcaatcaaactccttagcttactcctccaatgcgccgaatacgtagctactgatcatctccgtgaagcttcaacacttttatccgaaatctccgagatatgttctccgttcggttcctcgccggagcgagtcgtcgcttacttcgctcaagcgctacaaacgcgcgtgatcagctcttacctctccggcgcgtgttctcccctctccgagaaaccactcactgttgttcagtctcagaaaatcttctccgccttgcagacttataactccgttagtcctctgatcaaattctcacatttcacggcgaatcaagccatttttcaggcgcttgacggagaagattccgttcatatcatcgatctcgatgttatgcaaggtcttcaatggccggctctatttcacatcctcgcttcacgtcctcgaaaactccgatcaattcgaatcaccggatttggttcctcctccgatctactcgcttcaactggccggagactcgccgatttcgcatcatcgttaaacctccctttcgaatttcatccaattgaaggcataatcggaaacctaatcgatccgagccaactcgcaacgagacaaggagaagctgtggtggttcattggatgcagcaccggttatatgatgttacagggaacaatctcgagacgttggagattctacggaggctgaaaccgaatctgatcacggtggtggagcaagaattgagctacgacgatggaggaagctttttaggaagattcgtggaggctttgcattattatagcgcgttgtttgacgcgctaggagatggattgggtgaagagagtggtgagagattcacggtggagcagattgttttggggacggagataagaaacattgtggcgcacggaggaggaagaaggaagagaatgaagtggaaagaagaactgagccgggtcgggtttagacctgtttcgcttcggggtaacccggcgacacaagcgggtttattgttgggtatgttaccgtggaatggatatactttggttgaagagaatggaaccctccgtcttggctggaaggatctctcgcttttgactgcctctgcctggaaatctcagccgttcgattgattttatttttattttataatgcaaactgcaaagtgatcattaagattttttgttttgaaaatatttccaaacaaattacgataattacgataaaaaaaagtcttcattgacgcaaaaagttgttgatattgagaatgagaaggttgttgatact

SEQ ID NO: 97284 - protein, 405 aa, Arabidopsis thaliana
  peptide (1)..(405): Ceres Seq. ID no. 12736924
  misc_feature (14)..(314): Pfam Name: GRAS family transcription factor Pfam Description: GRAS family transcription factor
  misc_feature (1)..(405): Homolog of NCBI NO: 15238234 NR Description: SCARECROW gene regulator-like protein; protein At5g41920.1 [Arabidopsis thaliana] >gi|9757937|dbj|BAB08425.1|
  misc_feature (29)..(405): Homolog of NCBI NO: 34899818 NR Description: putative SCARECROW protein [Oryza sativa cultivar- group)] >gi|27817898|dbj|BAC55664.1| putative SCARECROW
  misc_feature (20)..(399): Homolog of NCBI NO: 15232451 NR Description: SCARECROW1; protein id: At3g54220.1, supported by gi_19423877, supported by cDNA: gi_21281200 [Arabidopsis
  misc_feature (20)..(399): Homolog of NCBI NO: 11291689 NR Description: SCARECROW protein [imported] - Arabidopsis
  misc_feature (20)..(400): Homolog of NCBI NO: 13365610 NR Description: SCARECROW [Pisum sativum]
  misc_feature (17)..(400): Homolog of NCBI NO: 10178637 NR Description: SCARECROW [Zea mays]
  misc_feature (227)..(405): Homolog of NCBI NO: 34393287 NR Description: SCARECROW protein-like protein [Oryza sativa
  misc_feature (29)..(87): Homolog of NCBI NO: 34393287 NR Description: SCARECROW protein-like protein [Oryza sativa
  misc_feature (38)..(400): Homolog of NCBI NO: 15228553 NR Description: RGA1-like protein; protein id: At3g03450.1
  misc_feature (38)..(400): Homolog of NCBI NO: 26451075 NR Description: putative RGA1 [Arabidopsis thaliana]
MTTKRIDRDLPSSDDPSSAKRRIEFPEETLENDGAAAIKLLSLLLQCAEYVATDHLREASTLLSEISEICSPFGSSPERVVAYFAQALQTRVISSYLSGACSPLSEKPLTVVQSQKIFSALQTYNSVSPLIKFSHFTANQAIFQALDGEDSVHIIDLDVMQGLQWPALFHILASRPRKLRSIRITGFGSSSDLLASTGRRLADFASSLNLPFEFHPIEGIIGNLIDPSQLATRQGEAVVVHWMQHRLYDVTGNNLETLEILRRLKPNLITVVEQELSYDDGGSFLGRFVEALHYYSALFDALGDGLGEESGERFTVEQIVLGTEIRNIVAHGGGRRKRMKWKEELSRVGFRPVSLRGNPATQAGLLLGMLPWNGYTLVEENGTLRLGWKDLSLLTASAWKSQPFD

SEQ ID NO: 97285 - protein, 246 aa, Arabidopsis thaliana
  peptide (1)..(246): Ceres Seq. ID no. 12736925
  misc_feature (1)..(155): Pfam Name: GRAS family transcription factor Pfam Description: GRAS family transcription factor
  misc_feature (1)..(246): Homolog of NCBI NO: 15238234 NR Description: SCARECROW gene regulator-like protein; protein At5g41920.1 [Arabidopsis thaliana] >gi|9757937|dbj|BAB08425.1|
  misc_feature (1)..(246): Homolog of NCBI NO: 34899818 NR Description: putative SCARECROW protein [Oryza sativa cultivar- group)] >gi|27817898|dbj|BAC55664.1| putative SCARECROW
  misc_feature (1)..(240): Homolog of NCBI NO: 15232451 NR Description: SCARECROW1; protein id: At3g54220.1, supported by gi_19423877, supported by cDNA: gi_21281200 [Arabidopsis
  misc_feature (1)..(240): Homolog of NCBI NO: 11291689 NR Description: SCARECROW protein [imported] - Arabidopsis
  misc_feature (1)..(241): Homolog of NCBI NO: 13365610 NR Description: SCARECROW [Pisum sativum]
  misc_feature (1)..(241): Homolog of NCBI NO: 10178637 NR Description: SCARECROW [Zea mays]
  misc_feature (68)..(246): Homolog of NCBI NO: 34393287 NR Description: SCARECROW protein-like protein [Oryza sativa
  misc_feature (1)..(241): Homolog of NCBI NO: 15228553 NR Description: RGA1-like protein; protein id: At3g03450.1
  misc_feature (1)..(241): Homolog of NCBI NO: 26451075 NR Description: putative RGA1 [Arabidopsis thaliana]
  misc_feature (1)..(241): Homolog of NCBI NO: 20334379 NR Description: GAI-like protein 1 [Vitis vinifera]
MQGLQWPALFHILASRPRKLRSIRITGFGSSSDLLASTGRRLADFASSLNLPFEFHPIEGIIGNLIDPSQLATRQGEAVVVHWMQHRLYDVTGNNLETLEILRRLKPNLITVVEQELSYDDGGSFLGRFVEALHYYSALFDALGDGLGEESGERFTVEQIVLGTEIRNIVAHGGGRRKRMKWKEELSRVGFRPVSLRGNPATQAGLLLGMLPWNGYTLVEENGTLRLGWKDLSLLTASAWKSQPFD

SEQ ID NO: 97286 - DNA, 2211 bp, Arabidopsis thaliana
  misc_feature (1)..(2211): Ceres Seq. ID no. 12736934
  misc_feature: MA Experiment ID: 108434 Result: Up-regulated in Transcription
  misc_feature: MA Experiment 108434 PARAMETER Experiment Name: At_Root_Tips_cDNA_P Parameter: Tissue Value: Root Tips
  misc_feature: MA Experiment ID: 108463 Result: Down-regulated in Transcription
  misc_feature: MA Experiment 108463 PARAMETER Experiment Name: At_Germinating_Seeds_cDNA_P Parameter: Age (day) Value: 3 vs. 0
  misc_feature: MA Experiment 108463 PARAMETER Experiment Name: At_Germinating_Seeds_cDNA_P Parameter: Tissue Value: Germinating Seeds
  misc_feature: MA Experiment ID: 108469 Result: Up-regulated in Transcription
  misc_feature: MA Experiment ID: 108573 Result: Down-regulated in Transcription
  misc_feature: MA Experiment 108573 PARAMETER Experiment Name: At_Drought_cDNA_P Parameter: Timepoint (hr) Value: 6
  misc_feature: MA Experiment 108573 PARAMETER Experiment Name: At_Drought_cDNA_P Parameter: Tissue Value: Aerial
  misc_feature: MA Experiment 108573 PARAMETER Experiment Name: At_Drought_cDNA_P Parameter: Treatment Value: Drought vs. No Drought
  misc_feature: MA Experiment ID: 108576 Result: Up-regulated in Transcription
  misc_feature: MA Experiment 108576 PARAMETER Experiment Name: At_42deg_Heat_cDNA_P Parameter: Temperature (deg C) Value: 42 vs. 22
  misc_feature: MA Experiment 108576 PARAMETER Experiment Name: At_42deg_Heat_cDNA_P Parameter: Timepoint (hr) Value: 1
  misc_feature: MA Experiment 108576 PARAMETER Experiment Name: At_42deg_Heat_cDNA_P Parameter: Tissue Value: Aerial
  misc_feature: MA Experiment ID: 108577 Result: Up-regulated in Transcription
  misc_feature: MA Experiment 108577 PARAMETER Experiment Name: At_42deg_Heat_cDNA_P Parameter: Temperature (deg C) Value: 42 vs. 22
  misc_feature: MA Experiment 108577 PARAMETER Experiment Name: At_42deg_Heat_cDNA_P Parameter: Timepoint (hr) Value: 6
  misc_feature: MA Experiment 108577 PARAMETER Experiment Name: At_42deg_Heat_cDNA_P Parameter: Tissue Value: Aerial
  misc_feature: MA Experiment ID: 108595 Result: Up-regulated in Transcription
  misc_feature: MA Experiment 108595 PARAMETER Experiment Name: At_Ler-pi_Ovule_cDNA_P Parameter: Plant Line Value: null
  misc_feature: MA Experiment ID: 108668 Result: Up-regulated in Transcription
  misc_feature: MA Experiment 108668 PARAMETER Experiment Name: At_2mM_SA_cDNA_P Parameter: Plant Line Value: WS
  misc_feature: MA Experiment 108668 PARAMETER Experiment Name: At_2mM_SA_cDNA_P Parameter: Timepoint (hr) Value: 6
  misc_feature: MA Experiment 108668 PARAMETER Experiment Name: At_2mM_SA_cDNA_P Parameter: Treatment Value: 2mM SA vs. No Treatment
  misc_feature: MA Experiment ID: 20000086 Result: Up-regulated in Transcription
  misc_feature: MA Experiment 20000086 PARAMETER Experiment Name: At_100uM_ABA_Mutants_cDNA_P Parameter: Plant Line Value: CS22
  misc_feature: MA Experiment 20000086 PARAMETER Experiment Name: At_100uM_ABA_Mutants_cDNA_P Parameter: Timepoint (hr) Value: 6
  misc_feature: MA Experiment 20000086 PARAMETER Experiment Name: At_100uM_ABA_Mutants_cDNA_P Parameter: Tissue Value: Aerial
  misc_feature: MA Experiment 20000086 PARAMETER Experiment Name: At_100uM_ABA_Mutants_cDNA_P Parameter: Treatment Value: 100uM ABA vs. No Treatment
  misc_feature: MA Experiment ID: 20000089 Result: Up-regulated in Transcription
  misc_feature: MA Experiment ID: 20000090 Result: Up-regulated in Transcription
  misc_feature: MA Experiment ID: 20000093 Result: Up-regulated in Transcription
  misc_feature: MA Experiment 20000093 PARAMETER Experiment Name: At_42deg_Heat_cDNA_P Parameter: Temperature (deg C) Value: 42 vs. 22
  misc_feature: MA Experiment 20000093 PARAMETER Experiment Name: At_42deg_Heat_cDNA_P Parameter: Timepoint (hr) Value: 0.5
  misc_feature: MA Experiment 20000093 PARAMETER Experiment Name: At_42deg_Heat_cDNA_P Parameter: Tissue Value: Aerial
  misc_feature: MA Experiment ID: 20000111 Result: Up-regulated in Transcription
  misc_feature: MA Experiment 20000111 PARAMETER Experiment Name: At_42deg_Heat_cDNA_P Parameter: Temperature (deg C) Value: 42 vs. 22
  misc_feature: MA Experiment 20000111 PARAMETER Experiment Name: At_42deg_Heat_cDNA_P Parameter: Timepoint (hr) Value: 6
  misc_feature: MA Experiment 20000111 PARAMETER Experiment Name: At_42deg_Heat_cDNA_P Parameter: Tissue Value: Aerial
  misc_feature: MA Experiment ID: 20000112 Result: Up-regulated in Transcription
  misc_feature: MA Experiment 20000112 PARAMETER Experiment Name: At_42deg_Heat_cDNA_P Parameter: Temperature (deg C) Value: 42 vs. 22
  misc_feature: MA Experiment 20000112 PARAMETER Experiment Name: At_42deg_Heat_cDNA_P Parameter: Timepoint (hr) Value: 2
  misc_feature: MA Experiment 20000112 PARAMETER Experiment Name: At_42deg_Heat_cDNA_P Parameter: Tissue Value: Aerial
  misc_feature: MA Experiment ID: 20000224 Result: Up-regulated in Transcription
  misc_feature: MA Experiment ID: 20000327 Result: Up-regulated in Transcription
  misc_feature: MA Experiment 20000327 PARAMETER Experiment Name: At_42deg_Heat_Sub_P Parameter: Age (day) Value: 14
  misc_feature: MA Experiment 20000327 PARAMETER Experiment Name: At_42deg_Heat_Sub_P Parameter: Organism Value: A. thaliana
  misc_feature: MA Experiment 20000327 PARAMETER Experiment Name: At_42deg_Heat_Sub_P Parameter: Plant Line Value: WS
  misc_feature: MA Experiment 20000327 PARAMETER Experiment Name: At_42deg_Heat_Sub_P Parameter: Temperature (deg C) Value: 42 vs. 22
  misc_feature: MA Experiment 20000327 PARAMETER Experiment Name: At_42deg_Heat_Sub_P Parameter: Timepoint (hr) Value: 1
  misc_feature: MA Experiment 20000327 PARAMETER Experiment Name: At_42deg_Heat_Sub_P Parameter: Tissue Value: Aerial
  misc_feature: MA Experiment ID: 20000328 Result: Up-regulated in Transcription
  misc_feature: MA Experiment 20000328 PARAMETER Experiment Name: At_42deg_Heat_Sub_P Parameter: Age (day) Value: 14
  misc_feature: MA Experiment 20000328 PARAMETER Experiment Name: At_42deg_Heat_Sub_P Parameter: Organism Value: A. thaliana
  misc_feature: MA Experiment 20000328 PARAMETER Experiment Name: At_42deg_Heat_Sub_P Parameter: Plant Line Value: WS
  misc_feature: MA Experiment 20000328 PARAMETER Experiment Name: At_42deg_Heat_Sub_P Parameter: Temperature (deg C) Value: 42 vs. 22
  misc_feature: MA Experiment 20000328 PARAMETER Experiment Name: At_42deg_Heat_Sub_P Parameter: Timepoint (hr) Value: 6
  misc_feature: MA Experiment 20000328 PARAMETER Experiment Name: At_42deg_Heat_Sub_P Parameter: Tissue Value: Aerial
ggaagctctctgttcaaatcaaaaagagagatcgtacgcaaaagtttccgatatggctcgctcgtttggagcaaacagcactgttgtgcttgcgatcatcttcttcggatgtttatttgcgttttccactgcaaaagaagaggctacgaagttaggatcagttattgggatagatcttggtaccacttactcttgtgttggtgtttacaagaatggtcatgttgaaattattgccaatgaccaaggaaaccgtattacaccttcatgggttggttttactgactctgaaaggctcattggtgaggctgctaagaatcaggcggctgttaatcctgagaggactgtcttcgacgttaagagattgatcgggcgaaaatttgaggacaaggaggttcaaaaggacaggaaacttgtaccttaccagattgtgaacaaggatggtaagccatacattcaagtcaagatcaaggatggtgagactaaggttttcagtcctgaggagatcagtgccatgattctgactaagatgaaggagacagccgaagcctaccttggaaagaaaatcaaggacgctgttgtcactgttccagcttacttcaatgatgctcaaaggcaagctaccaaggatgccggtgttattgctgggctcaatgttgctagaatcatcaacgaacctactgctgctgctattgcctacggtcttgataagaagggtggtgagaagaacatccttgtatttgaccttggtggtggtacttttgatgtcagtgtcttgaccattgataacggagtgtttgaggttctctccacaaatggtgacactcacttgggaggtgaggactttgaccacaggatcatggagtacttcatcaagttaattaagaagaagcaccagaaggacatcagcaaggacaacaaggctcttggtaagctccgaagggaatgtgagagggcaaagagagctctaagcagtcagcaccaagtccgtgtagagattgagtcactctttgatggtgttgatttatctgagccactcaccagagctcgtttcgaggagcttaacaatgatttgttcaggaagaccatgggacctgtgaagaaggccatggatgatgccggtctacagaagagccagatcgatgagattgtccttgttggtggaagcaccaggatcccaaaggttcagcaactgttgaaggacttctttgaaggtaaagagccaaacaagggtgtgaaccccgacgaggctgttgcctatggtgctgctgttcagggtggtattttgagcggagaaggcggtgatgagaccaaagatatccttcttcttgatgttgcgccactcactttaggtatcgagactgtaggaggagtgatgacaaagttgatcccaagaaacacggttattccaaccaagaaatctcaggttttcacaacgtaccaagaccagcagaccaccgtctccattcaggtctttgaaggtgaaagaagtctcaccaaggactgcaggctactcgggaaattcgacctcactggagtcccaccggccccaagaggaacccctcaaatcgaggtcacatttgaagtggacgccaacggtattcttaatgtgaaagcagaggacaaggcgagtggtaaatcagagaagattacaatcacaaacgagaagggtcgtctgagccaagaagagattgaccggatggtgaaggaggcagaggagtttgcagaggaagacaagaaggtgaaggagaagatcgacgccaggaatgccctggagacatacgtgtacaacatgaagaaccaagtgagcgacaaggacaagcttgcagacaaattggaaggagatgagaaggagaagatagaagcagcgacgaaagaggccttggagtggctcgacgagaaccaaaactcagagaaagaagagtacgacgagaagctcaaggaggtagaggcagtgtgtaacccaatcatcacagcagtttaccagagatcaggcggagcaccaggtgcaggaggagaatcatcgactgaggaggaagatgagtctcacgatgagctctagatgtcttctgttattgttaatttattaaaccatagagacaagttttgaggatgaaacgtcgtttttgttttttgtatttggtttcctttttcttatggatttttaggaaaggggagagattaagtagcgtcccttctttagtctccctggac

SEQ ID NO: 97287 - protein, 685 aa, Arabidopsis thaliana
  peptide (1)..(685): Ceres Seq. ID no. 12736935
  misc_feature (10)..(680): Homolog of NCBI NO: 13897312 NR Description: luminal binding protein, BiP [Scherffelia dubia]
  misc_feature (54)..(685): Homolog of NCBI NO: 1037176 NR Description: immunoglobulin heavy chain binding protein
  misc_feature (37)..(685): Homolog of NCBI NO: 29539338 NR Description: Heat shock 70 kDa protein [Cyanidioschyzon
  misc_feature (32)..(685): Homolog of NCBI NO: 23480384 NR Description: heat shock protein [Plasmodium yoelii yoelii]
  misc_feature (216)..(685): Homolog of NCBI NO: 168424 NR Description: polypeptide chain-binding protein
  misc_feature (52)..(677): Homolog of NCBI NO: 21263753 NR Description: Heat shock cognate 71 kDa protein (Hsc70.1)
  misc_feature (51)..(671): Homolog of NCBI NO: 14423732 NR Description: Heat shock 70 kDa protein
EALCSNQKERSYAKVSDMARSFGANSTVVLAIIFFGCLFAFSTAKEEATKLGSVIGIDLGTTYSCVGVYKNGHVEIIANDQGNRITPSWVGFTDSERLIGEAAKNQAAVNPERTVFDVKRLIGRKFEDKEVQKDRKLVPYQIVNKDGKPYIQVKIKDGETKVFSPEEISAMILTKMKETAEAYLGKKIKDAVVTVPAYFNDAQRQATKDAGVIAGLNVARIINEPTAAAIAYGLDKKGGEKNILVFDLGGGTFDVSVLTIDNGVFEVLSTNGDTHLGGEDFDHRIMEYFIKLIKKKHQKDISKDNKALGKLRRECERAKRALSSQHQVRVEIESLFDGVDLSEPLTRARFEELNNDLFRKTMGPVKKAMDDAGLQKSQIDEIVLVGGSTRIPKVQQLLKDFFEGKEPNKGVNPDEAVAYGAAVQGGILSGEGGDETKDILLLDVAPLTLGIETVGGVMTKLIPRNTVIPTKKSQVFTTYQDQQTTVSIQVFEGERSLTKDCRLLGKFDLTGVPPAPRGTPQIEVTFEVDANGILNVKAEDKASGKSEKITITNEKGRLSQEEIDRMVKEAEEFAEEDKKVKEKIDARNALETYVYNMKNQVSDKDKLADKLEGDEKEKIEAATKEALEWLDENQNSEKEEYDEKLKEVEAVCNPIITAVYQRSGGAPGAGGESSTEEEDESHDEL

SEQ ID NO: 97288 - protein, 668 aa, Arabidopsis thaliana
  peptide (1)..(668): Ceres Seq. ID no. 12736936
  misc_feature (1)..(663): Homolog of NCBI NO: 13897312 NR Description: luminal binding protein, BiP [Scherffelia dubia]
  misc_feature (37)..(668): Homolog of NCBI NO: 1037176 NR Description: immunoglobulin heavy chain binding protein
  misc_feature (20)..(668): Homolog of NCBI NO: 29539338 NR Description: Heat shock 70 kDa protein [Cyanidioschyzon
  misc_feature (15)..(668): Homolog of NCBI NO: 23480384 NR Description: heat shock protein [Plasmodium yoelii yoelii]
  misc_feature (199)..(668): Homolog of NCBI NO: 168424 NR Description: polypeptide chain-binding protein
  misc_feature (35)..(660): Homolog of NCBI NO: 21263753 NR Description: Heat shock cognate 71 kDa protein (Hsc70.1)
  misc_feature (34)..(654): Homolog of NCBI NO: 14423732 NR Description: Heat shock 70 kDa protein
MARSFGANSTVVLAIIFFGCLFAFSTAKEEATKLGSVIGIDLGTTYSCVGVYKNGHVEIIANDQGNRITPSWVGFTDSERLIGEAAKNQAAVNPERTVFDVKRLIGRKFEDKEVQKDRKLVPYQIVNKDGKPYIQVKIKDGETKVFSPEEISAMILTKMKETAEAYLGKKIKDAVVTVPAYFNDAQRQATKDAGVIAGLNVARIINEPTAAAIAYGLDKKGGEKNILVFDLGGGTFDVSVLTIDNGVFEVLSTNGDTHLGGEDFDHRIMEYFIKLIKKKHQKDISKDNKALGKLRRECERAKRALSSQHQVRVEIESLFDGVDLSEPLTRARFEELNNDLFRKTMGPVKKAMDDAGLQKSQIDEIVLVGGSTRIPKVQQLLKDFFEGKEPNKGVNPDEAVAYGAAVQGGILSGEGGDETKDILLLDVAPLTLGIETVGGVMTKLIPRNTVIPTKKSQVFTTYQDQQTTVSIQVFEGERSLTKDCRLLGKFDLTGVPPAPRGTPQIEVTFEVDANGILNVKAEDKASGKSEKITITNEKGRLSQEEIDRMVKEAEEFAEEDKKVKEKIDARNALETYVYNMKNQVSDKDKLADKLEGDEKEKIEAATKEALEWLDENQNSEKEEYDEKLKEVEAVCNPIITAVYQRSGGAPGAGGESSTEEEDESHDEL

SEQ ID NO: 97289 - protein, 515 aa, Arabidopsis thaliana
  peptide (1)..(515): Ceres Seq. ID no. 12736937
  misc_feature (1)..(510): Homolog of NCBI NO: 13897312 NR Description: luminal binding protein, BiP [Scherffelia dubia]
  misc_feature (1)..(515): Homolog of NCBI NO: 1037176 NR Description: immunoglobulin heavy chain binding protein
  misc_feature (1)..(515): Homolog of NCBI NO: 29539338 NR Description: Heat shock 70 kDa protein [Cyanidioschyzon
  misc_feature (1)..(515): Homolog of NCBI NO: 23480384 NR Description: heat shock protein [Plasmodium yoelii yoelii]
  misc_feature (46)..(515): Homolog of NCBI NO: 168424 NR Description: polypeptide chain-binding protein
  misc_feature (1)..(507): Homolog of NCBI NO: 21263753 NR Description: Heat shock cognate 71 kDa protein (Hsc70.1)
  misc_feature (1)..(501): Homolog of NCBI NO: 14423732 NR Description: Heat shock 70 kDa protein
MILTKMKETAEAYLGKKIKDAVVTVPAYFNDAQRQATKDAGVIAGLNVARIINEPTAAAIAYGLDKKGGEKNILVFDLGGGTFDVSVLTIDNGVFEVLSTNGDTHLGGEDFDHRIMEYFIKLIKKKHQKDISKDNKALGKLRRECERAKRALSSQHQVRVEIESLFDGVDLSEPLTRARFEELNNDLFRKTMGPVKKAMDDAGLQKSQIDEIVLVGGSTRIPKVQQLLKDFFEGKEPNKGVNPDEAVAYGAAVQGGILSGEGGDETKDILLLDVAPLTLGIETVGGVMTKLIPRNTVIPTKKSQVFTTYQDQQTTVSIQVFEGERSLTKDCRLLGKFDLTGVPPAPRGTPQIEVTFEVDANGILNVKAEDKASGKSEKITITNEKGRLSQEEIDRMVKEAEEFAEEDKKVKEKIDARNALETYVYNMKNQVSDKDKLADKLEGDEKEKIEAATKEALEWLDENQNSEKEEYDEKLKEVEAVCNPIITAVYQRSGGAPGAGGESSTEEEDESHDEL

SEQ ID NO: 97290 - DNA, 792 bp, Arabidopsis thaliana
  misc_feature (1)..(792): Ceres Seq. ID no. 12736940
  misc_feature: MA Experiment ID: 20000307 Result: Up-regulated in Transcription
  misc_feature: MA Experiment 20000307 PARAMETER Experiment Name: At_Germinating_Seeds_Sub_P Parameter: Age (hr) Value: 24 vs. 0
  misc_feature: MA Experiment 20000307 PARAMETER Experiment Name: At_Germinating_Seeds_Sub_P Parameter: Organism Value: A. thaliana
  misc_feature: MA Experiment 20000307 PARAMETER Experiment Name: At_Germinating_Seeds_Sub_P Parameter: Plant Line Value: WS
  misc_feature: MA Experiment 20000307 PARAMETER Experiment Name: At_Germinating_Seeds_Sub_P Parameter: Tissue Value: Germinating Seeds
  misc_feature: MA Experiment ID: 20000314 Result: Down-regulated in Transcription
  misc_feature: MA Experiment 20000314 PARAMETER Experiment Name: At_14day_Shoots-Roots_Sub_P Parameter: Age (day) Value: 14
  misc_feature: MA Experiment 20000314 PARAMETER Experiment Name: At_14day_Shoots-Roots_Sub_P Parameter: Organism Value: A. thaliana
  misc_feature: MA Experiment 20000314 PARAMETER Experiment Name: At_14day_Shoots-Roots_Sub_P Parameter: Plant Line Value: WS
  misc_feature: MA Experiment 20000314 PARAMETER Experiment Name: At_14day_Shoots-Roots_Sub_P Parameter: Tissue Value: Roots vs. Whole Plant
atggctttaccttggtgcttaaagactggagttttaacgtctccggccgccggatttaatcatccatcggacagtggcttcgccgttccgacgaagttactgagtattcgaaaaggtgatcgggaaagattgagaatccaagctgttttcagctttcctccaagaaacggtggagccgagaagcggaaacagctcaaacatgaacttgtcgaagccattgagcctcttgaacgtggtgccactgcctcgcctgatgatcagcttctgattgatcagttagcacgtaaggtggaagcagtaaacccaaccaaggagcctctgaagtctgatttgatcaatgggaaatgggagctcatttacacaacatctgctgcgattttgcaagcaaagaaaccaaggttcttaagatcgttaactaactaccaatgtatcaatatggatacactaaaggtgcaaagaatggagacttggcctttctataactcggtaactggagacttgacacccctcaactcgaagacggttgctgtgaaacttcaagtgtttaaaattctcggctttattccggtaaaagcacctgatggtactgcacgcggtgaactagagattacctatgtggacgaggaactacggtcagtagtgaatgatagtttttcatttctctatggaactgacaaccaaaaacatttgaatcttgaaacaatgttcattttttacaggatatcaaggggcaaaggcaacttgttgtttatattgaagatgtttgatcccacttatcgaatccctctctga

SEQ ID NO: 97291 - protein, 263 aa, Arabidopsis thaliana
  peptide (1)..(263): Ceres Seq. ID no. 12736941
  misc_feature (63)..(130): Pfam Name: PAP_fibrillin Pfam Description: PAP_fibrillin
  misc_feature (1)..(263): Homolog of NCBI NO: 15230986 NR Description: unknown protein; protein id: At3g26080.1
  misc_feature (1)..(130): Homolog of NCBI NO: 9279613 NR Description: gene_id:MPE11.25~unknown protein [Arabidopsis
  misc_feature (163)..(263): Homolog of NCBI NO: 9279613 NR Description: gene_id:MPE11.25~unknown protein [Arabidopsis
  misc_feature (1)..(211): Homolog of NCBI NO: 30688146 NR Description: plastid-lipid associated protein PAP/fibrillin [Arabidopsis thaliana] >gi|9279612|dbj|BAB01070.1| protein [Arabidopsis thaliana] >gi|17473675|gb|AAL38294.1|
  misc_feature (240)..(263): Homolog of NCBI NO: 30688146 NR Description: plastid-lipid associated protein PAP/fibrillin [Arabidopsis thaliana] >gi|9279612|dbj|BAB01070.1| protein [Arabidopsis thaliana] >gi|17473675|gb|AAL38294.1|
  misc_feature (23)..(211): Homolog of NCBI NO: 17065226 NR Description: Unknown protein [Arabidopsis thaliana]
  misc_feature (240)..(263): Homolog of NCBI NO: 17065226 NR Description: Unknown protein [Arabidopsis thaliana]
  misc_feature (66)..(252): Homolog of NCBI NO: 5020103 NR Description: fibrillin [Nostoc sp. PCC 8009]
  misc_feature (66)..(252): Homolog of NCBI NO: 22297962 NR Description: fibrillin [Thermosynechococcus elongatus BP-1]
  misc_feature (66)..(252): Homolog of NCBI NO: 17231810 NR Description: fibrillin [Nostoc sp. PCC 7120]
MALPWCLKTGVLTSPAAGFNHPSDSGFAVPTKLLSIRKGDRERLRIQAVFSFPPRNGGAEKRKQLKHELVEAIEPLERGATASPDDQLLIDQLARKVEAVNPTKEPLKSDLINGKWELIYTTSAAILQAKKPRFLRSLTNYQCINMDTLKVQRMETWPFYNSVTGDLTPLNSKTVAVKLQVFKILGFIPVKAPDGTARGELEITYVDEELRSVVNDSFSFLYGTDNQKHLNLETMFIFYRISRGKGNLLFILKMFDPTYRIPL

SEQ ID NO: 97292 - DNA, 654 bp, Arabidopsis thaliana
  misc_feature (1)..(654): Ceres Seq. ID no. 12736942
  misc_feature: MA Experiment ID: 20000180 Result: Up-regulated in Transcription
  misc_feature: MA Experiment 20000180 PARAMETER Experiment Name: At_Germinating_Seeds_P Parameter: Age (hr) Value: 24 vs. 0
  misc_feature: MA Experiment 20000180 PARAMETER Experiment Name: At_Germinating_Seeds_P Parameter: Tissue Value: Germinating Seeds
  misc_feature: MA Experiment ID: 20000185 Result: Down-regulated in Transcription
  misc_feature: MA Experiment 20000185 PARAMETER Experiment Name: At_Roots__P Parameter: Age (day) Value: 7 vs. 21
  misc_feature: MA Experiment 20000185 PARAMETER Experiment Name: At_Roots__P Parameter: Organism Value: A. thaliana
  misc_feature: MA Experiment 20000185 PARAMETER Experiment Name: At_Roots__P Parameter: Tissue Value: Roots vs. Whole Plant
  misc_feature: MA Experiment ID: 20000227 Result: Down-regulated in Transcription
  misc_feature: MA Experiment 20000227 PARAMETER Experiment Name: At_Root-Tips-vs-Tops_P Parameter: Tissue Value: Root Tips vs. Root Tops
  misc_feature: MA Experiment ID: 20000269 Result: Down-regulated in Transcription
  misc_feature: MA Experiment 20000269 PARAMETER Experiment Name: At_1mM_KNO3_L-vs-H_Roots_P Parameter: Age (day) Value: 7,10,12
  misc_feature: MA Experiment 20000269 PARAMETER Experiment Name: At_1mM_KNO3_L-vs-H_Roots_P Parameter: Organism Value: A. thaliana
  misc_feature: MA Experiment 20000269 PARAMETER Experiment Name: At_1mM_KNO3_L-vs-H_Roots_P Parameter: Plant Line Value: WS
  misc_feature: MA Experiment 20000269 PARAMETER Experiment Name: At_1mM_KNO3_L-vs-H_Roots_P Parameter: Timepoint (day) Value: 7,10,12
  misc_feature: MA Experiment 20000269 PARAMETER Experiment Name: At_1mM_KNO3_L-vs-H_Roots_P Parameter: Tissue Value: Roots
  misc_feature: MA Experiment 20000269 PARAMETER Experiment Name: At_1mM_KNO3_L-vs-H_Roots_P Parameter: Treatment Value: 1mM KNO3 vs. 50mM KNO3
  misc_feature: MA Experiment ID: 20000439 Result: Down-regulated in Transcription
  misc_feature: MA Experiment 20000439 PARAMETER Experiment Name: At_Roots__P Parameter: Age (day) Value: 14 vs. 21
  misc_feature: MA Experiment 20000439 PARAMETER Experiment Name: At_Roots__P Parameter: Organism Value: A. thaliana
  misc_feature: MA Experiment 20000439 PARAMETER Experiment Name: At_Roots__P Parameter: Tissue Value: Roots vs. Whole Plant
  misc_feature: MA Experiment ID: 20000496 Result: Down-regulated in Transcription
  misc_feature: MA Experiment 20000496 PARAMETER Experiment Name: At_Guard_Cells_P Parameter: Harvest Date Value: 7/19/2002
  misc_feature: MA Experiment 20000496 PARAMETER Experiment Name: At_Guard_Cells_P Parameter: Organism Value: Canola
  misc_feature: MA Experiment 20000496 PARAMETER Experiment Name: At_Guard_Cells_P Parameter: Tissue Value: Guard Cells vs. Leaves
  misc_feature: MA Experiment ID: 20001248 Result: Down-regulated in Transcription
  misc_feature: MA Experiment 20001248 PARAMETER Experiment Name: At_Far-red-induction_P Parameter: Age (day) Value: 7
  misc_feature: MA Experiment 20001248 PARAMETER Experiment Name: At_Far-red-induction_P Parameter: Light Value: Far-red vs. White
  misc_feature: MA Experiment 20001248 PARAMETER Experiment Name: At_Far-red-induction_P Parameter: Organism Value: A. thaliana
  misc_feature: MA Experiment 20001248 PARAMETER Experiment Name: At_Far-red-induction_P Parameter: Plant Line Value: Columbia
  misc_feature: MA Experiment 20001248 PARAMETER Experiment Name: At_Far-red-induction_P Parameter: Timepoint (hr) Value: 4
  misc_feature: MA Experiment 20001248 PARAMETER Experiment Name: At_Far-red-induction_P Parameter: Tissue Value: Whole Plant
  misc_feature: MA Experiment ID: 20001451 Result: Down-regulated in Transcription
  misc_feature: MA Experiment 20001451 PARAMETER Experiment Name: At_Far-red-induction_P Parameter: Age (day) Value: 7
  misc_feature: MA Experiment 20001451 PARAMETER Experiment Name: At_Far-red-induction_P Parameter: Light Value: Far-red vs. White
  misc_feature: MA Experiment 20001451 PARAMETER Experiment Name: At_Far-red-induction_P Parameter: Organism Value: A. thaliana
  misc_feature: MA Experiment 20001451 PARAMETER Experiment Name: At_Far-red-induction_P Parameter: Plant Line Value: Columbia
  misc_feature: MA Experiment 20001451 PARAMETER Experiment Name: At_Far-red-induction_P Parameter: Timepoint (hr) Value: 24
  misc_feature: MA Experiment 20001451 PARAMETER Experiment Name: At_Far-red-induction_P Parameter: Tissue Value: Whole Plant
  misc_feature: MA Experiment ID: 20001557 Result: Down-regulated in Transcription
  misc_feature: MA Experiment 20001557 PARAMETER Experiment Name: At_Drought_Soil_Dry_P Parameter: Age (day) Value: 27
  misc_feature: MA Experiment 20001557 PARAMETER Experiment Name: At_Drought_Soil_Dry_P Parameter: Organism Value: A. thaliana
  misc_feature: MA Experiment 20001557 PARAMETER Experiment Name: At_Drought_Soil_Dry_P Parameter: Plant Line Value: WS
  misc_feature: MA Experiment 20001557 PARAMETER Experiment Name: At_Drought_Soil_Dry_P Parameter: Post Timepoint (hr) Value: 3
  misc_feature: MA Experiment 20001557 PARAMETER Experiment Name: At_Drought_Soil_Dry_P Parameter: Post-Treatment Value: Re-Water vs. No Drought
  misc_feature: MA Experiment 20001557 PARAMETER Experiment Name: At_Drought_Soil_Dry_P Parameter: Timepoint (day) Value: 13
  misc_feature: MA Experiment 20001557 PARAMETER Experiment Name: At_Drought_Soil_Dry_P Parameter: Treatment Value: Drought vs. No Drought
  misc_feature: MA Experiment ID: 20001560 Result: Down-regulated in Transcription
  misc_feature: MA Experiment 20001560 PARAMETER Experiment Name: At_Drought_Soil_Dry_P Parameter: Age (day) Value: 28
  misc_feature: MA Experiment 20001560 PARAMETER Experiment Name: At_Drought_Soil_Dry_P Parameter: Organism Value: A. thaliana
  misc_feature: MA Experiment 20001560 PARAMETER Experiment Name: At_Drought_Soil_Dry_P Parameter: Plant Line Value: WS
  misc_feature: MA Experiment 20001560 PARAMETER Experiment Name: At_Drought_Soil_Dry_P Parameter: Post Timepoint (hr) Value: None
  misc_feature: MA Experiment 20001560 PARAMETER Experiment Name: At_Drought_Soil_Dry_P Parameter: Post-Treatment Value: None
  misc_feature: MA Experiment 20001560 PARAMETER Experiment Name: At_Drought_Soil_Dry_P Parameter: Timepoint (day) Value: 14
  misc_feature: MA Experiment 20001560 PARAMETER Experiment Name: At_Drought_Soil_Dry_P Parameter: Treatment Value: Drought vs. No Drought
  misc_feature: MA Experiment ID: 20001905 Result: Down-regulated in Transcription
  misc_feature: MA Experiment 20001905 PARAMETER Experiment Name: At_Drought_Reproduction_P Parameter: Age (day) Value: 40
  misc_feature: MA Experiment 20001905 PARAMETER Experiment Name: At_Drought_Reproduction_P Parameter: Organism Value: A. thaliana
  misc_feature: MA Experiment 20001905 PARAMETER Experiment Name: At_Drought_Reproduction_P Parameter: Plant Line Value: WS
  misc_feature: MA Experiment 20001905 PARAMETER Experiment Name: At_Drought_Reproduction_P Parameter: Timepoint (day) Value: 10
  misc_feature: MA Experiment 20001905 PARAMETER Experiment Name: At_Drought_Reproduction_P Parameter: Tissue Value: Rosettes
  misc_feature: MA Experiment 20001905 PARAMETER Experiment Name: At_Drought_Reproduction_P Parameter: Treatment Value: Drought vs. No Drought
atgaagtcagacagcggcttcgccgttccgacaaagttacagagtactcgaaaaggtgatcgagagagattgagagtccaagctattttcagtttccctcctgcgtttctgacaagaaacggtcgagctgagaaacagaaacagctcaaacaagaacttcttgaagccattgagcctcttgaacgtggtgctacggcctcgcctgatgaccagcttcggattgatcagttagcgcgtaaagtggaagcagttaatcccaccaaggagcctttgaagtctgatttggtcaatggaaaatgggagctcatttatacaacctctgcttcgattttgcaggcaaagaaaccaaggttcttaagatcaataaccaactaccaatctatcaatgtggatacacttaaggtgcaaaacatggagacttggcctttctataactcggtaactggagacataaaacccctcaattcgaagaaggttgctgtgaaactccaagtgtttaaaattctcggatttattcctataaaagcacctgatagcgcccgcggtgaacttgagattacctatgtggacgaggaactacggttatcaagaggtgacaaagggaacttgtttatattgaagatgtttgatcccacttatcgaatccctctttga

SEQ ID NO: 97293 - protein, 217 aa, Arabidopsis thaliana; identical to SEQ ID NO: 44517
  peptide (1)..(217): Ceres Seq. ID no. 12736943
  misc_feature (47)..(207): Pfam Name: PAP_fibrillin Pfam Description: PAP_fibrillin
  misc_feature (1)..(217): Homolog of NCBI NO: 17065226 NR Description: Unknown protein [Arabidopsis thaliana]
  misc_feature (1)..(217): Homolog of NCBI NO: 30688146 NR Description: plastid-lipid associated protein PAP/fibrillin [Arabidopsis thaliana] >gi|9279612|dbj|BAB01070.1| protein [Arabidopsis thaliana] >gi|17473675|gb|AAL38294.1|
  misc_feature (3)..(194): Homolog of NCBI NO: 15230986 NR Description: unknown protein; protein id: At3g26080.1
  misc_feature (194)..(217): Homolog of NCBI NO: 15230986 NR Description: unknown protein; protein id: At3g26080.1
  misc_feature (3)..(217): Homolog of NCBI NO: 9279613 NR Description: gene_id:MPE11.25~unknown protein [Arabidopsis
  misc_feature (50)..(164): Homolog of NCBI NO: 5020103 NR Description: fibrillin [Nostoc sp. PCC 8009]
  misc_feature (171)..(206): Homolog of NCBI NO: 5020103 NR Description: fibrillin [Nostoc sp. PCC 8009]
  misc_feature (50)..(164): Homolog of NCBI NO: 17231810 NR Description: fibrillin [Nostoc sp. PCC 7120]
  misc_feature (174)..(206): Homolog of NCBI NO: 17231810 NR Description: fibrillin [Nostoc sp. PCC 7120]
  misc_feature (50)..(164): Homolog of NCBI NO: 23126201 NR Description: hypothetical protein [Nostoc punctiforme]

SEQ ID NO: 97294 - DNA, 1656 bp, Arabidopsis thaliana
  misc_feature (1)..(1656): Ceres Seq. ID no. 12736948
  misc_feature: MA Experiment ID: 20000227 Result: Down-regulated in Transcription
  misc_feature: MA Experiment 20000227 PARAMETER Experiment Name: At_Root-Tips-vs-Tops_P Parameter: Tissue Value: Root Tips vs. Root Tops
  misc_feature: MA Experiment ID: 20000451 Result: Down-regulated in Transcription
  misc_feature: MA Experiment 20000451 PARAMETER Experiment Name: At_CS6879_Shoots-Roots_P Parameter: Age (day) Value: 14
  misc_feature: MA Experiment 20000451 PARAMETER Experiment Name: At_CS6879_Shoots-Roots_P Parameter: Organism Value: A. thaliana
  misc_feature: MA Experiment 20000451 PARAMETER Experiment Name: At_CS6879_Shoots-Roots_P Parameter: Plant Line Value: CS6879 vs. WS
  misc_feature: MA Experiment 20000451 PARAMETER Experiment Name: At_CS6879_Shoots-Roots_P Parameter: Tissue Value: Roots
atggaaaaattcttcttcatctctgtctttcttcttccctacgtcatcaccactttcgctttccctccctccaccgactcacgctggatcgtcgacgacggcaacaaagggcggcgcgtgaaactcacgtgcgtcaactggccgtcgcatctcgaaaccgcggtggctgaagggcttagcaagcagccgttggatgcgatcgcagagaagatagtctcaatgggtttcaattgcgttagattgacttggcctctctacttagccaccgatgaatctttctctgcttttatgacagtgagacaatcactccgcaagtttcgtctctttgaagctgtttctggttttcaaactcacaatccaacgattcttgatcttcctctaatcaaagctttccaggaagtagtgtattgtcttgaaaagcatagagtaatggttatcttagacaatcacataagccaacctggttggtgttgtagtgacaatgatggaaacgggtttttcggcgataaacatttaaaccctcaagtttggatcaaagggttaaaaaaaatggcatcaatgtttgctaatgtttcatcaaatgtggttggtatgagtttaaggaatgagcttagaggccctaaacagaacattaaagattggtacaagtatatgagagaaggcgctgaagcggtccactcagtgaatccgaatgttcttgttattgtctcgggtttaaattacgctactgacttatcgtttctccgagagagaccctttgaagttagcttcaggaggaaagtggtgtttgagatacattggtatggattttggaatacttgggaaggagataacttgaacaagatttgcgggaaagaaaccgagaagatgatgaaaatgtcggggtttttgctcgagaaagggataccgttgtttgtgagcgagtttgggattgatcaaagaggaaacaatgcaaacgacaataagtttctaagttgttttatggctttagcagctgatcgtgatctagattggtcactatggactcttgcaggaagctattatataagagagaaaagtattggatcagatgaatcttatggagttttggattttaattggtctagcataaggaactcaaccattttgcagatgatatctgcaattcagactccttttatagggctaatggaaactcaaccaaagaaaataatgttccatccttcaactggactttgcattgtaagaaaatcattgtttcaactaaagcttggttcttgcaatagatcagaaagctggagactttcttctcatcgagttttatcactagcagaagaacaaatcctctgtttaaaagcttatgagaaaggaaagtctgttaagctacgtctgtttttctctgaatcttactgttcgaaatggaaacttttttctgactcgaagatgcaactctcttctataacaaagaatggattctctgtttgtttggatgtggatacggagaataacaacattgtgacgaatagctgcaaatgtttacgaggaaactcgagttgcgatccgagaagccagtggtttaagcttgttactagcacgagaagacggtctagaccaaaaccttttcttcaaattagtctatactccaagacatttcttcagaaatctttatcagtttaa

SEQ ID NO: 97295 - protein, 551 aa, Arabidopsis thaliana
  peptide (1)..(551): Ceres Seq. ID no. 12736949
  misc_feature (28)..(349): Pfam Name: Cellulase (glycosyl hydrolase family 5) Pfam Description: Cellulase (glycosyl hydrolase family 5)
  misc_feature (1)..(551): Homolog of NCBI NO: 15231513 NR Description: glycosyl hydrolase family 5/cellulase; protein
  misc_feature (1)..(551): Homolog of NCBI NO: 11994430 NR Description: gene_id:MTC11.2~unknown protein [Arabidopsis
  misc_feature (20)..(538): Homolog of NCBI NO: 15222185 NR Description: glycosyl hydrolase family 5/cellulase; protein At1g13130.1 [Arabidopsis thaliana] >gi|25402755|pir||E86265
  misc_feature (20)..(522): Homolog of NCBI NO: 15231514 NR Description: glycosyl hydrolase family 5/cellulase; protein At3g26140.1 [Arabidopsis thaliana] >gi|11994432|dbj|BAB02434.1|
  misc_feature (4)..(521): Homolog of NCBI NO: 15237972 NR Description: glycosyl hydrolase family 5/cellulase; protein At5g17500.1 [Arabidopsis thaliana] >gi|11357940|pir||T51476
  misc_feature (9)..(526): Homolog of NCBI NO: 38345245 NR Description: OSJNBb0011N17.6 [Oryza sativa (japonica
  misc_feature (9)..(537): Homolog of NCBI NO: 38345244 NR Description: OSJNBb0011N17.5 [Oryza sativa (japonica
  misc_feature (37)..(526): Homolog of NCBI NO: 38345246 NR Description: OSJNBb0011N17.7 [Oryza sativa (japonica
  misc_feature (1)..(350): Homolog of NCBI NO: 15237397 NR Description: glycosyl hydrolase family 5/cellulase; protein At5g16700.1 [Arabidopsis thaliana] >gi|11357811|pir||T51502
  misc_feature (395)..(522): Homolog of NCBI NO: 15237397 NR Description: glycosyl hydrolase family 5/cellulase; protein At5g16700.1 [Arabidopsis thaliana] >gi|11357811|pir||T51502
MEKFFFISVFLLPYVITTFAFPPSTDSRWIVDDGNKGRRVKLTCVNWPSHLETAVAEGLSKQPLDAIAEKIVSMGFNCVRLTWPLYLATDESFSAFMTVRQSLRKFRLFEAVSGFQTHNPTILDLPLIKAFQEVVYCLEKHRVMVILDNHISQPGWCCSDNDGNGFFGDKHLNPQVWIKGLKKMASMFANVSSNVVGMSLRNELRGPKQNIKDWYKYMREGAEAVHSVNPNVLVIVSGLNYATDLSFLRERPFEVSFRRKVVFEIHWYGFWNTWEGDNLNKICGKETEKMMKMSGFLLEKGIPLFVSEFGIDQRGNNANDNKFLSCFMALAADRDLDWSLWTLAGSYYIREKSIGSDESYGVLDFNWSSIRNSTILQMISAIQTPFIGLMETQPKKIMFHPSTGLCIVRKSLFQLKLGSCNRSESWRLSSHRVLSLAEEQILCLKAYEKGKSVKLRLFFSESYCSKWKLFSDSKMQLSSITKNGFSVCLDVDTENNNIVTNSCKCLRGNSSCDPRSQWFKLVTSTRRRSRPKPFLQISLYSKTFLQKSLSV

SEQ ID NO: 97296 - protein, 478 aa, Arabidopsis thaliana
  peptide (1)..(478): Ceres Seq. ID no. 12736950
  misc_feature (1)..(276): Pfam Name: Cellulase (glycosyl hydrolase family 5) Pfam Description: Cellulase (glycosyl hydrolase family 5)
  misc_feature (1)..(478): Homolog of NCBI NO: 15231513 NR Description: glycosyl hydrolase family 5/cellulase; protein
  misc_feature (1)..(478): Homolog of NCBI NO: 11994430 NR Description: gene_id:MTC11.2~unknown protein [Arabidopsis
  misc_feature (1)..(465): Homolog of NCBI NO: 15222185 NR Description: glycosyl hydrolase family 5/cellulase; protein At1g13130.1 [Arabidopsis thaliana] >gi|25402755|pir||E86265
  misc_feature (1)..(449): Homolog of NCBI NO: 15231514 NR Description: glycosyl hydrolase family 5/cellulase; protein At3g26140.1 [Arabidopsis thaliana] >gi|11994432|dbj|BAB02434.1|
  misc_feature (1)..(448): Homolog of NCBI NO: 15237972 NR Description: glycosyl hydrolase family 5/cellulase; protein At5g17500.1 [Arabidopsis thaliana] >gi|11357940|pir||T51476
  misc_feature (1)..(453): Homolog of NCBI NO: 38345245 NR Description: OSJNBb0011N17.6 [Oryza sativa (japonica
  misc_feature (1)..(464): Homolog of NCBI NO: 38345244 NR Description: OSJNBb0011N17.5 [Oryza sativa (japonica
  misc_feature (1)..(453): Homolog of NCBI NO: 38345246 NR Description: OSJNBb0011N17.7 [Oryza sativa (japonica
  misc_feature (1)..(277): Homolog of NCBI NO: 15237397 NR Description: glycosyl hydrolase family 5/cellulase; protein At5g16700.1 [Arabidopsis thaliana] >gi|11357811|pir||T51502
  misc_feature (322)..(449): Homolog of NCBI NO: 15237397 NR Description: glycosyl hydrolase family 5/cellulase; protein At5g16700.1 [Arabidopsis thaliana] >gi|11357811|pir||T51502
MGFNCVRLTWPLYLATDESFSAFMTVRQSLRKFRLFEAVSGFQTHNPTILDLPLIKAFQEVVYCLEKHRVMVILDNHISQPGWCCSDNDGNGFFGDKHLNPQVWIKGLKKMASMFANVSSNVVGMSLRNELRGPKQNIKDWYKYMREGAEAVHSVNPNVLVIVSGLNYATDLSFLRERPFEVSFRRKVVFEIHWYGFWNTWEGDNLNKICGKETEKMMKMSGFLLEKGIPLFVSEFGIDQRGNNANDNKFLSCFMALAADRDLDWSLWTLAGSYYIREKSIGSDESYGVLDFNWSSIRNSTILQMISAIQTPFIGLMETQPKKIMFHPSTGLCIVRKSLFQLKLGSCNRSESWRLSSHRVLSLAEEQILCLKAYEKGKSVKLRLFFSESYCSKWKLFSDSKMQLSSITKNGFSVCLDVDTENNNIVTNSCKCLRGNSSCDPRSQWFKLVTSTRRRSRPKPFLQISLYSKTFLQKSLSV

SEQ ID NO: 97297 - protein, 455 aa, Arabidopsis thaliana
  peptide (1)..(455): Ceres Seq. ID no. 12736951
  misc_feature (1)..(253): Pfam Name: Cellulase (glycosyl hydrolase family 5) Pfam Description: Cellulase (glycosyl hydrolase family 5)
  misc_feature (1)..(455): Homolog of NCBI NO: 15231513 NR Description: glycosyl hydrolase family 5/cellulase; protein
  misc_feature (1)..(455): Homolog of NCBI NO: 11994430 NR Description: gene_id:MTC11.2~unknown protein [Arabidopsis
  misc_feature (1)..(442): Homolog of NCBI NO: 15222185 NR Description: glycosyl hydrolase family 5/cellulase; protein At1g13130.1 [Arabidopsis thaliana] >gi|25402755|pir||E86265
  misc_feature (1)..(426): Homolog of NCBI NO: 15231514 NR Description: glycosyl hydrolase family 5/cellulase; protein At3g26140.1 [Arabidopsis thaliana] >gi|11994432|dbj|BAB02434.1|
  misc_feature (1)..(425): Homolog of NCBI NO: 15237972 NR Description: glycosyl hydrolase family 5/cellulase; protein At5g17500.1 [Arabidopsis thaliana] >gi|11357940|pir||T51476
  misc_feature (1)..(430): Homolog of NCBI NO: 38345245 NR Description: OSJNBb0011N17.6 [Oryza sativa (japonica
  misc_feature (1)..(441): Homolog of NCBI NO: 38345244 NR Description: OSJNBb0011N17.5 [Oryza sativa (japonica
  misc_feature (1)..(430): Homolog of NCBI NO: 38345246 NR Description: OSJNBb0011N17.7 [Oryza sativa (japonica
  misc_feature (1)..(254): Homolog of NCBI NO: 15237397 NR Description: glycosyl hydrolase family 5/cellulase; protein At5g16700.1 [Arabidopsis thaliana] >gi|11357811|pir||T51502
  misc_feature (299)..(426): Homolog of NCBI NO: 15237397 NR Description: glycosyl hydrolase family 5/cellulase; protein At5g16700.1 [Arabidopsis thaliana] >gi|11357811|pir||T51502
MTVRQSLRKFRLFEAVSGFQTHNPTILDLPLIKAFQEVVYCLEKHRVMVILDNHISQPGWCCSDNDGNGFFGDKHLNPQVWIKGLKKMASMFANVSSNVVGMSLRNELRGPKQNIKDWYKYMREGAEAVHSVNPNVLVIVSGLNYATDLSFLRERPFEVSFRRKVVFEIHWYGFWNTWEGDNLNKICGKETEKMMKMSGFLLEKGIPLFVSEFGIDQRGNNANDNKFLSCFMALAADRDLDWSLWTLAGSYYIREKSIGSDESYGVLDFNWSSIRNSTILQMISAIQTPFIGLMETQPKKIMFHPSTGLCIVRKSLFQLKLGSCNRSESWRLSSHRVLSLAEEQILCLKAYEKGKSVKLRLFFSESYCSKWKLFSDSKMQLSSITKNGFSVCLDVDTENNNIVTNSCKCLRGNSSCDPRSQWFKLVTSTRRRSRPKPFLQISLYSKTFLQKSLSV

SEQ ID NO: 97298 - DNA, 1527 bp, Arabidopsis thaliana
  misc_feature (1)..(1527): Ceres Seq. ID no. 12736952
  misc_feature: MA Experiment ID: 20000264 Result: Up-regulated in Transcription
  misc_feature: MA Experiment 20000264 PARAMETER Experiment Name: At_Open_Flower_P Parameter: Age (day) Value: 21
  misc_feature: MA Experiment 20000264 PARAMETER Experiment Name: At_Open_Flower_P Parameter: Plant Line Value: WS
  misc_feature: MA Experiment 20000264 PARAMETER Experiment Name: At_Open_Flower_P Parameter: Tissue Value: Open Flower vs. Whole Plant
  misc_feature: MA Experiment ID: 20000265 Result: Up-regulated in Transcription
  misc_feature: MA Experiment 20000265 PARAMETER Experiment Name: At_Open_Flower_P Parameter: Age (day) Value: 21
  misc_feature: MA Experiment 20000265 PARAMETER Experiment Name: At_Open_Flower_P Parameter: Plant Line Value: WS
  misc_feature: MA Experiment 20000265 PARAMETER Experiment Name: At_Open_Flower_P Parameter: Tissue Value: Closed Flower vs. Whole Plant
  misc_feature: MA Experiment ID: 20000286 Result: Up-regulated in Transcription
  misc_feature: MA Experiment 20000286 PARAMETER Experiment Name: At_Open_Flower_P Parameter: Age (day) Value: 21
  misc_feature: MA Experiment 20000286 PARAMETER Experiment Name: At_Open_Flower_P Parameter: Plant Line Value: WS
  misc_feature: MA Experiment 20000286 PARAMETER Experiment Name: At_Open_Flower_P Parameter: Tissue Value: Half Open vs. Whole Plant
  misc_feature: MA Experiment ID: 20001911 Result: Down-regulated in Transcription
  misc_feature: MA Experiment 20001911 PARAMETER Experiment Name: At_Drought_Reproduction_P Parameter: Age (day) Value: 40
  misc_feature: MA Experiment 20001911 PARAMETER Experiment Name: At_Drought_Reproduction_P Parameter: Organism Value: A. thaliana
  misc_feature: MA Experiment 20001911 PARAMETER Experiment Name: At_Drought_Reproduction_P Parameter: Plant Line Value: WS
  misc_feature: MA Experiment 20001911 PARAMETER Experiment Name: At_Drought_Reproduction_P Parameter: Timepoint (day) Value: 10
  misc_feature: MA Experiment 20001911 PARAMETER Experiment Name: At_Drought_Reproduction_P Parameter: Tissue Value: Flowers
  misc_feature: MA Experiment 20001911 PARAMETER Experiment Name: At_Drought_Reproduction_P Parameter: Treatment Value: Drought vs. No Drought
atggcatatcctctctctacaaactctcgttggatcatcgacgaaaaagggcaaagagtgaagctggcgtgtgtgaattggccatcacatttgcagcctgtggtggcggaagggctgagcaagcagagtgtagatgacttggccaagaagataatggcaatgggtttcaactgtgttaggtttacttggccacttgatctagctacaaatgagacgttggctaataatgttactgtgagacaatcttttcaaagtcttggtcttaatgatgacatttctggtttcgaaacaaagaacccatccatgattgatcttcccctcattgaagcttacaagaaggtggtagctaagttgggaaacaataatgtgatggtgatattagacaaccacgtgaccaagccagggtggtgttgtggctacaacgacggcaacggtttctttggtgacactttctttgaccctactacgtggatcgccggtctgaccaagatagccatgactttcaaaggtgccactaatgtcgttggcatgagcctcagaaacgaacttagaggaccaaaacaaaacgtcgatgattggttcaagtacatgcaacaaggggccgaagcagttcacgaagcaaaccctaatgtacttgtaatcctttctggcctcagctacgacaccgacctctcatttgtccgatcacgacacgtaaacctaactttcactagaaaactcgtgtttgagctccatcggtactctttcaccaacacaaacacatggagttccaaaaaccctaacgaggcatgcggtgagattctgaaaagcatcgagaacgggggcggtttcaatctccgtgacttcccggtgtttcttagcgagtttggaatcgacttgagaggcaaaaatgttaacgataatcgctacattggatgtatattaggttgggccgcggaaaatgacgtagattggtcgatttggactcttcaaggaagttactatctcagagaaggtgtggtcggaatgagtgagttttacggtatcttggattcggattgggttcgtgttcgaagccaaagtttcttgcaaagattgtctctgattctatccccgcttcaaggaccaggctctcaatccaaagtctacaatcttgttttccacccgttaaccggactttgcatgctacaaagtatcttagatccaaccaaggtcactctcggtctatgtaatgaatctcaaccatggagctacactcctcagaacaccctgacactcaaagacaagtccctatgcttagagagcaccgggccgaatgcgccggttaagctcagtgaaacgagttgctcgagccctaatttgtcagaatgggagaccatctcagcctctaatatgctcttagctgctaaatcaaccaataactcactttgccttgacgtggatgaaacaaataacctcatggctagtaactgcaagtgtgtgaagggcgaagacagctcgtgtgatccgataagccagtggttcaagattgttaaagttagtaaataa

SEQ ID NO: 97299 - protein, 508 aa, Arabidopsis thaliana
  peptide (1)..(508): Ceres Seq. ID no. 12736953
  misc_feature (10)..(328): Pfam Name: Cellulase (glycosyl hydrolase family 5) Pfam Description: Cellulase (glycosyl hydrolase family 5)
  misc_feature (1)..(508): Homolog of NCBI NO: 15231514 NR Description: glycosyl hydrolase family 5/cellulase; protein At3g26140.1 [Arabidopsis thaliana] >gi|11994432|dbj|BAB02434.1|
  misc_feature (1)..(508): Homolog of NCBI NO: 15222185 NR Description: glycosyl hydrolase family 5/cellulase; protein At1g13130.1 [Arabidopsis thaliana] >gi|25402755|pir||E86265
  misc_feature (2)..(504): Homolog of NCBI NO: 11994430 NR Description: gene_id:MTC11.2~unknown protein [Arabidopsis
  misc_feature (3)..(503): Homolog of NCBI NO: 15237972 NR Description: glycosyl hydrolase family 5/cellulase; protein At5g17500.1 [Arabidopsis thaliana] >gi|11357940|pir||T51476
  misc_feature (2)..(504): Homolog of NCBI NO: 15231513 NR Description: glycosyl hydrolase family 5/cellulase; protein
  misc_feature (4)..(508): Homolog of NCBI NO: 38345244 NR Description: OSJNBb0011N17.5 [Oryza sativa (japonica
  misc_feature (4)..(508): Homolog of NCBI NO: 38345245 NR Description: OSJNBb0011N17.6 [Oryza sativa (japonica
  misc_feature (75)..(504): Homolog of NCBI NO: 38345246 NR Description: OSJNBb0011N17.7 [Oryza sativa (japonica
  misc_feature (2)..(93): Homolog of NCBI NO: 38345246 NR Description: OSJNBb0011N17.7 [Oryza sativa (japonica
  misc_feature (2)..(332): Homolog of NCBI NO: 15237397 NR Description: glycosyl hydrolase family 5/cellulase; protein At5g16700.1 [Arabidopsis thaliana] >gi|11357811|pir||T51502
MAYPLSTNSRWIIDEKGQRVKLACVNWPSHLQPVVAEGLSKQSVDDLAKKIMAMGFNCVRFTWPLDLATNETLANNVTVRQSFQSLGLNDDISGFETKNPSMIDLPLIEAYKKVVAKLGNNNVMVILDNHVTKPGWCCGYNDGNGFFGDTFFDPTTWIAGLTKIAMTFKGATNVVGMSLRNELRGPKQNVDDWFKYMQQGAEAVHEANPNVLVILSGLSYDTDLSFVRSRHVNLTFTRKLVFELHRYSFTNTNTWSSKNPNEACGEILKSIENGGGFNLRDFPVFLSEFGIDLRGKNVNDNRYIGCILGWAAENDVDWSIWTLQGSYYLREGVVGMSEFYGILDSDWVRVRSQSFLQRLSLILSPLQGPGSQSKVYNLVFHPLTGLCMLQSILDPTKVTLGLCNESQPWSYTPQNTLTLKDKSLCLESTGPNAPVKLSETSCSSPNLSEWETISASNMLLAAKSTNNSLCLDVDETNNLMASNCKCVKGEDSSCDPISQWFKIVKVSK

SEQ ID NO: 97300 - protein, 457 aa, Arabidopsis thaliana
  peptide (1)..(457): Ceres Seq. ID no. 12736954
  misc_feature (1)..(277): Pfam Name: Cellulase (glycosyl hydrolase family 5) Pfam Description: Cellulase (glycosyl hydrolase family 5)
  misc_feature (1)..(457): Homolog of NCBI NO: 15231514 NR Description: glycosyl hydrolase family 5/cellulase; protein At3g26140.1 [Arabidopsis thaliana] >gi|11994432|dbj|BAB02434.1|
  misc_feature (1)..(457): Homolog of NCBI NO: 15222185 NR Description: glycosyl hydrolase family 5/cellulase; protein At1g13130.1 [Arabidopsis thaliana] >gi|25402755|pir||E86265
  misc_feature (1)..(453): Homolog of NCBI NO: 11994430 NR Description: gene_id:MTC11.2~unknown protein [Arabidopsis
  misc_feature (1)..(452): Homolog of NCBI NO: 15237972 NR Description: glycosyl hydrolase family 5/cellulase; protein At5g17500.1 [Arabidopsis thaliana] >gi|11357940|pir||T51476
  misc_feature (1)..(453): Homolog of NCBI NO: 15231513 NR Description: glycosyl hydrolase family 5/cellulase; protein
  misc_feature (1)..(457): Homolog of NCBI NO: 38345244 NR Description: OSJNBb0011N17.5 [Oryza sativa (japonica
  misc_feature (1)..(457): Homolog of NCBI NO: 38345245 NR Description: OSJNBb0011N17.6 [Oryza sativa (japonica
  misc_feature (24)..(453): Homolog of NCBI NO: 38345246 NR Description: OSJNBb0011N17.7 [Oryza sativa (japonica
  misc_feature (1)..(42): Homolog of NCBI NO: 38345246 NR Description: OSJNBb0011N17.7 [Oryza sativa (japonica
  misc_feature (1)..(281): Homolog of NCBI NO: 15237397 NR Description: glycosyl hydrolase family 5/cellulase; protein At5g16700.1 [Arabidopsis thaliana] >gi|11357811|pir||T51502
MAMGFNCVRFTWPLDLATNETLANNVTVRQSFQSLGLNDDISGFETKNPSMIDLPLIEAYKKVVAKLGNNNVMVILDNHVTKPGWCCGYNDGNGFFGDTFFDPTTWIAGLTKIAMTFKGATNVVGMSLRNELRGPKQNVDDWFKYMQQGAEAVHEANPNVLVILSGLSYDTDLSFVRSRHVNLTFTRKLVFELHRYSFTNTNTWSSKNPNEACGEILKSIENGGGFNLRDFPVFLSEFGIDLRGKNVNDNRYIGCILGWAAENDVDWSIWTLQGSYYLREGVVGMSEFYGILDSDWVRVRSQSFLQRLSLILSPLQGPGSQSKVYNLVFHPLTGLCMLQSILDPTKVTLGLCNESQPWSYTPQNTLTLKDKSLCLESTGPNAPVKLSETSCSSPNLSEWETISASNMLLAAKSTNNSLCLDVDETNNLMASNCKCVKGEDSSCDPISQWFKIVKVSK

SEQ ID NO: 97301 - protein, 455 aa, Arabidopsis thaliana
  peptide (1)..(455): Ceres Seq. ID no. 12736955
  misc_feature (1)..(275): Pfam Name: Cellulase (glycosyl hydrolase family 5) Pfam Description: Cellulase (glycosyl hydrolase family 5)
  misc_feature (1)..(455): Homolog of NCBI NO: 15231514 NR Description: glycosyl hydrolase family 5/cellulase; protein At3g26140.1 [Arabidopsis thaliana] >gi|11994432|dbj|BAB02434.1|
  misc_feature (1)..(455): Homolog of NCBI NO: 15222185 NR Description: glycosyl hydrolase family 5/cellulase; protein At1g13130.1 [Arabidopsis thaliana] >gi|25402755|pir||E86265
  misc_feature (1)..(451): Homolog of NCBI NO: 11994430 NR Description: gene_id:MTC11.2~unknown protein [Arabidopsis
  misc_feature (1)..(450): Homolog of NCBI NO: 15237972 NR Description: glycosyl hydrolase family 5/cellulase; protein At5g17500.1 [Arabidopsis thaliana] >gi|11357940|pir||T51476
  misc_feature (1)..(451): Homolog of NCBI NO: 15231513 NR Description: glycosyl hydrolase family 5/cellulase; protein
  misc_feature (1)..(455): Homolog of NCBI NO: 38345244 NR Description: OSJNBb0011N17.5 [Oryza sativa (japonica
  misc_feature (1)..(455): Homolog of NCBI NO: 38345245 NR Description: OSJNBb0011N17.6 [Oryza sativa (japonica
  misc_feature (22)..(451): Homolog of NCBI NO: 38345246 NR Description: OSJNBb0011N17.7 [Oryza sativa (japonica
  misc_feature (1)..(40): Homolog of NCBI NO: 38345246 NR Description: OSJNBb0011N17.7 [Oryza sativa (japonica
  misc_feature (1)..(279): Homolog of NCBI NO: 15237397 NR Description: glycosyl hydrolase family 5/cellulase; protein At5g16700.1 [Arabidopsis thaliana] >gi|11357811|pir||T51502
MGFNCVRFTWPLDLATNETLANNVTVRQSFQSLGLNDDISGFETKNPSMIDLPLIEAYKKVVAKLGNNNVMVILDNHVTKPGWCCGYNDGNGFFGDTFFDPTTWIAGLTKIAMTFKGATNVVGMSLRNELRGPKQNVDDWFKYMQQGAEAVHEANPNVLVILSGLSYDTDLSFVRSRHVNLTFTRKLVFELHRYSFTNTNTWSSKNPNEACGEILKSIENGGGFNLRDFPVFLSEFGIDLRGKNVNDNRYIGCILGWAAENDVDWSIWTLQGSYYLREGVVGMSEFYGILDSDWVRVRSQSFLQRLSLILSPLQGPGSQSKVYNLVFHPLTGLCMLQSILDPTKVTLGLCNESQPWSYTPQNTLTLKDKSLCLESTGPNAPVKLSETSCSSPNLSEWETISASNMLLAAKSTNNSLCLDVDETNNLMASNCKCVKGEDSSCDPISQWFKIVKVSK

SEQ ID NO: 97302 - DNA, 1509 bp, Arabidopsis thaliana
  misc_feature (1)..(1509): Ceres Seq. ID no. 12736956
  misc_feature: MA Experiment ID: 20000182 Result: Up-regulated in Transcription
  misc_feature: MA Experiment 20000182 PARAMETER Experiment Name: At_2mM_SA_P Parameter: Age (day) Value: 14
  misc_feature: MA Experiment 20000182 PARAMETER Experiment Name: At_2mM_SA_P Parameter: Organism Value: A. thaliana
  misc_feature: MA Experiment 20000182 PARAMETER Experiment Name: At_2mM_SA_P Parameter: Plant Line Value: WS
  misc_feature: MA Experiment 20000182 PARAMETER Experiment Name: At_2mM_SA_P Parameter: Timepoint (hr) Value: 6
  misc_feature: MA Experiment 20000182 PARAMETER Experiment Name: At_2mM_SA_P Parameter: Tissue Value: Aerial
  misc_feature: MA Experiment 20000182 PARAMETER Experiment Name: At_2mM_SA_P Parameter: Treatment Value: 2mM SA vs. No Treatment
  misc_feature: MA Experiment ID: 20000184 Result: Down-regulated in Transcription
  misc_feature: MA Experiment 20000184 PARAMETER Experiment Name: At_Shoots__P Parameter: Age (day) Value: 7
  misc_feature: MA Experiment 20000184 PARAMETER Experiment Name: At_Shoots__P Parameter: Tissue Value: Shoots vs. Whole Plant
  misc_feature: MA Experiment ID: 20000234 Result: Down-regulated in Transcription
  misc_feature: MA Experiment 20000234 PARAMETER Experiment Name: At_Siliques_P Parameter: Age (day) Value: 21
  misc_feature: MA Experiment 20000234 PARAMETER Experiment Name: At_Siliques_P Parameter: Organism Value: A. thaliana
  misc_feature: MA Experiment 20000234 PARAMETER Experiment Name: At_Siliques_P Parameter: Plant Line Value: WS
  misc_feature: MA Experiment 20000234 PARAMETER Experiment Name: At_Siliques_P Parameter: Tissue Value: Less Than 5mm Siliques vs. Whole Plant
  misc_feature: MA Experiment ID: 20000235 Result: Down-regulated in Transcription
  misc_feature: MA Experiment 20000235 PARAMETER Experiment Name: At_Siliques_P Parameter: Age (day) Value: 21
  misc_feature: MA Experiment 20000235 PARAMETER Experiment Name: At_Siliques_P Parameter: Organism Value: A. thaliana
  misc_feature: MA Experiment 20000235 PARAMETER Experiment Name: At_Siliques_P Parameter: Plant Line Value: WS
  misc_feature: MA Experiment 20000235 PARAMETER Experiment Name: At_Siliques_P Parameter: Tissue Value: 5-10mm Siliques vs. Whole Plant
  misc_feature: MA Experiment ID: 20000265 Result: Down-regulated in Transcription
  misc_feature: MA Experiment 20000265 PARAMETER Experiment Name: At_Open_Flower_P Parameter: Age (day) Value: 21
  misc_feature: MA Experiment 20000265 PARAMETER Experiment Name: At_Open_Flower_P Parameter: Plant Line Value: WS
  misc_feature: MA Experiment 20000265 PARAMETER Experiment Name: At_Open_Flower_P Parameter: Tissue Value: Closed Flower vs. Whole Plant
  misc_feature: MA Experiment ID: 20000286 Result: Down-regulated in Transcription
  misc_feature: MA Experiment 20000286 PARAMETER Experiment Name: At_Open_Flower_P Parameter: Age (day) Value: 21
  misc_feature: MA Experiment 20000286 PARAMETER Experiment Name: At_Open_Flower_P Parameter: Plant Line Value: WS
  misc_feature: MA Experiment 20000286 PARAMETER Experiment Name: At_Open_Flower_P Parameter: Tissue Value: Half Open vs. Whole Plant
  misc_feature: MA Experiment ID: 20000438 Result: Down-regulated in Transcription
  misc_feature: MA Experiment 20000438 PARAMETER Experiment Name: At_Shoots__P Parameter: Age (day) Value: 14
  misc_feature: MA Experiment 20000438 PARAMETER Experiment Name: At_Shoots__P Parameter: Tissue Value: Shoots vs. Whole Plant
  misc_feature: MA Experiment ID: 20001560 Result: Down-regulated in Transcription
  misc_feature: MA Experiment 20001560 PARAMETER Experiment Name: At_Drought_Soil_Dry_P Parameter: Age (day) Value: 28
  misc_feature: MA Experiment 20001560 PARAMETER Experiment Name: At_Drought_Soil_Dry_P Parameter: Organism Value: A. thaliana
  misc_feature: MA Experiment 20001560 PARAMETER Experiment Name: At_Drought_Soil_Dry_P Parameter: Plant Line Value: WS
  misc_feature: MA Experiment 20001560 PARAMETER Experiment Name: At_Drought_Soil_Dry_P Parameter: Post Timepoint (hr) Value: None
  misc_feature: MA Experiment 20001560 PARAMETER Experiment Name: At_Drought_Soil_Dry_P Parameter: Post-Treatment Value: None
  misc_feature: MA Experiment 20001560 PARAMETER Experiment Name: At_Drought_Soil_Dry_P Parameter: Timepoint (day) Value: 14
  misc_feature: MA Experiment 20001560 PARAMETER Experiment Name: At_Drought_Soil_Dry_P Parameter: Treatment Value: Drought vs. No Drought
atggcaatctctttactctgtctttttctcatcaccttagtttcgttaatctttgtcgtcaagaagatcaaacactctaaatgggatcttcctccaagccctcctacgtttccggttatcggaaacttacaccaagttggagaattgcctcacaggtcatttcaacgtctagccgaaagaaccgggcatgttatgcttcttcactttgggtttgtccctgtaactgtaatctcatcgagggaagcagctgaagaagttcttagaactcatgacctaaagtgttgcaccaggcctaaacttgtcgggtcgaggctaatctctcggggttttaaagatatcagttttactccatacggtgaagagtggagagagcggcgtaagttcttggtgcgcgagcttttctgtttcaaaaaggttcagtattttgggtatatcgtagaagaagaatgtaacttgctggtcaagaaactgacggaatcagccgtaggtcggcctccggttgatttgagtaaatcccttttctggctagctgcgagtatcctgtttagaattgcttttggacagagtttccacgacaacaagtttatcgatgaagacaagatcgatgaacttatatttgaaaccgagacagctcaggctagtttcacttgctctgatttcttccctatcgccggccttggatggctcgctgactggatttccgggaaacacaggtggctcaacaatgtcttcttcaagctcgatgctctgtttcaacgtgtgattgatgatcattcagatcctggaagatggaaagatcacaaagatatcgtcgatgtaatgttggatgtgatgcataaacaaggcaaagatgattctttgaggctcacaatagatcatattaaggggtttctcacgaatataataatcgcagggatagacacaggagctcttaccatgatatgggcaatgacagagctcgcaagaaaccccgaactaatgaagaacgttcaaggcgagattagagacagctttggcaacaataaggagagaatcaccaaagaagatctaaataaagttcctttcttaaacatggtgatcaaggaaacattcagattacacccagtagctcctcttctgctcccaagggaaacaatgactcacatcaaggttcaaggctatgatattcctccaaagagacggatcttagtcaacacttgggcgataggaagagatcctacactctggataaatccggaagagtttaaccccgagaggtttatcaacaaccctgtagattatagaggacaacatttcgagctcttaccgttcgggtctggtcgaaggatatgtcccgggatggggttggggatcactatagtggaattgggactcttgaacttactatacttcttcgattggagagcacctgatgggatgacacataaagacatcgatacagaagaagctggtatacttacagtagtcaagaaagtacctctcaaacttgtcccagttcgagttcagtga

SEQ ID NO: 97303 - protein, 502 aa, Arabidopsis thaliana
  peptide (1)..(502): Ceres Seq. ID no. 12736957
  misc_feature (31)..(496): Pfam Name: Cytochrome P450 Pfam Description: Cytochrome P450
  misc_feature (1)..(502): Homolog of NCBI NO: 15231516 NR Description: cytochrome p450 family; protein id: At3g26150.1 thaliana] >gi|13878389|sp|Q9LTM7|C72G_ARATH Cytochrome P450 71B16
  misc_feature (1)..(501): Homolog of NCBI NO: 15231517 NR Description: cytochrome p450 family; protein id: At3g26160.1 thaliana] >gi|13878388|sp|Q9LTM6|C72H_ARATH Cytochrome P450 71B17
  misc_feature (1)..(502): Homolog of NCBI NO: 15231520 NR Description: cytochrome p450 family; protein id: At3g26170.1, by cDNA: 262802. [Arabidopsis thaliana] Cytochrome P450 71B19 >gi|11994436|dbj|BAB02438.1| cytochrome
  misc_feature (1)..(502): Homolog of NCBI NO: 21554748 NR Description: cytochrome P450, putative [Arabidopsis thaliana]
  misc_feature (1)..(502): Homolog of NCBI NO: 15231522 NR Description: cytochrome p450 family; protein id: At3g26180.1, by cDNA: gi_15810462, supported by cDNA: gi_16226473 [Arabidopsis >gi|13878386|sp|Q9LTM3|C72K_ARATH Cytochrome P450 71B20
  misc_feature (1)..(502): Homolog of NCBI NO: 16226474 NR Description: AT3g26180/MTC11_8 [Arabidopsis thaliana]
  misc_feature (34)..(252): Homolog of NCBI NO: 11994435 NR Description: cytochrome P450 [Arabidopsis thaliana]
  misc_feature (300)..(502): Homolog of NCBI NO: 11994435 NR Description: cytochrome P450 [Arabidopsis thaliana]
  misc_feature (1)..(498): Homolog of NCBI NO: 15231525 NR Description: cytochrome p450 family; protein id: At3g26200.1, by cDNA: gi_13430717 [Arabidopsis thaliana] Cytochrome P450 71B22 >gi|11994439|dbj|BAB02441.1| cytochrome
  misc_feature (3)..(499): Homolog of NCBI NO: 15222182 NR Description: cytochrome p450 family; protein id: At1g13110.1, by cDNA: gi_18087622 [Arabidopsis thaliana]
MAISLLCLFLITLVSLIFVVKKIKHSKWDLPPSPPTFPVIGNLHQVGELPHRSFQRLAERTGHVMLLHFGFVPVTVISSREAAEEVLRTHDLKCCTRPKLVGSRLISRGFKDISFTPYGEEWRERRKFLVRELFCFKKVQYFGYIVEEECNLLVKKLTESAVGRPPVDLSKSLFWLAASILFRIAFGQSFHDNKFIDEDKIDELIFETETAQASFTCSDFFPIAGLGWLADWISGKHRWLNNVFFKLDALFQRVIDDHSDPGRWKDHKDIVDVMLDVMHKQGKDDSLRLTIDHIKGFLTNIIIAGIDTGALTMIWAMTELARNPELMKNVQGEIRDSFGNNKERITKEDLNKVPFLNMVIKETFRLHPVAPLLLPRETMTHIKVQGYDIPPKRRILVNTWAIGRDPTLWINPEEFNPERFINNPVDYRGQHFELLPFGSGRRICPGMGLGITIVELGLLNLLYFFDWRAPDGMTHKDIDTEEAGILTVVKKVPLKLVPVRVQ

SEQ ID NO: 97304 - protein, 438 aa, Arabidopsis thaliana
  peptide (1)..(438): Ceres Seq. ID no. 12736958
  misc_feature (1)..(432): Pfam Name: Cytochrome P450 Pfam Description: Cytochrome P450
  misc_feature (1)..(438): Homolog of NCBI NO: 15231516 NR Description: cytochrome p450 family; protein id: At3g26150.1 thaliana] >gi|13878389|sp|Q9LTM7|C72G_ARATH Cytochrome P450 71B16
  misc_feature (1)..(437): Homolog of NCBI NO: 15231517 NR Description: cytochrome p450 family; protein id: At3g26160.1 thaliana] >gi|13878388|sp|Q9LTM6|C72H_ARATH Cytochrome P450 71B17
  misc_feature (1)..(438): Homolog of NCBI NO: 15231520 NR Description: cytochrome p450 family; protein id: At3g26170.1, by cDNA: 262802. [Arabidopsis thaliana] Cytochrome P450 71B19 >gi|11994436|dbj|BAB02438.1| cytochrome
  misc_feature (1)..(438): Homolog of NCBI NO: 21554748 NR Description: cytochrome P450, putative [Arabidopsis thaliana]
  misc_feature (1)..(438): Homolog of NCBI NO: 15231522 NR Description: cytochrome p450 family; protein id: At3g26180.1, by cDNA: gi_15810462, supported by cDNA: gi_16226473 [Arabidopsis >gi|13878386|sp|Q9LTM3|C72K_ARATH Cytochrome P450 71B20
  misc_feature (1)..(438): Homolog of NCBI NO: 16226474 NR Description: AT3g26180/MTC11_8 [Arabidopsis thaliana]
  misc_feature (1)..(188): Homolog of NCBI NO: 11994435 NR Description: cytochrome P450 [Arabidopsis thaliana]
  misc_feature (236)..(438): Homolog of NCBI NO: 11994435 NR Description: cytochrome P450 [Arabidopsis thaliana]
  misc_feature (1)..(434): Homolog of NCBI NO: 15231525 NR Description: cytochrome p450 family; protein id: At3g26200.1, by cDNA: gi_13430717 [Arabidopsis thaliana] Cytochrome P450 71B22 >gi|11994439|dbj|BAB02441.1| cytochrome
  misc_feature (1)..(435): Homolog of NCBI NO: 15222182 NR Description: cytochrome p450 family; protein id: At1g13110.1, by cDNA: gi_18087622 [Arabidopsis thaliana]
MLLHFGFVPVTVISSREAAEEVLRTHDLKCCTRPKLVGSRLISRGFKDISFTPYGEEWRERRKFLVRELFCFKKVQYFGYIVEEECNLLVKKLTESAVGRPPVDLSKSLFWLAASILFRIAFGQSFHDNKFIDEDKIDELIFETETAQASFTCSDFFPIAGLGWLADWISGKHRWLNNVFFKLDALFQRVIDDHSDPGRWKDHKDIVDVMLDVMHKQGKDDSLRLTIDHIKGFLTNIIIAGIDTGALTMIWAMTELARNPELMKNVQGEIRDSFGNNKERITKEDLNKVPFLNMVIKETFRLHPVAPLLLPRETMTHIKVQGYDIPPKRRILVNTWAIGRDPTLWINPEEFNPERFINNPVDYRGQHFELLPFGSGRRICPGMGLGITIVELGLLNLLYFFDWRAPDGMTHKDIDTEEAGILTVVKKVPLKLVPVRVQ

SEQ ID NO: 97305 - DNA, 1500 bp, Arabidopsis thaliana
  misc_feature (1)..(1500): Ceres Seq. ID no. 12736963
  misc_feature: MA Experiment ID: 20000185 Result: Down-regulated in Transcription
  misc_feature: MA Experiment 20000185 PARAMETER Experiment Name: At_Roots__P Parameter: Age (day) Value: 7 vs. 21
  misc_feature: MA Experiment 20000185 PARAMETER Experiment Name: At_Roots__P Parameter: Organism Value: A. thaliana
  misc_feature: MA Experiment 20000185 PARAMETER Experiment Name: At_Roots__P Parameter: Tissue Value: Roots vs. Whole Plant
  misc_feature: MA Experiment ID: 20000265 Result: Down-regulated in Transcription
  misc_feature: MA Experiment 20000265 PARAMETER Experiment Name: At_Open_Flower_P Parameter: Age (day) Value: 21
  misc_feature: MA Experiment 20000265 PARAMETER Experiment Name: At_Open_Flower_P Parameter: Plant Line Value: WS
  misc_feature: MA Experiment 20000265 PARAMETER Experiment Name: At_Open_Flower_P Parameter: Tissue Value: Closed Flower vs. Whole Plant
  misc_feature: MA Experiment ID: 20000439 Result: Down-regulated in Transcription
  misc_feature: MA Experiment 20000439 PARAMETER Experiment Name: At_Roots__P Parameter: Age (day) Value: 14 vs. 21
  misc_feature: MA Experiment 20000439 PARAMETER Experiment Name: At_Roots__P Parameter: Organism Value: A. thaliana
  misc_feature: MA Experiment 20000439 PARAMETER Experiment Name: At_Roots__P Parameter: Tissue Value: Roots vs. Whole Plant
  misc_feature: MA Experiment ID: 20001560 Result: Down-regulated in Transcription
  misc_feature: MA Experiment 20001560 PARAMETER Experiment Name: At_Drought_Soil_Dry_P Parameter: Age (day) Value: 28
  misc_feature: MA Experiment 20001560 PARAMETER Experiment Name: At_Drought_Soil_Dry_P Parameter: Organism Value: A. thaliana
  misc_feature: MA Experiment 20001560 PARAMETER Experiment Name: At_Drought_Soil_Dry_P Parameter: Plant Line Value: WS
  misc_feature: MA Experiment 20001560 PARAMETER Experiment Name: At_Drought_Soil_Dry_P Parameter: Post Timepoint (hr) Value: None
  misc_feature: MA Experiment 20001560 PARAMETER Experiment Name: At_Drought_Soil_Dry_P Parameter: Post-Treatment Value: None
  misc_feature: MA Experiment 20001560 PARAMETER Experiment Name: At_Drought_Soil_Dry_P Parameter: Timepoint (day) Value: 14
  misc_feature: MA Experiment 20001560 PARAMETER Experiment Name: At_Drought_Soil_Dry_P Parameter: Treatment Value: Drought vs. No Drought
atgtcgatctttctctgtttcctcttgctcttacctctctttcttgttttttacaaaaggcttttaccgtcgaaagggaagcttcctccgggacctataagtcttccgatcatcggaaacttgcaccaacttggaaaatctcttcatagatctttttataaactctcccaagagtatggacccgtgatgtttcttcgtttcggtgtagtccctgtggtagtgttctccacaaaagaagcagccgaagaagttttaaagactcacgatctcgagacttgcacccgaccaaagctatctgccaccgggttatttacatataacttcaaagacattggctttgcacaatacggggaagactggagagagatgagaaagcttgcgatgctcgagctctttagctcaaaaaagttaaaggctttccggtatattagagaagaagagagtgaattgctcgtcaagaaagtcacagaatctgctcaaacacaaactttggtggatttgagaaaggctcttttctcttataccgctagtatcgtatgtagactcgctttcggacagaacttccatgagtgcgattttgtcgatatggataaagttgaagagcttgtgcttgagtctgagaccaatcttggctcattcgcattcattgacttcttccctgccggtcttgggtgggctattgatcggatctccggtcaacattcgaggttgcacaaagcctttgctagactaagtaatttctttcaacatgtgatcgatgatcatttgaagccctggcaatcggaagatcattcagacattgttggtgtcatgttggatatgatcaataaagagagcaaagtcggctcttttaaagtcacttatgatcatctcaaaggagtcatgtcggatgtgtttttggcgggagtgaacgcaggagcgatcacaatgatatgggcattgacagagttaactagacatcctagagtgatgaagaaacttcaacaagagattcgagaattactcggagacaacaaagaaaaaatcacggagcaggatctcgaaaaagttcactacctgaagcttgtgatccaagaaacattccgactacacccacccgctcctctcttgctcccaagagagacaatgtctgatgtgaagattcaaggctacaacattcccaaaaacacaatgatcgagatcaacacttacgcaataggacgtgatcccaactgctggacaaatcctaacgagtttatccctgagaggtttgttgatagccctatcgactacaagggtcagcattttgaattgttgccattcggtggaggccgtaggatctgtcccgggatggccacgggaatgaccatcgttgagctcggcctccttaacgttctttacttcttcgattggagtttaccctatggaatggccattgcagacattaacatggaagaagctggagctttcgtcattgccaagaaagtcccacttgagctcgtgccagttcttcattactga

SEQ ID NO: 97306 - protein, 499 aa, Arabidopsis thaliana
  peptide (1)..(499): Ceres Seq. ID no. 12736964
  misc_feature (29)..(493): Pfam Name: Cytochrome P450 Pfam Description: Cytochrome P450
  misc_feature (1)..(499): Homolog of NCBI NO: 15231524 NR Description: cytochrome p450 family; protein id: At3g26190.1 thaliana] >gi|13878385|sp|Q9LTM2|C72L_ARATH Cytochrome P450 71B21
  misc_feature (1)..(498): Homolog of NCBI NO: 15231525 NR Description: cytochrome p450 family; protein id: At3g26200.1, by cDNA: gi_13430717 [Arabidopsis thaliana] Cytochrome P450 71B22 >gi|11994439|dbj|BAB02441.1| cytochrome
  misc_feature (1)..(498): Homolog of NCBI NO: 30923413 NR Description: Cytochrome P450 71B38
  misc_feature (1)..(498): Homolog of NCBI NO: 15229913 NR Description: cytochrome p450 family; protein id: At3g44250.1
  misc_feature (1)..(498): Homolog of NCBI NO: 15231782 NR Description: cytochrome P450 monooxygenase; protein id: supported by cDNA: gi_3164131 [Arabidopsis thaliana]
  misc_feature (2)..(497): Homolog of NCBI NO: 13878369 NR Description: CYTOCHROME P450 71B8
  misc_feature (1)..(497): Homolog of NCBI NO: 15231786 NR Description: cytochrome p450 family; protein id: At3g53300.1, by cDNA: gi_15810490 [Arabidopsis thaliana] Cytochrome P450 71B31 >gi|11249493|pir||T46176 probable
  misc_feature (1)..(497): Homolog of NCBI NO: 15810491 NR Description: putative cytochrome P450 protein [Arabidopsis
  misc_feature (63)..(498): Homolog of NCBI NO: 15724230 NR Description: AT3g53280/T4D2_200 [Arabidopsis thaliana]
  misc_feature (63)..(498): Homolog of NCBI NO: 22655216 NR Description: cytochrome P450 71B5 [Arabidopsis thaliana]
MSIFLCFLLLLPLFLVFYKRLLPSKGKLPPGPISLPIIGNLHQLGKSLHRSFYKLSQEYGPVMFLRFGVVPVVVFSTKEAAEEVLKTHDLETCTRPKLSATGLFTYNFKDIGFAQYGEDWREMRKLAMLELFSSKKLKAFRYIREEESELLVKKVTESAQTQTLVDLRKALFSYTASIVCRLAFGQNFHECDFVDMDKVEELVLESETNLGSFAFIDFFPAGLGWAIDRISGQHSRLHKAFARLSNFFQHVIDDHLKPWQSEDHSDIVGVMLDMINKESKVGSFKVTYDHLKGVMSDVFLAGVNAGAITMIWALTELTRHPRVMKKLQQEIRELLGDNKEKITEQDLEKVHYLKLVIQETFRLHPPAPLLLPRETMSDVKIQGYNIPKNTMIEINTYAIGRDPNCWTNPNEFIPERFVDSPIDYKGQHFELLPFGGGRRICPGMATGMTIVELGLLNVLYFFDWSLPYGMAIADINMEEAGAFVIAKKVPLELVPVLHY

SEQ ID NO: 97307 - protein, 437 aa, Arabidopsis thaliana
  peptide (1)..(437): Ceres Seq. ID no. 12736965
  misc_feature (1)..(431): Pfam Name: Cytochrome P450 Pfam Description: Cytochrome P450
  misc_feature (1)..(437): Homolog of NCBI NO: 15231524 NR Description: cytochrome p450 family; protein id: At3g26190.1 thaliana] >gi|13878385|sp|Q9LTM2|C72L_ARATH Cytochrome P450 71B21
  misc_feature (1)..(436): Homolog of NCBI NO: 15231525 NR Description: cytochrome p450 family; protein id: At3g26200.1, by cDNA: gi_13430717 [Arabidopsis thaliana] Cytochrome P450 71B22 >gi|11994439|dbj|BAB02441.1| cytochrome
  misc_feature (1)..(436): Homolog of NCBI NO: 30923413 NR Description: Cytochrome P450 71B38
  misc_feature (1)..(436): Homolog of NCBI NO: 15229913 NR Description: cytochrome p450 family; protein id: At3g44250.1
  misc_feature (1)..(436): Homolog of NCBI NO: 15231782 NR Description: cytochrome P450 monooxygenase; protein id: supported by cDNA: gi_3164131 [Arabidopsis thaliana]
  misc_feature (1)..(435): Homolog of NCBI NO: 13878369 NR Description: CYTOCHROME P450 71B8
  misc_feature (1)..(435): Homolog of NCBI NO: 15231786 NR Description: cytochrome p450 family; protein id: At3g53300.1, by cDNA: gi_15810490 [Arabidopsis thaliana] Cytochrome P450 71B31 >gi|11249493|pir||T46176 probable
  misc_feature (1)..(435): Homolog of NCBI NO: 15810491 NR Description: putative cytochrome P450 protein [Arabidopsis
  misc_feature (1)..(436): Homolog of NCBI NO: 15724230 NR Description: AT3g53280/T4D2_200 [Arabidopsis thaliana]
  misc_feature (1)..(436): Homolog of NCBI NO: 22655216 NR Description: cytochrome P450 71B5 [Arabidopsis thaliana]
MFLRFGVVPVVVFSTKEAAEEVLKTHDLETCTRPKLSATGLFTYNFKDIGFAQYGEDWREMRKLAMLELFSSKKLKAFRYIREEESELLVKKVTESAQTQTLVDLRKALFSYTASIVCRLAFGQNFHECDFVDMDKVEELVLESETNLGSFAFIDFFPAGLGWAIDRISGQHSRLHKAFARLSNFFQHVIDDHLKPWQSEDHSDIVGVMLDMINKESKVGSFKVTYDHLKGVMSDVFLAGVNAGAITMIWALTELTRHPRVMKKLQQEIRELLGDNKEKITEQDLEKVHYLKLVIQETFRLHPPAPLLLPRETMSDVKIQGYNIPKNTMIEINTYAIGRDPNCWTNPNEFIPERFVDSPIDYKGQHFELLPFGGGRRICPGMATGMTIVELGLLNVLYFFDWSLPYGMAIADINMEEAGAFVIAKKVPLELVPVLHY

SEQ ID NO: 97308 - protein, 377 aa, Arabidopsis thaliana
  peptide (1)..(377): Ceres Seq. ID no. 12736966
  misc_feature (1)..(371): Pfam Name: Cytochrome P450 Pfam Description: Cytochrome P450
  misc_feature (1)..(377): Homolog of NCBI NO: 15231524 NR Description: cytochrome p450 family; protein id: At3g26190.1 thaliana] >gi|13878385|sp|Q9LTM2|C72L_ARATH Cytochrome P450 71B21
  misc_feature (1)..(376): Homolog of NCBI NO: 15231525 NR Description: cytochrome p450 family; protein id: At3g26200.1, by cDNA: gi_13430717 [Arabidopsis thaliana] Cytochrome P450 71B22 >gi|11994439|dbj|BAB02441.1| cytochrome
  misc_feature (1)..(376): Homolog of NCBI NO: 30923413 NR Description: Cytochrome P450 71B38
  misc_feature (1)..(376): Homolog of NCBI NO: 15229913 NR Description: cytochrome p450 family; protein id: At3g44250.1
  misc_feature (1)..(376): Homolog of NCBI NO: 15231782 NR Description: cytochrome P450 monooxygenase; protein id: supported by cDNA: gi_3164131 [Arabidopsis thaliana]
  misc_feature (1)..(375): Homolog of NCBI NO: 13878369 NR Description: CYTOCHROME P450 71B8
  misc_feature (1)..(375): Homolog of NCBI NO: 15231786 NR Description: cytochrome p450 family; protein id: At3g53300.1, by cDNA: gi_15810490 [Arabidopsis thaliana] Cytochrome P450 71B31 >gi|11249493|pir||T46176 probable
  misc_feature (1)..(375): Homolog of NCBI NO: 15810491 NR Description: putative cytochrome P450 protein [Arabidopsis
  misc_feature (1)..(376): Homolog of NCBI NO: 15724230 NR Description: AT3g53280/T4D2_200 [Arabidopsis thaliana]
  misc_feature (1)..(376): Homolog of NCBI NO: 22655216 NR Description: cytochrome P450 71B5 [Arabidopsis thaliana]
MRKLAMLELFSSKKLKAFRYIREEESELLVKKVTESAQTQTLVDLRKALFSYTASIVCRLAFGQNFHECDFVDMDKVEELVLESETNLGSFAFIDFFPAGLGWAIDRISGQHSRLHKAFARLSNFFQHVIDDHLKPWQSEDHSDIVGVMLDMINKESKVGSFKVTYDHLKGVMSDVFLAGVNAGAITMIWALTELTRHPRVMKKLQQEIRELLGDNKEKITEQDLEKVHYLKLVIQETFRLHPPAPLLLPRETMSDVKIQGYNIPKNTMIEINTYAIGRDPNCWTNPNEFIPERFVDSPIDYKGQHFELLPFGGGRRICPGMATGMTIVELGLLNVLYFFDWSLPYGMAIADINMEEAGAFVIAKKVPLELVPVLHY

SEQ ID NO: 97309 - DNA, 1506 bp, Arabidopsis thaliana
  misc_feature (1)..(1506): Ceres Seq. ID no. 12736967
  misc_feature: MA Experiment ID: 20000171 Result: Down-regulated in Transcription
  misc_feature: MA Experiment 20000171 PARAMETER Experiment Name: At_42deg_Heat_P Parameter: Age (day) Value: 14
  misc_feature: MA Experiment 20000171 PARAMETER Experiment Name: At_42deg_Heat_P Parameter: Organism Value: A. thaliana
  misc_feature: MA Experiment 20000171 PARAMETER Experiment Name: At_42deg_Heat_P Parameter: Plant Line Value: WS
  misc_feature: MA Experiment 20000171 PARAMETER Experiment Name: At_42deg_Heat_P Parameter: Temperature (deg C) Value: 42 vs. 22
  misc_feature: MA Experiment 20000171 PARAMETER Experiment Name: At_42deg_Heat_P Parameter: Timepoint (hr) Value: 1
  misc_feature: MA Experiment 20000171 PARAMETER Experiment Name: At_42deg_Heat_P Parameter: Tissue Value: Aerial
  misc_feature: MA Experiment ID: 20000173 Result: Down-regulated in Transcription
  misc_feature: MA Experiment 20000173 PARAMETER Experiment Name: At_42deg_Heat_P Parameter: Age (day) Value: 14
  misc_feature: MA Experiment 20000173 PARAMETER Experiment Name: At_42deg_Heat_P Parameter: Organism Value: A. thaliana
  misc_feature: MA Experiment 20000173 PARAMETER Experiment Name: At_42deg_Heat_P Parameter: Plant Line Value: WS
  misc_feature: MA Experiment 20000173 PARAMETER Experiment Name: At_42deg_Heat_P Parameter: Temperature (deg C) Value: 42 vs. 22
  misc_feature: MA Experiment 20000173 PARAMETER Experiment Name: At_42deg_Heat_P Parameter: Timepoint (hr) Value: 6
  misc_feature: MA Experiment 20000173 PARAMETER Experiment Name: At_42deg_Heat_P Parameter: Tissue Value: Aerial
  misc_feature: MA Experiment ID: 20000182 Result: Up-regulated in Transcription
  misc_feature: MA Experiment 20000182 PARAMETER Experiment Name: At_2mM_SA_P Parameter: Age (day) Value: 14
  misc_feature: MA Experiment 20000182 PARAMETER Experiment Name: At_2mM_SA_P Parameter: Organism Value: A. thaliana
  misc_feature: MA Experiment 20000182 PARAMETER Experiment Name: At_2mM_SA_P Parameter: Plant Line Value: WS
  misc_feature: MA Experiment 20000182 PARAMETER Experiment Name: At_2mM_SA_P Parameter: Timepoint (hr) Value: 6
  misc_feature: MA Experiment 20000182 PARAMETER Experiment Name: At_2mM_SA_P Parameter: Tissue Value: Aerial
  misc_feature: MA Experiment 20000182 PARAMETER Experiment Name: At_2mM_SA_P Parameter: Treatment Value: 2mM SA vs. No Treatment
  misc_feature: MA Experiment ID: 20000184 Result: Down-regulated in Transcription
  misc_feature: MA Experiment 20000184 PARAMETER Experiment Name: At_Shoots__P Parameter: Age (day) Value: 7
  misc_feature: MA Experiment 20000184 PARAMETER Experiment Name: At_Shoots__P Parameter: Tissue Value: Shoots vs. Whole Plant
  misc_feature: MA Experiment ID: 20000211 Result: Down-regulated in Transcription
  misc_feature: MA Experiment 20000211 PARAMETER Experiment Name: At_0.001percent_MeJA__P Parameter: Age (day) Value: 14
  misc_feature: MA Experiment 20000211 PARAMETER Experiment Name: At_0.001percent_MeJA__P Parameter: Organism Value: A. thaliana
  misc_feature: MA Experiment 20000211 PARAMETER Experiment Name: At_0.001percent_MeJA__P Parameter: Plant Line Value: WS
  misc_feature: MA Experiment 20000211 PARAMETER Experiment Name: At_0.001percent_MeJA__P Parameter: Timepoint (hr) Value: 1
  misc_feature: MA Experiment 20000211 PARAMETER Experiment Name: At_0.001percent_MeJA__P Parameter: Tissue Value: Aerial
  misc_feature: MA Experiment 20000211 PARAMETER Experiment Name: At_0.001percent_MeJA__P Parameter: Treatment Value: 0.001percent MeJA vs. No Treatment
  misc_feature: MA Experiment ID: 20000227 Result: Down-regulated in Transcription
  misc_feature: MA Experiment 20000227 PARAMETER Experiment Name: At_Root-Tips-vs-Tops_P Parameter: Tissue Value: Root Tips vs. Root Tops
  misc_feature: MA Experiment ID: 20000234 Result: Down-regulated in Transcription
  misc_feature: MA Experiment 20000234 PARAMETER Experiment Name: At_Siliques_P Parameter: Age (day) Value: 21
  misc_feature: MA Experiment 20000234 PARAMETER Experiment Name: At_Siliques_P Parameter: Organism Value: A. thaliana
  misc_feature: MA Experiment 20000234 PARAMETER Experiment Name: At_Siliques_P Parameter: Plant Line Value: WS
  misc_feature: MA Experiment 20000234 PARAMETER Experiment Name: At_Siliques_P Parameter: Tissue Value: Less Than 5mm Siliques vs. Whole Plant
  misc_feature: MA Experiment ID: 20000235 Result: Down-regulated in Transcription
  misc_feature: MA Experiment 20000235 PARAMETER Experiment Name: At_Siliques_P Parameter: Age (day) Value: 21
  misc_feature: MA Experiment 20000235 PARAMETER Experiment Name: At_Siliques_P Parameter: Organism Value: A. thaliana
  misc_feature: MA Experiment 20000235 PARAMETER Experiment Name: At_Siliques_P Parameter: Plant Line Value: WS
  misc_feature: MA Experiment 20000235 PARAMETER Experiment Name: At_Siliques_P Parameter: Tissue Value: 5-10mm Siliques vs. Whole Plant
  misc_feature: MA Experiment ID: 20000264 Result: Down-regulated in Transcription
  misc_feature: MA Experiment 20000264 PARAMETER Experiment Name: At_Open_Flower_P Parameter: Age (day) Value: 21
  misc_feature: MA Experiment 20000264 PARAMETER Experiment Name: At_Open_Flower_P Parameter: Plant Line Value: WS
  misc_feature: MA Experiment 20000264 PARAMETER Experiment Name: At_Open_Flower_P Parameter: Tissue Value: Open Flower vs. Whole Plant
  misc_feature: MA Experiment ID: 20000265 Result: Down-regulated in Transcription
  misc_feature: MA Experiment 20000265 PARAMETER Experiment Name: At_Open_Flower_P Parameter: Age (day) Value: 21
  misc_feature: MA Experiment 20000265 PARAMETER Experiment Name: At_Open_Flower_P Parameter: Plant Line Value: WS
  misc_feature: MA Experiment 20000265 PARAMETER Experiment Name: At_Open_Flower_P Parameter: Tissue Value: Closed Flower vs. Whole Plant
  misc_feature: MA Experiment ID: 20000286 Result: Down-regulated in Transcription
  misc_feature: MA Experiment 20000286 PARAMETER Experiment Name: At_Open_Flower_P Parameter: Age (day) Value: 21
  misc_feature: MA Experiment 20000286 PARAMETER Experiment Name: At_Open_Flower_P Parameter: Plant Line Value: WS
  misc_feature: MA Experiment 20000286 PARAMETER Experiment Name: At_Open_Flower_P Parameter: Tissue Value: Half Open vs. Whole Plant
  misc_feature: MA Experiment ID: 20000437 Result: Down-regulated in Transcription
  misc_feature: MA Experiment 20000437 PARAMETER Experiment Name: At_Drought_P Parameter: Age (day) Value: 8
  misc_feature: MA Experiment 20000437 PARAMETER Experiment Name: At_Drought_P Parameter: Organism Value: A. thaliana
  misc_feature: MA Experiment 20000437 PARAMETER Experiment Name: At_Drought_P Parameter: Plant Line Value: WS
  misc_feature: MA Experiment 20000437 PARAMETER Experiment Name: At_Drought_P Parameter: Timepoint (hr) Value: 24
  misc_feature: MA Experiment 20000437 PARAMETER Experiment Name: At_Drought_P Parameter: Tissue Value: Whole Plant
  misc_feature: MA Experiment 20000437 PARAMETER Experiment Name: At_Drought_P Parameter: Treatment Value: Drought vs. No Drought
  misc_feature: MA Experiment ID: 20000438 Result: Down-regulated in Transcription
  misc_feature: MA Experiment 20000438 PARAMETER Experiment Name: At_Shoots__P Parameter: Age (day) Value: 14
  misc_feature: MA Experiment 20000438 PARAMETER Experiment Name: At_Shoots__P Parameter: Tissue Value: Shoots vs. Whole Plant
  misc_feature: MA Experiment ID: 20000443 Result: Up-regulated in Transcription
  misc_feature: MA Experiment 20000443 PARAMETER Experiment Name: At_1uM_BR-BRZ__P Parameter: Tissue Value: Shoot Apices
  misc_feature: MA Experiment 20000443 PARAMETER Experiment Name: At_1uM_BR-BRZ__P Parameter: Treatment Value: 1uM BRZ vs. No Treatment
  misc_feature: MA Experiment ID: 20000452 Result: Up-regulated in Transcription
  misc_feature: MA Experiment 20000452 PARAMETER Experiment Name: At_CS6879_Shoots-Roots_P Parameter: Age (day) Value: 14
  misc_feature: MA Experiment 20000452 PARAMETER Experiment Name: At_CS6879_Shoots-Roots_P Parameter: Organism Value: A. thaliana
  misc_feature: MA Experiment 20000452 PARAMETER Experiment Name: At_CS6879_Shoots-Roots_P Parameter: Plant Line Value: CS6879 vs. WS
  misc_feature: MA Experiment 20000452 PARAMETER Experiment Name: At_CS6879_Shoots-Roots_P Parameter: Tissue Value: Shoots
  misc_feature: MA Experiment ID: 20000496 Result: Down-regulated in Transcription
  misc_feature: MA Experiment 20000496 PARAMETER Experiment Name: At_Guard_Cells_P Parameter: Harvest Date Value: 7/19/2002
  misc_feature: MA Experiment 20000496 PARAMETER Experiment Name: At_Guard_Cells_P Parameter: Organism Value: Canola
  misc_feature: MA Experiment 20000496 PARAMETER Experiment Name: At_Guard_Cells_P Parameter: Tissue Value: Guard Cells vs. Leaves
  misc_feature: MA Experiment ID: 20000527 Result: Down-regulated in Transcription
  misc_feature: MA Experiment 20000527 PARAMETER Experiment Name: At_10percent_PEG_P Parameter: Age (day) Value: 20
  misc_feature: MA Experiment 20000527 PARAMETER Experiment Name: At_10percent_PEG_P Parameter: Organism Value: A. thaliana
  misc_feature: MA Experiment 20000527 PARAMETER Experiment Name: At_10percent_PEG_P Parameter: Plant Line Value: WS
  misc_feature: MA Experiment 20000527 PARAMETER Experiment Name: At_10percent_PEG_P Parameter: Timepoint (day) Value: 20
  misc_feature: MA Experiment 20000527 PARAMETER Experiment Name: At_10percent_PEG_P Parameter: Tissue Value: Whole Plant
  misc_feature: MA Experiment 20000527 PARAMETER Experiment Name: At_10percent_PEG_P Parameter: Treatment Value: 10percent PEG vs. No Treatment
  misc_feature: MA Experiment ID: 20000573 Result: Up-regulated in Transcription
  misc_feature: MA Experiment 20000573 PARAMETER Experiment Name: At_100uM_ABA_Mutants__P Parameter: Organism Value: A. thaliana
  misc_feature: MA Experiment 20000573 PARAMETER Experiment Name: At_100uM_ABA_Mutants__P Parameter: Plant Line Value: CS22 vs. Ler wt
  misc_feature: MA Experiment 20000573 PARAMETER Experiment Name: At_100uM_ABA_Mutants__P Parameter: Timepoint (hr) Value: N/A
  misc_feature: MA Experiment 20000573 PARAMETER Experiment Name: At_100uM_ABA_Mutants__P Parameter: Tissue Value: Whole Plant
  misc_feature: MA Experiment 20000573 PARAMETER Experiment Name: At_100uM_ABA_Mutants__P Parameter: Treatment Value: None
  misc_feature: MA Experiment ID: 20000574 Result: Up-regulated in Transcription
  misc_feature: MA Experiment 20000574 PARAMETER Experiment Name: At_100uM_ABA_Mutants__P Parameter: Organism Value: A. thaliana
  misc_feature: MA Experiment 20000574 PARAMETER Experiment Name: At_100uM_ABA_Mutants__P Parameter: Plant Line Value: CS23 vs. Ler wt
  misc_feature: MA Experiment 20000574 PARAMETER Experiment Name: At_100uM_ABA_Mutants__P Parameter: Timepoint (hr) Value: N/A
  misc_feature: MA Experiment 20000574 PARAMETER Experiment Name: At_100uM_ABA_Mutants__P Parameter: Tissue Value: Whole Plant
  misc_feature: MA Experiment 20000574 PARAMETER Experiment Name: At_100uM_ABA_Mutants__P Parameter: Treatment Value: None
  misc_feature: MA Experiment ID: 20000575 Result: Down-regulated in Transcription
  misc_feature: MA Experiment 20000575 PARAMETER Experiment Name: At_100uM_ABA_Mutants__P Parameter: Organism Value: A. thaliana
  misc_feature: MA Experiment 20000575 PARAMETER Experiment Name: At_100uM_ABA_Mutants__P Parameter: Plant Line Value: CS22
  misc_feature: MA Experiment 20000575 PARAMETER Experiment Name: At_100uM_ABA_Mutants__P Parameter: Timepoint (hr) Value: 6
  misc_feature: MA Experiment 20000575 PARAMETER Experiment Name: At_100uM_ABA_Mutants__P Parameter: Tissue Value: Whole Plant
  misc_feature: MA Experiment 20000575 PARAMETER Experiment Name: At_100uM_ABA_Mutants__P Parameter: Treatment Value: 1uM ABA vs. No Treatment
  misc_feature: MA Experiment ID: 20000709 Result: Down-regulated in Transcription
  misc_feature: MA Experiment 20000709 PARAMETER Experiment Name: At_15mM_NH4NO3_L-to-H_P Parameter: Age (hr) Value: 14
  misc_feature: MA Experiment 20000709 PARAMETER Experiment Name: At_15mM_NH4NO3_L-to-H_P Parameter: Organism Value: A. thaliana
  misc_feature: MA Experiment 20000709 PARAMETER Experiment Name: At_15mM_NH4NO3_L-to-H_P Parameter: Plant Line Value: WS
  misc_feature: MA Experiment 20000709 PARAMETER Experiment Name: At_15mM_NH4NO3_L-to-H_P Parameter: Timepoint (hr) Value: 4
  misc_feature: MA Experiment 20000709 PARAMETER Experiment Name: At_15mM_NH4NO3_L-to-H_P Parameter: Tissue Value: Aerial
  misc_feature: MA Experiment 20000709 PARAMETER Experiment Name: At_15mM_NH4NO3_L-to-H_P Parameter: Treatment Value: 15mM NH4NO3 vs. 30mM Mannitol
  misc_feature: MA Experiment ID: 20000794 Result: Down-regulated in Transcription
  misc_feature: MA Experiment 20000794 PARAMETER Experiment Name: At_Petals_P Parameter: Age (day) Value: 23-25 days
  misc_feature: MA Experiment 20000794 PARAMETER Experiment Name: At_Petals_P Parameter: Plant Line Value: WS
  misc_feature: MA Experiment 20000794 PARAMETER Experiment Name: At_Petals_P Parameter: Tissue Value: Petals vs. Whole plant
  misc_feature: MA Experiment ID: 20001248 Result: Up-regulated in Transcription
  misc_feature: MA Experiment 20001248 PARAMETER Experiment Name: At_Far-red-induction_P Parameter: Age (day) Value: 7
  misc_feature: MA Experiment 20001248 PARAMETER Experiment Name: At_Far-red-induction_P Parameter: Light Value: Far-red vs. White
  misc_feature: MA Experiment 20001248 PARAMETER Experiment Name: At_Far-red-induction_P Parameter: Organism Value: A. thaliana
  misc_feature: MA Experiment 20001248 PARAMETER Experiment Name: At_Far-red-induction_P Parameter: Plant Line Value: Columbia
  misc_feature: MA Experiment 20001248 PARAMETER Experiment Name: At_Far-red-induction_P Parameter: Timepoint (hr) Value: 4
  misc_feature: MA Experiment 20001248 PARAMETER Experiment Name: At_Far-red-induction_P Parameter: Tissue Value: Whole Plant
  misc_feature: MA Experiment ID: 20001450 Result: Up-regulated in Transcription
  misc_feature: MA Experiment 20001450 PARAMETER Experiment Name: At_Far-red-induction_P Parameter: Age (day) Value: 7
  misc_feature: MA Experiment 20001450 PARAMETER Experiment Name: At_Far-red-induction_P Parameter: Light Value: Far-red vs. White
  misc_feature: MA Experiment 20001450 PARAMETER Experiment Name: At_Far-red-induction_P Parameter: Organism Value: A. thaliana
  misc_feature: MA Experiment 20001450 PARAMETER Experiment Name: At_Far-red-induction_P Parameter: Plant Line Value: Columbia
  misc_feature: MA Experiment 20001450 PARAMETER Experiment Name: At_Far-red-induction_P Parameter: Timepoint (hr) Value: 8
  misc_feature: MA Experiment 20001450 PARAMETER Experiment Name: At_Far-red-induction_P Parameter: Tissue Value: Whole Plant
  misc_feature: MA Experiment ID: 20001554 Result: Down-regulated in Transcription
  misc_feature: MA Experiment 20001554 PARAMETER Experiment Name: At_Drought_Soil_Dry_P Parameter: Age (day) Value: 21
  misc_feature: MA Experiment 20001554 PARAMETER Experiment Name: At_Drought_Soil_Dry_P Parameter: Organism Value: A. thaliana
  misc_feature: MA Experiment 20001554 PARAMETER Experiment Name: At_Drought_Soil_Dry_P Parameter: Plant Line Value: WS
  misc_feature: MA Experiment 20001554 PARAMETER Experiment Name: At_Drought_Soil_Dry_P Parameter: Post Timepoint (hr) Value: None
  misc_feature: MA Experiment 20001554 PARAMETER Experiment Name: At_Drought_Soil_Dry_P Parameter: Post-Treatment Value: None
  misc_feature: MA Experiment 20001554 PARAMETER Experiment Name: At_Drought_Soil_Dry_P Parameter: Timepoint (day) Value: 7
  misc_feature: MA Experiment 20001554 PARAMETER Experiment Name: At_Drought_Soil_Dry_P Parameter: Treatment Value: Drought vs. No Drought
  misc_feature: MA Experiment ID: 20001555 Result: Down-regulated in Transcription
  misc_feature: MA Experiment 20001555 PARAMETER Experiment Name: At_Drought_Soil_Dry_P Parameter: Age (day) Value: 24
  misc_feature: MA Experiment 20001555 PARAMETER Experiment Name: At_Drought_Soil_Dry_P Parameter: Organism Value: A. thaliana
  misc_feature: MA Experiment 20001555 PARAMETER Experiment Name: At_Drought_Soil_Dry_P Parameter: Plant Line Value: WS
  misc_feature: MA Experiment 20001555 PARAMETER Experiment Name: At_Drought_Soil_Dry_P Parameter: Post Timepoint (hr) Value: None
  misc_feature: MA Experiment 20001555 PARAMETER Experiment Name: At_Drought_Soil_Dry_P Parameter: Post-Treatment Value: None
  misc_feature: MA Experiment 20001555 PARAMETER Experiment Name: At_Drought_Soil_Dry_P Parameter: Timepoint (day) Value: 10
  misc_feature: MA Experiment 20001555 PARAMETER Experiment Name: At_Drought_Soil_Dry_P Parameter: Treatment Value: Drought vs. No Drought
  misc_feature: MA Experiment ID: 20001556 Result: Down-regulated in Transcription
  misc_feature: MA Experiment 20001556 PARAMETER Experiment Name: At_Drought_Soil_Dry_P Parameter: Age (day) Value: 26
  misc_feature: MA Experiment 20001556 PARAMETER Experiment Name: At_Drought_Soil_Dry_P Parameter: Organism Value: A. thaliana
  misc_feature: MA Experiment 20001556 PARAMETER Experiment Name: At_Drought_Soil_Dry_P Parameter: Plant Line Value: WS
  misc_feature: MA Experiment 20001556 PARAMETER Experiment Name: At_Drought_Soil_Dry_P Parameter: Post Timepoint (hr) Value: None
  misc_feature: MA Experiment 20001556 PARAMETER Experiment Name: At_Drought_Soil_Dry_P Parameter: Post-Treatment Value: None
  misc_feature: MA Experiment 20001556 PARAMETER Experiment Name: At_Drought_Soil_Dry_P Parameter: Timepoint (day) Value: 12
  misc_feature: MA Experiment 20001556 PARAMETER Experiment Name: At_Drought_Soil_Dry_P Parameter: Treatment Value: Drought vs. No Drought
  misc_feature: MA Experiment ID: 20001557 Result: Down-regulated in Transcription
  misc_feature: MA Experiment 20001557 PARAMETER Experiment Name: At_Drought_Soil_Dry_P Parameter: Age (day) Value: 27
  misc_feature: MA Experiment 20001557 PARAMETER Experiment Name: At_Drought_Soil_Dry_P Parameter: Organism Value: A. thaliana
  misc_feature: MA Experiment 20001557 PARAMETER Experiment Name: At_Drought_Soil_Dry_P Parameter: Plant Line Value: WS
  misc_feature: MA Experiment 20001557 PARAMETER Experiment Name: At_Drought_Soil_Dry_P Parameter: Post Timepoint (hr) Value: 3
  misc_feature: MA Experiment 20001557 PARAMETER Experiment Name: At_Drought_Soil_Dry_P Parameter: Post-Treatment Value: Re-Water vs. No Drought
  misc_feature: MA Experiment 20001557 PARAMETER Experiment Name: At_Drought_Soil_Dry_P Parameter: Timepoint (day) Value: 13
  misc_feature: MA Experiment 20001557 PARAMETER Experiment Name: At_Drought_Soil_Dry_P Parameter: Treatment Value: Drought vs. No Drought
  misc_feature: MA Experiment ID: 20001558 Result: Down-regulated in Transcription
  misc_feature: MA Experiment 20001558 PARAMETER Experiment Name: At_Drought_Soil_Dry_P Parameter: Age (day) Value: 27
  misc_feature: MA Experiment 20001558 PARAMETER Experiment Name: At_Drought_Soil_Dry_P Parameter: Organism Value: A. thaliana
  misc_feature: MA Experiment 20001558 PARAMETER Experiment Name: At_Drought_Soil_Dry_P Parameter: Plant Line Value: WS
  misc_feature: MA Experiment 20001558 PARAMETER Experiment Name: At_Drought_Soil_Dry_P Parameter: Post Timepoint (hr) Value: 6
  misc_feature: MA Experiment 20001558 PARAMETER Experiment Name: At_Drought_Soil_Dry_P Parameter: Post-Treatment Value: Re-Water vs. No Drought
  misc_feature: MA Experiment 20001558 PARAMETER Experiment Name: At_Drought_Soil_Dry_P Parameter: Timepoint (day) Value: 13
  misc_feature: MA Experiment 20001558 PARAMETER Experiment Name: At_Drought_Soil_Dry_P Parameter: Treatment Value: Drought vs. No Drought
  misc_feature: MA Experiment ID: 20001559 Result: Down-regulated in Transcription
  misc_feature: MA Experiment 20001559 PARAMETER Experiment Name: At_Drought_Soil_Dry_P Parameter: Age (day) Value: 28
  misc_feature: MA Experiment 20001559 PARAMETER Experiment Name: At_Drought_Soil_Dry_P Parameter: Organism Value: A. thaliana
  misc_feature: MA Experiment 20001559 PARAMETER Experiment Name: At_Drought_Soil_Dry_P Parameter: Plant Line Value: WS
  misc_feature: MA Experiment 20001559 PARAMETER Experiment Name: At_Drought_Soil_Dry_P Parameter: Post Timepoint (hr) Value: 29
  misc_feature: MA Experiment 20001559 PARAMETER Experiment Name: At_Drought_Soil_Dry_P Parameter: Post-Treatment Value: Re-Water vs. No Drought
  misc_feature: MA Experiment 20001559 PARAMETER Experiment Name: At_Drought_Soil_Dry_P Parameter: Timepoint (day) Value: 14
  misc_feature: MA Experiment 20001559 PARAMETER Experiment Name: At_Drought_Soil_Dry_P Parameter: Treatment Value: Drought vs. No Drought
  misc_feature: MA Experiment ID: 20001560 Result: Down-regulated in Transcription
  misc_feature: MA Experiment 20001560 PARAMETER Experiment Name: At_Drought_Soil_Dry_P Parameter: Age (day) Value: 28
  misc_feature: MA Experiment 20001560 PARAMETER Experiment Name: At_Drought_Soil_Dry_P Parameter: Organism Value: A. thaliana
  misc_feature: MA Experiment 20001560 PARAMETER Experiment Name: At_Drought_Soil_Dry_P Parameter: Plant Line Value: WS
  misc_feature: MA Experiment 20001560 PARAMETER Experiment Name: At_Drought_Soil_Dry_P Parameter: Post Timepoint (hr) Value: None
  misc_feature: MA Experiment 20001560 PARAMETER Experiment Name: At_Drought_Soil_Dry_P Parameter: Post-Treatment Value: None
  misc_feature: MA Experiment 20001560 PARAMETER Experiment Name: At_Drought_Soil_Dry_P Parameter: Timepoint (day) Value: 14
  misc_feature: MA Experiment 20001560 PARAMETER Experiment Name: At_Drought_Soil_Dry_P Parameter: Treatment Value: Drought vs. No Drought
  misc_feature: MA Experiment ID: 20001774 Result: Up-regulated in Transcription
  misc_feature: MA Experiment 20001774 PARAMETER Experiment Name: At_Far-red-enriched-adult_P Parameter: Age (day) Value: 31
  misc_feature: MA Experiment 20001774 PARAMETER Experiment Name: At_Far-red-enriched-adult_P Parameter: Light Value: Far-red enriched vs. White
  misc_feature: MA Experiment 20001774 PARAMETER Experiment Name: At_Far-red-enriched-adult_P Parameter: Organism Value: A. thaliana
  misc_feature: MA Experiment 20001774 PARAMETER Experiment Name: At_Far-red-enriched-adult_P Parameter: Plant Line Value: Columbia
  misc_feature: MA Experiment 20001774 PARAMETER Experiment Name: At_Far-red-enriched-adult_P Parameter: Timepoint (hr) Value: 72
  misc_feature: MA Experiment 20001774 PARAMETER Experiment Name: At_Far-red-enriched-adult_P Parameter: Tissue Value: Aerial
atgtcaattttcctctgtttcctcttgcttttgctacttcttttagtaacaataatcttcacaagaaaatctcaatcctcaaaactgaaacttcctccgggtccaccaaaacttccgattatcggaaacttacactaccttaacggattacctcacaaatgtctcctaaacctctggaaaatccacggaccagtgatgcagctccagttaggatacgtccctctagtcgtaatctcctcaaaccaagcagcagaagaagttctcaaaactcatgacctagattgttgcagccgaccagaaaccatagcgtcaaaaacaatatcttacaacttcaaagacataggattcgctccttacggcgaagaatggagagcgttgaggaagctcgctgtgatcgagctattcagcttgaaaaaattcaactcttttaggtatataagagaagaagagaatgacttgttggtcaagaaactctctgaagcttcagagaaacaatctcccgtgaatttgaagaaagcccttttcactctaagcgctagtatcgtgtgtagactcgctttcggtcaaaatcttcacgaatccgagtttatagatgaagatagcatggaggatttagcttctaggtcggagaagattcaggcgaaattcgctttctctaacttcttccccggaggttggattcttgataaaatcaccggtcaaagcaagagccttaacgaaatttttgctgatctcgacggattctttaaccaagtgctcgatgatcatctaaagccaggaagaaaagtattagagactccagatgttgtggatgtgatgattgatatgatgaataaacaaagccaagatggttcttttaagctcactactgatcatatcaaaggaatcatctctgatatatttctagccggagtaaacacaagtgcaacgaccattctttgggcaatgacagagttaataagaaacccaagagtgatgaagaaagtgcaagatgaggttaggacagtacttggtgaaaaaagagacagaatcacagaacaagatcttaaccaacttaactacttcaagctagtgatcaaagagacatttagattacacccagcagctccacttttattaccaagagaggcaatggctaaaatcaagatccaaggctatgacattccagagaaaactcagatcatggtcaatgtttacgcgataggacgtgatcctgacctctgggagaatccagaagagtttaaaccggaaagattcgttgatagttctgttgattatagaggacttaacttcgagcttctaccgtttggttctggtagaaggatttgtcccggtatgacgatggggatcgcgacagtcgaattaggattgttgaatttactttacttctttgattggggattgcctgaaggaaggacagtgaaagatatcgatttggaagaagaaggtgcgattattattggcaagaaagtttcgcttgaacttgtgcctactcgtcgtcaatga

SEQ ID NO: 97310 - protein, 501 aa, Arabidopsis thaliana
  peptide (1)..(501): Ceres Seq. ID no. 12736968
  misc_feature (32)..(495): Pfam Name: Cytochrome P450 Pfam Description: Cytochrome P450
  misc_feature (1)..(501): Homolog of NCBI NO: 15231526 NR Description: cytochrome P450 family; protein id: At3g26210.1 thaliana] >gi|13878383|sp|Q9LTM0|C72N_ARATH Cytochrome P450 71B23
  misc_feature (1)..(497): Homolog of NCBI NO: 15222182 NR Description: cytochrome p450 family; protein id: At1g13110.1, by cDNA: gi_18087622 [Arabidopsis thaliana]
  misc_feature (1)..(496): Homolog of NCBI NO: 15222177 NR Description: cytochrome p450 family; protein id: At1g13090.1, by cDNA: 35385., supported by cDNA: gi_13272452, supported by gi_17065513 [Arabidopsis thaliana]
  misc_feature (1)..(496): Homolog of NCBI NO: 21618278 NR Description: putative cytochrome P450 monooxygenase
  misc_feature (1)..(496): Homolog of NCBI NO: 15222180 NR Description: cytochrome p450 family; protein id: At1g13100.1
  misc_feature (1)..(501): Homolog of NCBI NO: 15231525 NR Description: cytochrome p450 family; protein id: At3g26200.1, by cDNA: gi_13430717 [Arabidopsis thaliana] Cytochrome P450 71B22 >gi|11994439|dbj|BAB02441.1| cytochrome
  misc_feature (1)..(497): Homolog of NCBI NO: 15231524 NR Description: cytochrome p450 family; protein id: At3g26190.1 thaliana] >gi|13878385|sp|Q9LTM2|C72L_ARATH Cytochrome P450 71B21
  misc_feature (1)..(501): Homolog of NCBI NO: 15231520 NR Description: cytochrome p450 family; protein id: At3g26170.1, by cDNA: 262802. [Arabidopsis thaliana] Cytochrome P450 71B19 >gi|11994436|dbj|BAB02438.1| cytochrome
  misc_feature (1)..(501): Homolog of NCBI NO: 21554748 NR Description: cytochrome P450, putative [Arabidopsis thaliana]
  misc_feature (1)..(500): Homolog of NCBI NO: 15222174 NR Description: cytochrome p450 family; protein id: At1g13080.1, by cDNA: gi_3164139 [Arabidopsis thaliana]
MSIFLCFLLLLLLLLVTIIFTRKSQSSKLKLPPGPPKLPIIGNLHYLNGLPHKCLLNLWKIHGPVMQLQLGYVPLVVISSNQAAEEVLKTHDLDCCSRPETIASKTISYNFKDIGFAPYGEEWRALRKLAVIELFSLKKFNSFRYIREEENDLLVKKLSEASEKQSPVNLKKALFTLSASIVCRLAFGQNLHESEFIDEDSMEDLASRSEKIQAKFAFSNFFPGGWILDKITGQSKSLNEIFADLDGFFNQVLDDHLKPGRKVLETPDVVDVMIDMMNKQSQDGSFKLTTDHIKGIISDIFLAGVNTSATTILWAMTELIRNPRVMKKVQDEVRTVLGEKRDRITEQDLNQLNYFKLVIKETFRLHPAAPLLLPREAMAKIKIQGYDIPEKTQIMVNVYAIGRDPDLWENPEEFKPERFVDSSVDYRGLNFELLPFGSGRRICPGMTMGIATVELGLLNLLYFFDWGLPEGRTVKDIDLEEEGAIIIGKKVSLELVPTRRQ

SEQ ID NO: 97311 - protein, 436 aa, Arabidopsis thaliana
  peptide (1)..(436): Ceres Seq. ID no. 12736969
  misc_feature (1)..(430): Pfam Name: Cytochrome P450 Pfam Description: Cytochrome P450
  misc_feature (1)..(436): Homolog of NCBI NO: 15231526 NR Description: cytochrome P450 family; protein id: At3g26210.1 thaliana] >gi|13878383|sp|Q9LTM0|C72N_ARATH Cytochrome P450 71B23
  misc_feature (1)..(432): Homolog of NCBI NO: 15222182 NR Description: cytochrome p450 family; protein id: At1g13110.1, by cDNA: gi_18087622 [Arabidopsis thaliana]
  misc_feature (1)..(431): Homolog of NCBI NO: 15222177 NR Description: cytochrome p450 family; protein id: At1g13090.1, by cDNA: 35385., supported by cDNA: gi_13272452, supported by gi_17065513 [Arabidopsis thaliana]
  misc_feature (1)..(431): Homolog of NCBI NO: 21618278 NR Description: putative cytochrome P450 monooxygenase
  misc_feature (1)..(431): Homolog of NCBI NO: 15222180 NR Description: cytochrome p450 family; protein id: At1g13100.1
  misc_feature (1)..(436): Homolog of NCBI NO: 15231525 NR Description: cytochrome p450 family; protein id: At3g26200.1, by cDNA: gi_13430717 [Arabidopsis thaliana] Cytochrome P450 71B22 >gi|11994439|dbj|BAB02441.1| cytochrome
  misc_feature (1)..(432): Homolog of NCBI NO: 15231524 NR Description: cytochrome p450 family; protein id: At3g26190.1 thaliana] >gi|13878385|sp|Q9LTM2|C72L_ARATH Cytochrome P450 71B21
  misc_feature (1)..(436): Homolog of NCBI NO: 15231520 NR Description: cytochrome p450 family; protein id: At3g26170.1, by cDNA: 262802. [Arabidopsis thaliana] Cytochrome P450 71B19 >gi|11994436|dbj|BAB02438.1| cytochrome
  misc_feature (1)..(436): Homolog of NCBI NO: 21554748 NR Description: cytochrome P450, putative [Arabidopsis thaliana]
  misc_feature (1)..(435): Homolog of NCBI NO: 15222174 NR Description: cytochrome p450 family; protein id: At1g13080.1, by cDNA: gi_3164139 [Arabidopsis thaliana]
MQLQLGYVPLVVISSNQAAEEVLKTHDLDCCSRPETIASKTISYNFKDIGFAPYGEEWRALRKLAVIELFSLKKFNSFRYIREEENDLLVKKLSEASEKQSPVNLKKALFTLSASIVCRLAFGQNLHESEFIDEDSMEDLASRSEKIQAKFAFSNFFPGGWILDKITGQSKSLNEIFADLDGFFNQVLDDHLKPGRKVLETPDVVDVMIDMMNKQSQDGSFKLTTDHIKGIISDIFLAGVNTSATTILWAMTELIRNPRVMKKVQDEVRTVLGEKRDRITEQDLNQLNYFKLVIKETFRLHPAAPLLLPREAMAKIKIQGYDIPEKTQIMVNVYAIGRDPDLWENPEEFKPERFVDSSVDYRGLNFELLPFGSGRRICPGMTMGIATVELGLLNLLYFFDWGLPEGRTVKDIDLEEEGAIIIGKKVSLELVPTRRQ

SEQ ID NO: 97312 - protein, 300 aa, Arabidopsis thaliana
  peptide (1)..(300): Ceres Seq. ID no. 12736970
  misc_feature (1)..(294): Pfam Name: Cytochrome P450 Pfam Description: Cytochrome P450
  misc_feature (1)..(300): Homolog of NCBI NO: 15231526 NR Description: cytochrome P450 family; protein id: At3g26210.1 thaliana] >gi|13878383|sp|Q9LTM0|C72N_ARATH Cytochrome P450 71B23
  misc_feature (1)..(296): Homolog of NCBI NO: 15222182 NR Description: cytochrome p450 family; protein id: At1g13110.1, by cDNA: gi_18087622 [Arabidopsis thaliana]
  misc_feature (1)..(295): Homolog of NCBI NO: 15222177 NR Description: cytochrome p450 family; protein id: At1g13090.1, by cDNA: 35385., supported by cDNA: gi_13272452, supported by gi_17065513 [Arabidopsis thaliana]
  misc_feature (1)..(295): Homolog of NCBI NO: 21618278 NR Description: putative cytochrome P450 monooxygenase
  misc_feature (1)..(295): Homolog of NCBI NO: 15222180 NR Description: cytochrome p450 family; protein id: At1g13100.1
  misc_feature (1)..(300): Homolog of NCBI NO: 15231525 NR Description: cytochrome p450 family; protein id: At3g26200.1, by cDNA: gi_13430717 [Arabidopsis thaliana] Cytochrome P450 71B22 >gi|11994439|dbj|BAB02441.1| cytochrome
  misc_feature (1)..(296): Homolog of NCBI NO: 15231524 NR Description: cytochrome p450 family; protein id: At3g26190.1 thaliana] >gi|13878385|sp|Q9LTM2|C72L_ARATH Cytochrome P450 71B21
  misc_feature (1)..(300): Homolog of NCBI NO: 15231520 NR Description: cytochrome p450 family; protein id: At3g26170.1, by cDNA: 262802. [Arabidopsis thaliana] Cytochrome P450 71B19 >gi|11994436|dbj|BAB02438.1| cytochrome
  misc_feature (1)..(300): Homolog of NCBI NO: 21554748 NR Description: cytochrome P450, putative [Arabidopsis thaliana]
  misc_feature (1)..(299): Homolog of NCBI NO: 15222174 NR Description: cytochrome p450 family; protein id: At1g13080.1, by cDNA: gi_3164139 [Arabidopsis thaliana]
MEDLASRSEKIQAKFAFSNFFPGGWILDKITGQSKSLNEIFADLDGFFNQVLDDHLKPGRKVLETPDVVDVMIDMMNKQSQDGSFKLTTDHIKGIISDIFLAGVNTSATTILWAMTELIRNPRVMKKVQDEVRTVLGEKRDRITEQDLNQLNYFKLVIKETFRLHPAAPLLLPREAMAKIKIQGYDIPEKTQIMVNVYAIGRDPDLWENPEEFKPERFVDSSVDYRGLNFELLPFGSGRRICPGMTMGIATVELGLLNLLYFFDWGLPEGRTVKDIDLEEEGAIIIGKKVSLELVPTRRQ

SEQ ID NO: 97313 - DNA, 1497 bp, Arabidopsis thaliana
  misc_feature (1)..(1497): Ceres Seq. ID no. 12736971
  misc_feature: MA Experiment ID: 20000173 Result: Down-regulated in Transcription
  misc_feature: MA Experiment 20000173 PARAMETER Experiment Name: At_42deg_Heat_P Parameter: Age (day) Value: 14
  misc_feature: MA Experiment 20000173 PARAMETER Experiment Name: At_42deg_Heat_P Parameter: Organism Value: A. thaliana
  misc_feature: MA Experiment 20000173 PARAMETER Experiment Name: At_42deg_Heat_P Parameter: Plant Line Value: WS
  misc_feature: MA Experiment 20000173 PARAMETER Experiment Name: At_42deg_Heat_P Parameter: Temperature (deg C) Value: 42 vs. 22
  misc_feature: MA Experiment 20000173 PARAMETER Experiment Name: At_42deg_Heat_P Parameter: Timepoint (hr) Value: 6
  misc_feature: MA Experiment 20000173 PARAMETER Experiment Name: At_42deg_Heat_P Parameter: Tissue Value: Aerial
  misc_feature: MA Experiment ID: 20000184 Result: Down-regulated in Transcription
  misc_feature: MA Experiment 20000184 PARAMETER Experiment Name: At_Shoots__P Parameter: Age (day) Value: 7
  misc_feature: MA Experiment 20000184 PARAMETER Experiment Name: At_Shoots__P Parameter: Tissue Value: Shoots vs. Whole Plant
  misc_feature: MA Experiment ID: 20000185 Result: Down-regulated in Transcription
  misc_feature: MA Experiment 20000185 PARAMETER Experiment Name: At_Roots__P Parameter: Age (day) Value: 7 vs. 21
  misc_feature: MA Experiment 20000185 PARAMETER Experiment Name: At_Roots__P Parameter: Organism Value: A. thaliana
  misc_feature: MA Experiment 20000185 PARAMETER Experiment Name: At_Roots__P Parameter: Tissue Value: Roots vs. Whole Plant
  misc_feature: MA Experiment ID: 20000234 Result: Down-regulated in Transcription
  misc_feature: MA Experiment 20000234 PARAMETER Experiment Name: At_Siliques_P Parameter: Age (day) Value: 21
  misc_feature: MA Experiment 20000234 PARAMETER Experiment Name: At_Siliques_P Parameter: Organism Value: A. thaliana
  misc_feature: MA Experiment 20000234 PARAMETER Experiment Name: At_Siliques_P Parameter: Plant Line Value: WS
  misc_feature: MA Experiment 20000234 PARAMETER Experiment Name: At_Siliques_P Parameter: Tissue Value: Less Than 5mm Siliques vs. Whole Plant
  misc_feature: MA Experiment ID: 20000235 Result: Down-regulated in Transcription
  misc_feature: MA Experiment 20000235 PARAMETER Experiment Name: At_Siliques_P Parameter: Age (day) Value: 21
  misc_feature: MA Experiment 20000235 PARAMETER Experiment Name: At_Siliques_P Parameter: Organism Value: A. thaliana
  misc_feature: MA Experiment 20000235 PARAMETER Experiment Name: At_Siliques_P Parameter: Plant Line Value: WS
  misc_feature: MA Experiment 20000235 PARAMETER Experiment Name: At_Siliques_P Parameter: Tissue Value: 5-10mm Siliques vs. Whole Plant
  misc_feature: MA Experiment ID: 20000264 Result: Down-regulated in Transcription
  misc_feature: MA Experiment 20000264 PARAMETER Experiment Name: At_Open_Flower_P Parameter: Age (day) Value: 21
  misc_feature: MA Experiment 20000264 PARAMETER Experiment Name: At_Open_Flower_P Parameter: Plant Line Value: WS
  misc_feature: MA Experiment 20000264 PARAMETER Experiment Name: At_Open_Flower_P Parameter: Tissue Value: Open Flower vs. Whole Plant
  misc_feature: MA Experiment ID: 20000265 Result: Down-regulated in Transcription
  misc_feature: MA Experiment 20000265 PARAMETER Experiment Name: At_Open_Flower_P Parameter: Age (day) Value: 21
  misc_feature: MA Experiment 20000265 PARAMETER Experiment Name: At_Open_Flower_P Parameter: Plant Line Value: WS
  misc_feature: MA Experiment 20000265 PARAMETER Experiment Name: At_Open_Flower_P Parameter: Tissue Value: Closed Flower vs. Whole Plant
  misc_feature: MA Experiment ID: 20000286 Result: Down-regulated in Transcription
  misc_feature: MA Experiment 20000286 PARAMETER Experiment Name: At_Open_Flower_P Parameter: Age (day) Value: 21
  misc_feature: MA Experiment 20000286 PARAMETER Experiment Name: At_Open_Flower_P Parameter: Plant Line Value: WS
  misc_feature: MA Experiment 20000286 PARAMETER Experiment Name: At_Open_Flower_P Parameter: Tissue Value: Half Open vs. Whole Plant
  misc_feature: MA Experiment ID: 20000437 Result: Down-regulated in Transcription
  misc_feature: MA Experiment 20000437 PARAMETER Experiment Name: At_Drought_P Parameter: Age (day) Value: 8
  misc_feature: MA Experiment 20000437 PARAMETER Experiment Name: At_Drought_P Parameter: Organism Value: A. thaliana
  misc_feature: MA Experiment 20000437 PARAMETER Experiment Name: At_Drought_P Parameter: Plant Line Value: WS
  misc_feature: MA Experiment 20000437 PARAMETER Experiment Name: At_Drought_P Parameter: Timepoint (hr) Value: 24
  misc_feature: MA Experiment 20000437 PARAMETER Experiment Name: At_Drought_P Parameter: Tissue Value: Whole Plant
  misc_feature: MA Experiment 20000437 PARAMETER Experiment Name: At_Drought_P Parameter: Treatment Value: Drought vs. No Drought
  misc_feature: MA Experiment ID: 20000438 Result: Down-regulated in Transcription
  misc_feature: MA Experiment 20000438 PARAMETER Experiment Name: At_Shoots__P Parameter: Age (day) Value: 14
  misc_feature: MA Experiment 20000438 PARAMETER Experiment Name: At_Shoots__P Parameter: Tissue Value: Shoots vs. Whole Plant
  misc_feature: MA Experiment ID: 20000439 Result: Down-regulated in Transcription
  misc_feature: MA Experiment 20000439 PARAMETER Experiment Name: At_Roots__P Parameter: Age (day) Value: 14 vs. 21
  misc_feature: MA Experiment 20000439 PARAMETER Experiment Name: At_Roots__P Parameter: Organism Value: A. thaliana
  misc_feature: MA Experiment 20000439 PARAMETER Experiment Name: At_Roots__P Parameter: Tissue Value: Roots vs. Whole Plant
  misc_feature: MA Experiment ID: 20000456 Result: Down-regulated in Transcription
  misc_feature: MA Experiment 20000456 PARAMETER Experiment Name: At_100uM_BA_P Parameter: Age (day) Value: 14
  misc_feature: MA Experiment 20000456 PARAMETER Experiment Name: At_100uM_BA_P Parameter: Organism Value: A. thaliana
  misc_feature: MA Experiment 20000456 PARAMETER Experiment Name: At_100uM_BA_P Parameter: Plant Line Value: WS
  misc_feature: MA Experiment 20000456 PARAMETER Experiment Name: At_100uM_BA_P Parameter: Timepoint (hr) Value: 6
  misc_feature: MA Experiment 20000456 PARAMETER Experiment Name: At_100uM_BA_P Parameter: Tissue Value: Aerial
  misc_feature: MA Experiment 20000456 PARAMETER Experiment Name: At_100uM_BA_P Parameter: Treatment Value: 100uM BA vs. No Treatment
  misc_feature: MA Experiment ID: 20000495 Result: Down-regulated in Transcription
  misc_feature: MA Experiment 20000495 PARAMETER Experiment Name: At_Guard_Cells_P Parameter: Harvest Date Value: 8/2/2002
  misc_feature: MA Experiment 20000495 PARAMETER Experiment Name: At_Guard_Cells_P Parameter: Organism Value: A. thaliana
  misc_feature: MA Experiment 20000495 PARAMETER Experiment Name: At_Guard_Cells_P Parameter: Tissue Value: Guard Cells vs. Leaves
  misc_feature: MA Experiment ID: 20000573 Result: Down-regulated in Transcription
  misc_feature: MA Experiment 20000573 PARAMETER Experiment Name: At_100uM_ABA_Mutants__P Parameter: Organism Value: A. thaliana
  misc_feature: MA Experiment 20000573 PARAMETER Experiment Name: At_100uM_ABA_Mutants__P Parameter: Plant Line Value: CS22 vs. Ler wt
  misc_feature: MA Experiment 20000573 PARAMETER Experiment Name: At_100uM_ABA_Mutants__P Parameter: Timepoint (hr) Value: N/A
  misc_feature: MA Experiment 20000573 PARAMETER Experiment Name: At_100uM_ABA_Mutants__P Parameter: Tissue Value: Whole Plant
  misc_feature: MA Experiment 20000573 PARAMETER Experiment Name: At_100uM_ABA_Mutants__P Parameter: Treatment Value: None
  misc_feature: MA Experiment ID: 20000794 Result: Down-regulated in Transcription
  misc_feature: MA Experiment 20000794 PARAMETER Experiment Name: At_Petals_P Parameter: Age (day) Value: 23-25 days
  misc_feature: MA Experiment 20000794 PARAMETER Experiment Name: At_Petals_P Parameter: Plant Line Value: WS
  misc_feature: MA Experiment 20000794 PARAMETER Experiment Name: At_Petals_P Parameter: Tissue Value: Petals vs. Whole plant
  misc_feature: MA Experiment ID: 20001450 Result: Up-regulated in Transcription
  misc_feature: MA Experiment 20001450 PARAMETER Experiment Name: At_Far-red-induction_P Parameter: Age (day) Value: 7
  misc_feature: MA Experiment 20001450 PARAMETER Experiment Name: At_Far-red-induction_P Parameter: Light Value: Far-red vs. White
  misc_feature: MA Experiment 20001450 PARAMETER Experiment Name: At_Far-red-induction_P Parameter: Organism Value: A. thaliana
  misc_feature: MA Experiment 20001450 PARAMETER Experiment Name: At_Far-red-induction_P Parameter: Plant Line Value: Columbia
  misc_feature: MA Experiment 20001450 PARAMETER Experiment Name: At_Far-red-induction_P Parameter: Timepoint (hr) Value: 8
  misc_feature: MA Experiment 20001450 PARAMETER Experiment Name: At_Far-red-induction_P Parameter: Tissue Value: Whole Plant
  misc_feature: MA Experiment ID: 20001554 Result: Down-regulated in Transcription
  misc_feature: MA Experiment 20001554 PARAMETER Experiment Name: At_Drought_Soil_Dry_P Parameter: Age (day) Value: 21
  misc_feature: MA Experiment 20001554 PARAMETER Experiment Name: At_Drought_Soil_Dry_P Parameter: Organism Value: A. thaliana
  misc_feature: MA Experiment 20001554 PARAMETER Experiment Name: At_Drought_Soil_Dry_P Parameter: Plant Line Value: WS
  misc_feature: MA Experiment 20001554 PARAMETER Experiment Name: At_Drought_Soil_Dry_P Parameter: Post Timepoint (hr) Value: None
  misc_feature: MA Experiment 20001554 PARAMETER Experiment Name: At_Drought_Soil_Dry_P Parameter: Post-Treatment Value: None
  misc_feature: MA Experiment 20001554 PARAMETER Experiment Name: At_Drought_Soil_Dry_P Parameter: Timepoint (day) Value: 7
  misc_feature: MA Experiment 20001554 PARAMETER Experiment Name: At_Drought_Soil_Dry_P Parameter: Treatment Value: Drought vs. No Drought
  misc_feature: MA Experiment ID: 20001556 Result: Down-regulated in Transcription
  misc_feature: MA Experiment 20001556 PARAMETER Experiment Name: At_Drought_Soil_Dry_P Parameter: Age (day) Value: 26
  misc_feature: MA Experiment 20001556 PARAMETER Experiment Name: At_Drought_Soil_Dry_P Parameter: Organism Value: A. thaliana
  misc_feature: MA Experiment 20001556 PARAMETER Experiment Name: At_Drought_Soil_Dry_P Parameter: Plant Line Value: WS
  misc_feature: MA Experiment 20001556 PARAMETER Experiment Name: At_Drought_Soil_Dry_P Parameter: Post Timepoint (hr) Value: None
  misc_feature: MA Experiment 20001556 PARAMETER Experiment Name: At_Drought_Soil_Dry_P Parameter: Post-Treatment Value: None
  misc_feature: MA Experiment 20001556 PARAMETER Experiment Name: At_Drought_Soil_Dry_P Parameter: Timepoint (day) Value: 12
  misc_feature: MA Experiment 20001556 PARAMETER Experiment Name: At_Drought_Soil_Dry_P Parameter: Treatment Value: Drought vs. No Drought
  misc_feature: MA Experiment ID: 20001558 Result: Down-regulated in Transcription
  misc_feature: MA Experiment 20001558 PARAMETER Experiment Name: At_Drought_Soil_Dry_P Parameter: Age (day) Value: 27
  misc_feature: MA Experiment 20001558 PARAMETER Experiment Name: At_Drought_Soil_Dry_P Parameter: Organism Value: A. thaliana
  misc_feature: MA Experiment 20001558 PARAMETER Experiment Name: At_Drought_Soil_Dry_P Parameter: Plant Line Value: WS
  misc_feature: MA Experiment 20001558 PARAMETER Experiment Name: At_Drought_Soil_Dry_P Parameter: Post Timepoint (hr) Value: 6
  misc_feature: MA Experiment 20001558 PARAMETER Experiment Name: At_Drought_Soil_Dry_P Parameter: Post-Treatment Value: Re-Water vs. No Drought
  misc_feature: MA Experiment 20001558 PARAMETER Experiment Name: At_Drought_Soil_Dry_P Parameter: Timepoint (day) Value: 13
  misc_feature: MA Experiment 20001558 PARAMETER Experiment Name: At_Drought_Soil_Dry_P Parameter: Treatment Value: Drought vs. No Drought
  misc_feature: MA Experiment ID: 20001560 Result: Down-regulated in Transcription
  misc_feature: MA Experiment 20001560 PARAMETER Experiment Name: At_Drought_Soil_Dry_P Parameter: Age (day) Value: 28
  misc_feature: MA Experiment 20001560 PARAMETER Experiment Name: At_Drought_Soil_Dry_P Parameter: Organism Value: A. thaliana
  misc_feature: MA Experiment 20001560 PARAMETER Experiment Name: At_Drought_Soil_Dry_P Parameter: Plant Line Value: WS
  misc_feature: MA Experiment 20001560 PARAMETER Experiment Name: At_Drought_Soil_Dry_P Parameter: Post Timepoint (hr) Value: None
  misc_feature: MA Experiment 20001560 PARAMETER Experiment Name: At_Drought_Soil_Dry_P Parameter: Post-Treatment Value: None
  misc_feature: MA Experiment 20001560 PARAMETER Experiment Name: At_Drought_Soil_Dry_P Parameter: Timepoint (day) Value: 14
  misc_feature: MA Experiment 20001560 PARAMETER Experiment Name: At_Drought_Soil_Dry_P Parameter: Treatment Value: Drought vs. No Drought
  misc_feature: MA Experiment ID: 20001904 Result: Down-regulated in Transcription
  misc_feature: MA Experiment 20001904 PARAMETER Experiment Name: At_Drought_Reproduction_P Parameter: Age (day) Value: 37
  misc_feature: MA Experiment 20001904 PARAMETER Experiment Name: At_Drought_Reproduction_P Parameter: Organism Value: A. thaliana
  misc_feature: MA Experiment 20001904 PARAMETER Experiment Name: At_Drought_Reproduction_P Parameter: Plant Line Value: WS
  misc_feature: MA Experiment 20001904 PARAMETER Experiment Name: At_Drought_Reproduction_P Parameter: Timepoint (day) Value: 7
  misc_feature: MA Experiment 20001904 PARAMETER Experiment Name: At_Drought_Reproduction_P Parameter: Tissue Value: Rosettes
  misc_feature: MA Experiment 20001904 PARAMETER Experiment Name: At_Drought_Reproduction_P Parameter: Treatment Value: Drought vs. No Drought
atgtcgattcttctgtacttcatcgctcttttatcgttaataatcataaagaaaatcaaagactcgaaccgaaatcttcctccgagcccactgaagctaccggttatcggaaacctataccagcttcgaggattgtttcacaaatgtcttcacgatctctccaagaaacacggacccgtgttgcttctccgtctaggttttctcgatatggttgtgatctcatcgaccgaagcagctgaagaagctcttaaagtacatgaccttgagtgttgtaccagacctataactaacgtcacatcaaaactctggcgtgacggtcaagatatcggcttagccccatatggtgagtctttgagagagttgcggaagctttcctttctcaagtttttcagcacgacaaaggttcgatcttttaggtacatcagagaggaagagaatgatttgatggtcaagaaactgaaggaagcggctctgaagaaatcttccgtagatttgagccaaacacttttcggtctagttgggagtatcatattcagatccgcctttggacagcgtttcgacgagggcaatcatgtgaatgctgaaaagatcgaagacctcatgtttgaggtccagaaactcggagcactcagtaattctgatcttttccctggtggtttgggatggtttgttgactttgtgtcgggacataataagaaacttcacaaagtcttcgtcgaggttgatactctgctgaatcatattattgatgatcacttgaaaaactctatagaagaaataactcatgatcgtcctgatatcatcgactcgctcctagatatgatacgaaaacaagaacaaggggattctttcaagctcaccattgataatctcaaaggaattatccaagatatatatcttgctggagtagatacaagtgccatcaccatgatttgggcaatggcagagcttgttaaaaacccgcgggtgatgaagaaagttcaagatgagatccgaacatgcattggaatcaaacaaaatgaaaaaatcgaggaagatgatgtcgataagcttcagtacttgaagcttgtggtgaaagaaaccttaagactacatccagcagctcctcttttacttccaagagaaacaatgtctcaaatcaagattcaaggctacaacattccctcaaaaaccattcttttggttaacgtgtggtcaataggacgagatcctaaacactggaaaaaccctgaggagtttaacccggagaggtttattgactgtcctattgactacaaaggaaatagctttgagatgttaccatttggttctggtcggaggatatgtccagggatagcttttgcgattgctaccgttgaattgggactattgaacttgctttaccactttgattggagattacctgaggaggataaagatcttgacatggaagaggctggtgatgtcactattattaagaaagttcctcttaaacttgtcccagttcttcatcactaa

SEQ ID NO: 97314 - protein, 498 aa, Arabidopsis thaliana
  peptide (1)..(498): Ceres Seq. ID no. 12736972
  misc_feature (27)..(492): Pfam Name: Cytochrome P450 Pfam Description: Cytochrome P450
  misc_feature (1)..(498): Homolog of NCBI NO: 15231528 NR Description: cytochrome p450 family; protein id: At3g26230.1 thaliana] >gi|13878382|sp|Q9LTL8|C72O_ARATH Cytochrome P450 71B24
  misc_feature (1)..(498): Homolog of NCBI NO: 15231527 NR Description: cytochrome p450 family; protein id: At3g26220.1, by cDNA: gi_3164133 [Arabidopsis thaliana] Cytochrome P450 71B3 >gi|11994441|dbj|BAB02443.1| cytochrome P450
  misc_feature (1)..(498): Homolog of NCBI NO: 25282600 NR Description: cytochrome P450 monooxygenase [imported] - thaliana >gi|3164134|dbj|BAA28534.1| cytochrome P450
  misc_feature (16)..(498): Homolog of NCBI NO: 17065192 NR Description: cytochrome P450 [Arabidopsis thaliana]
  misc_feature (1)..(498): Homolog of NCBI NO: 15231534 NR Description: cytochrome p450 family; protein id: At3g26270.1 thaliana] >gi|13878381|sp|Q9LTL2|C72P_ARATH Cytochrome P450 71B25
  misc_feature (1)..(496): Homolog of NCBI NO: 15231536 NR Description: cytochrome p450 family; protein id: At3g26280.1, by cDNA: gi_19699097, supported by cDNA: gi_3164135 [Arabidopsis >gi|11994449|dbj|BAB02451.1| cytochrome P450 [Arabidopsis
  misc_feature (1)..(496): Homolog of NCBI NO: 5915827 NR Description: Cytochrome P450 71B4 >gi|25282601|pir||T52171
  misc_feature (1)..(495): Homolog of NCBI NO: 15222174 NR Description: cytochrome p450 family; protein id: At1g13080.1, by cDNA: gi_3164139 [Arabidopsis thaliana]
  misc_feature (1)..(498): Homolog of NCBI NO: 15222182 NR Description: cytochrome p450 family; protein id: At1g13110.1, by cDNA: gi_18087622 [Arabidopsis thaliana]
  misc_feature (1)..(497): Homolog of NCBI NO: 30923413 NR Description: Cytochrome P450 71B38
MSILLYFIALLSLIIIKKIKDSNRNLPPSPLKLPVIGNLYQLRGLFHKCLHDLSKKHGPVLLLRLGFLDMVVISSTEAAEEALKVHDLECCTRPITNVTSKLWRDGQDIGLAPYGESLRELRKLSFLKFFSTTKVRSFRYIREEENDLMVKKLKEAALKKSSVDLSQTLFGLVGSIIFRSAFGQRFDEGNHVNAEKIEDLMFEVQKLGALSNSDLFPGGLGWFVDFVSGHNKKLHKVFVEVDTLLNHIIDDHLKNSIEEITHDRPDIIDSLLDMIRKQEQGDSFKLTIDNLKGIIQDIYLAGVDTSAITMIWAMAELVKNPRVMKKVQDEIRTCIGIKQNEKIEEDDVDKLQYLKLVVKETLRLHPAAPLLLPRETMSQIKIQGYNIPSKTILLVNVWSIGRDPKHWKNPEEFNPERFIDCPIDYKGNSFEMLPFGSGRRICPGIAFAIATVELGLLNLLYHFDWRLPEEDKDLDMEEAGDVTIIKKVPLKLVPVLHH

SEQ ID NO: 97315 - protein, 429 aa, Arabidopsis thaliana
  peptide (1)..(429): Ceres Seq. ID no. 12736973
  misc_feature (1)..(423): Pfam Name: Cytochrome P450 Pfam Description: Cytochrome P450
  misc_feature (1)..(429): Homolog of NCBI NO: 15231528 NR Description: cytochrome p450 family; protein id: At3g26230.1 thaliana] >gi|13878382|sp|Q9LTL8|C72O_ARATH Cytochrome P450 71B24
  misc_feature (1)..(429): Homolog of NCBI NO: 15231527 NR Description: cytochrome p450 family; protein id: At3g26220.1, by cDNA: gi_3164133 [Arabidopsis thaliana] Cytochrome P450 71B3 >gi|11994441|dbj|BAB02443.1| cytochrome P450
  misc_feature (1)..(429): Homolog of NCBI NO: 25282600 NR Description: cytochrome P450 monooxygenase [imported] - thaliana >gi|3164134|dbj|BAA28534.1| cytochrome P450
  misc_feature (1)..(429): Homolog of NCBI NO: 17065192 NR Description: cytochrome P450 [Arabidopsis thaliana]
  misc_feature (1)..(429): Homolog of NCBI NO: 15231534 NR Description: cytochrome p450 family; protein id: At3g26270.1 thaliana] >gi|13878381|sp|Q9LTL2|C72P_ARATH Cytochrome P450 71B25
  misc_feature (1)..(427): Homolog of NCBI NO: 15231536 NR Description: cytochrome p450 family; protein id: At3g26280.1, by cDNA: gi_19699097, supported by cDNA: gi_3164135 [Arabidopsis >gi|11994449|dbj|BAB02451.1| cytochrome P450 [Arabidopsis
  misc_feature (1)..(427): Homolog of NCBI NO: 5915827 NR Description: Cytochrome P450 71B4 >gi|25282601|pir||T52171
  misc_feature (1)..(426): Homolog of NCBI NO: 15222174 NR Description: cytochrome p450 family; protein id: At1g13080.1, by cDNA: gi_3164139 [Arabidopsis thaliana]
  misc_feature (1)..(429): Homolog of NCBI NO: 15222182 NR Description: cytochrome p450 family; protein id: At1g13110.1, by cDNA: gi_18087622 [Arabidopsis thaliana]
  misc_feature (1)..(428): Homolog of NCBI NO: 30923413 NR Description: Cytochrome P450 71B38
MVVISSTEAAEEALKVHDLECCTRPITNVTSKLWRDGQDIGLAPYGESLRELRKLSFLKFFSTTKVRSFRYIREEENDLMVKKLKEAALKKSSVDLSQTLFGLVGSIIFRSAFGQRFDEGNHVNAEKIEDLMFEVQKLGALSNSDLFPGGLGWFVDFVSGHNKKLHKVFVEVDTLLNHIIDDHLKNSIEEITHDRPDIIDSLLDMIRKQEQGDSFKLTIDNLKGIIQDIYLAGVDTSAITMIWAMAELVKNPRVMKKVQDEIRTCIGIKQNEKIEEDDVDKLQYLKLVVKETLRLHPAAPLLLPRETMSQIKIQGYNIPSKTILLVNVWSIGRDPKHWKNPEEFNPERFIDCPIDYKGNSFEMLPFGSGRRICPGIAFAIATVELGLLNLLYHFDWRLPEEDKDLDMEEAGDVTIIKKVPLKLVPVLHH

SEQ ID NO: 97316 - protein, 350 aa, Arabidopsis thaliana
  peptide (1)..(350): Ceres Seq. ID no. 12736974
  misc_feature (1)..(344): Pfam Name: Cytochrome P450 Pfam Description: Cytochrome P450
  misc_feature (1)..(350): Homolog of NCBI NO: 15231528 NR Description: cytochrome p450 family; protein id: At3g26230.1 thaliana] >gi|13878382|sp|Q9LTL8|C72O_ARATH Cytochrome P450 71B24
  misc_feature (1)..(350): Homolog of NCBI NO: 15231527 NR Description: cytochrome p450 family; protein id: At3g26220.1, by cDNA: gi_3164133 [Arabidopsis thaliana] Cytochrome P450 71B3 >gi|11994441|dbj|BAB02443.1| cytochrome P450
  misc_feature (1)..(350): Homolog of NCBI NO: 25282600 NR Description: cytochrome P450 monooxygenase [imported] - thaliana >gi|3164134|dbj|BAA28534.1| cytochrome P450
  misc_feature (1)..(350): Homolog of NCBI NO: 17065192 NR Description: cytochrome P450 [Arabidopsis thaliana]
  misc_feature (1)..(350): Homolog of NCBI NO: 15231534 NR Description: cytochrome p450 family; protein id: At3g26270.1 thaliana] >gi|13878381|sp|Q9LTL2|C72P_ARATH Cytochrome P450 71B25
  misc_feature (1)..(348): Homolog of NCBI NO: 15231536 NR Description: cytochrome p450 family; protein id: At3g26280.1, by cDNA: gi_19699097, supported by cDNA: gi_3164135 [Arabidopsis >gi|11994449|dbj|BAB02451.1| cytochrome P450 [Arabidopsis
  misc_feature (1)..(348): Homolog of NCBI NO: 5915827 NR Description: Cytochrome P450 71B4 >gi|25282601|pir||T52171
  misc_feature (1)..(347): Homolog of NCBI NO: 15222174 NR Description: cytochrome p450 family; protein id: At1g13080.1, by cDNA: gi_3164139 [Arabidopsis thaliana]
  misc_feature (1)..(350): Homolog of NCBI NO: 15222182 NR Description: cytochrome p450 family; protein id: At1g13110.1, by cDNA: gi_18087622 [Arabidopsis thaliana]
  misc_feature (1)..(349): Homolog of NCBI NO: 30923413 NR Description: Cytochrome P450 71B38
MVKKLKEAALKKSSVDLSQTLFGLVGSIIFRSAFGQRFDEGNHVNAEKIEDLMFEVQKLGALSNSDLFPGGLGWFVDFVSGHNKKLHKVFVEVDTLLNHIIDDHLKNSIEEITHDRPDIIDSLLDMIRKQEQGDSFKLTIDNLKGIIQDIYLAGVDTSAITMIWAMAELVKNPRVMKKVQDEIRTCIGIKQNEKIEEDDVDKLQYLKLVVKETLRLHPAAPLLLPRETMSQIKIQGYNIPSKTILLVNVWSIGRDPKHWKNPEEFNPERFIDCPIDYKGNSFEMLPFGSGRRICPGIAFAIATVELGLLNLLYHFDWRLPEEDKDLDMEEAGDVTIIKKVPLKLVPVLHH

SEQ ID NO: 97317 - DNA, 1698 bp, Arabidopsis thaliana
  misc_feature (1)..(1698): Ceres Seq. ID no. 12736978
  misc_feature: MA Experiment ID: 20000184 Result: Down-regulated in Transcription
  misc_feature: MA Experiment 20000184 PARAMETER Experiment Name: At_Shoots__P Parameter: Age (day) Value: 7
  misc_feature: MA Experiment 20000184 PARAMETER Experiment Name: At_Shoots__P Parameter: Tissue Value: Shoots vs. Whole Plant
  misc_feature: MA Experiment ID: 20000185 Result: Down-regulated in Transcription
  misc_feature: MA Experiment 20000185 PARAMETER Experiment Name: At_Roots__P Parameter: Age (day) Value: 7 vs. 21
  misc_feature: MA Experiment 20000185 PARAMETER Experiment Name: At_Roots__P Parameter: Organism Value: A. thaliana
  misc_feature: MA Experiment 20000185 PARAMETER Experiment Name: At_Roots__P Parameter: Tissue Value: Roots vs. Whole Plant
  misc_feature: MA Experiment ID: 20000213 Result: Down-regulated in Transcription
  misc_feature: MA Experiment 20000213 PARAMETER Experiment Name: At_4deg_Cold_P Parameter: Timepoint (hr) Value: 2
  misc_feature: MA Experiment ID: 20000234 Result: Down-regulated in Transcription
  misc_feature: MA Experiment 20000234 PARAMETER Experiment Name: At_Siliques_P Parameter: Age (day) Value: 21
  misc_feature: MA Experiment 20000234 PARAMETER Experiment Name: At_Siliques_P Parameter: Organism Value: A. thaliana
  misc_feature: MA Experiment 20000234 PARAMETER Experiment Name: At_Siliques_P Parameter: Plant Line Value: WS
  misc_feature: MA Experiment 20000234 PARAMETER Experiment Name: At_Siliques_P Parameter: Tissue Value: Less Than 5mm Siliques vs. Whole Plant
  misc_feature: MA Experiment ID: 20000235 Result: Down-regulated in Transcription
  misc_feature: MA Experiment 20000235 PARAMETER Experiment Name: At_Siliques_P Parameter: Age (day) Value: 21
  misc_feature: MA Experiment 20000235 PARAMETER Experiment Name: At_Siliques_P Parameter: Organism Value: A. thaliana
  misc_feature: MA Experiment 20000235 PARAMETER Experiment Name: At_Siliques_P Parameter: Plant Line Value: WS
  misc_feature: MA Experiment 20000235 PARAMETER Experiment Name: At_Siliques_P Parameter: Tissue Value: 5-10mm Siliques vs. Whole Plant
  misc_feature: MA Experiment ID: 20000264 Result: Down-regulated in Transcription
  misc_feature: MA Experiment 20000264 PARAMETER Experiment Name: At_Open_Flower_P Parameter: Age (day) Value: 21
  misc_feature: MA Experiment 20000264 PARAMETER Experiment Name: At_Open_Flower_P Parameter: Plant Line Value: WS
  misc_feature: MA Experiment 20000264 PARAMETER Experiment Name: At_Open_Flower_P Parameter: Tissue Value: Open Flower vs. Whole Plant
  misc_feature: MA Experiment ID: 20000265 Result: Down-regulated in Transcription
  misc_feature: MA Experiment 20000265 PARAMETER Experiment Name: At_Open_Flower_P Parameter: Age (day) Value: 21
  misc_feature: MA Experiment 20000265 PARAMETER Experiment Name: At_Open_Flower_P Parameter: Plant Line Value: WS
  misc_feature: MA Experiment 20000265 PARAMETER Experiment Name: At_Open_Flower_P Parameter: Tissue Value: Closed Flower vs. Whole Plant
  misc_feature: MA Experiment ID: 20000286 Result: Down-regulated in Transcription
  misc_feature: MA Experiment 20000286 PARAMETER Experiment Name: At_Open_Flower_P Parameter: Age (day) Value: 21
  misc_feature: MA Experiment 20000286 PARAMETER Experiment Name: At_Open_Flower_P Parameter: Plant Line Value: WS
  misc_feature: MA Experiment 20000286 PARAMETER Experiment Name: At_Open_Flower_P Parameter: Tissue Value: Half Open vs. Whole Plant
  misc_feature: MA Experiment ID: 20000439 Result: Down-regulated in Transcription
  misc_feature: MA Experiment 20000439 PARAMETER Experiment Name: At_Roots__P Parameter: Age (day) Value: 14 vs. 21
  misc_feature: MA Experiment 20000439 PARAMETER Experiment Name: At_Roots__P Parameter: Organism Value: A. thaliana
  misc_feature: MA Experiment 20000439 PARAMETER Experiment Name: At_Roots__P Parameter: Tissue Value: Roots vs. Whole Plant
  misc_feature: MA Experiment ID: 20000451 Result: Down-regulated in Transcription
  misc_feature: MA Experiment 20000451 PARAMETER Experiment Name: At_CS6879_Shoots-Roots_P Parameter: Age (day) Value: 14
  misc_feature: MA Experiment 20000451 PARAMETER Experiment Name: At_CS6879_Shoots-Roots_P Parameter: Organism Value: A. thaliana
  misc_feature: MA Experiment 20000451 PARAMETER Experiment Name: At_CS6879_Shoots-Roots_P Parameter: Plant Line Value: CS6879 vs. WS
  misc_feature: MA Experiment 20000451 PARAMETER Experiment Name: At_CS6879_Shoots-Roots_P Parameter: Tissue Value: Roots
  misc_feature: MA Experiment ID: 20000495 Result: Down-regulated in Transcription
  misc_feature: MA Experiment 20000495 PARAMETER Experiment Name: At_Guard_Cells_P Parameter: Harvest Date Value: 8/2/2002
  misc_feature: MA Experiment 20000495 PARAMETER Experiment Name: At_Guard_Cells_P Parameter: Organism Value: A. thaliana
  misc_feature: MA Experiment 20000495 PARAMETER Experiment Name: At_Guard_Cells_P Parameter: Tissue Value: Guard Cells vs. Leaves
  misc_feature: MA Experiment ID: 20000573 Result: Down-regulated in Transcription
  misc_feature: MA Experiment 20000573 PARAMETER Experiment Name: At_100uM_ABA_Mutants__P Parameter: Organism Value: A. thaliana
  misc_feature: MA Experiment 20000573 PARAMETER Experiment Name: At_100uM_ABA_Mutants__P Parameter: Plant Line Value: CS22 vs. Ler wt
  misc_feature: MA Experiment 20000573 PARAMETER Experiment Name: At_100uM_ABA_Mutants__P Parameter: Timepoint (hr) Value: N/A
  misc_feature: MA Experiment 20000573 PARAMETER Experiment Name: At_100uM_ABA_Mutants__P Parameter: Tissue Value: Whole Plant
  misc_feature: MA Experiment 20000573 PARAMETER Experiment Name: At_100uM_ABA_Mutants__P Parameter: Treatment Value: None
  misc_feature: MA Experiment ID: 20000794 Result: Down-regulated in Transcription
  misc_feature: MA Experiment 20000794 PARAMETER Experiment Name: At_Petals_P Parameter: Age (day) Value: 23-25 days
  misc_feature: MA Experiment 20000794 PARAMETER Experiment Name: At_Petals_P Parameter: Plant Line Value: WS
  misc_feature: MA Experiment 20000794 PARAMETER Experiment Name: At_Petals_P Parameter: Tissue Value: Petals vs. Whole plant
  misc_feature: MA Experiment ID: 20001557 Result: Down-regulated in Transcription
  misc_feature: MA Experiment 20001557 PARAMETER Experiment Name: At_Drought_Soil_Dry_P Parameter: Age (day) Value: 27
  misc_feature: MA Experiment 20001557 PARAMETER Experiment Name: At_Drought_Soil_Dry_P Parameter: Organism Value: A. thaliana
  misc_feature: MA Experiment 20001557 PARAMETER Experiment Name: At_Drought_Soil_Dry_P Parameter: Plant Line Value: WS
  misc_feature: MA Experiment 20001557 PARAMETER Experiment Name: At_Drought_Soil_Dry_P Parameter: Post Timepoint (hr) Value: 3
  misc_feature: MA Experiment 20001557 PARAMETER Experiment Name: At_Drought_Soil_Dry_P Parameter: Post-Treatment Value: Re-Water vs. No Drought
  misc_feature: MA Experiment 20001557 PARAMETER Experiment Name: At_Drought_Soil_Dry_P Parameter: Timepoint (day) Value: 13
  misc_feature: MA Experiment 20001557 PARAMETER Experiment Name: At_Drought_Soil_Dry_P Parameter: Treatment Value: Drought vs. No Drought
  misc_feature: MA Experiment ID: 20001558 Result: Down-regulated in Transcription
  misc_feature: MA Experiment 20001558 PARAMETER Experiment Name: At_Drought_Soil_Dry_P Parameter: Age (day) Value: 27
  misc_feature: MA Experiment 20001558 PARAMETER Experiment Name: At_Drought_Soil_Dry_P Parameter: Organism Value: A. thaliana
  misc_feature: MA Experiment 20001558 PARAMETER Experiment Name: At_Drought_Soil_Dry_P Parameter: Plant Line Value: WS
  misc_feature: MA Experiment 20001558 PARAMETER Experiment Name: At_Drought_Soil_Dry_P Parameter: Post Timepoint (hr) Value: 6
  misc_feature: MA Experiment 20001558 PARAMETER Experiment Name: At_Drought_Soil_Dry_P Parameter: Post-Treatment Value: Re-Water vs. No Drought
  misc_feature: MA Experiment 20001558 PARAMETER Experiment Name: At_Drought_Soil_Dry_P Parameter: Timepoint (day) Value: 13
  misc_feature: MA Experiment 20001558 PARAMETER Experiment Name: At_Drought_Soil_Dry_P Parameter: Treatment Value: Drought vs. No Drought
  misc_feature: MA Experiment ID: 20001560 Result: Down-regulated in Transcription
  misc_feature: MA Experiment 20001560 PARAMETER Experiment Name: At_Drought_Soil_Dry_P Parameter: Age (day) Value: 28
  misc_feature: MA Experiment 20001560 PARAMETER Experiment Name: At_Drought_Soil_Dry_P Parameter: Organism Value: A. thaliana
  misc_feature: MA Experiment 20001560 PARAMETER Experiment Name: At_Drought_Soil_Dry_P Parameter: Plant Line Value: WS
  misc_feature: MA Experiment 20001560 PARAMETER Experiment Name: At_Drought_Soil_Dry_P Parameter: Post Timepoint (hr) Value: None
  misc_feature: MA Experiment 20001560 PARAMETER Experiment Name: At_Drought_Soil_Dry_P Parameter: Post-Treatment Value: None
  misc_feature: MA Experiment 20001560 PARAMETER Experiment Name: At_Drought_Soil_Dry_P Parameter: Timepoint (day) Value: 14
  misc_feature: MA Experiment 20001560 PARAMETER Experiment Name: At_Drought_Soil_Dry_P Parameter: Treatment Value: Drought vs. No Drought
  misc_feature: MA Experiment ID: 20001906 Result: Down-regulated in Transcription
  misc_feature: MA Experiment 20001906 PARAMETER Experiment Name: At_Drought_Reproduction_P Parameter: Age (day) Value: 35
  misc_feature: MA Experiment 20001906 PARAMETER Experiment Name: At_Drought_Reproduction_P Parameter: Organism Value: A. thaliana
  misc_feature: MA Experiment 20001906 PARAMETER Experiment Name: At_Drought_Reproduction_P Parameter: Plant Line Value: WS
  misc_feature: MA Experiment 20001906 PARAMETER Experiment Name: At_Drought_Reproduction_P Parameter: Timepoint (day) Value: 5
  misc_feature: MA Experiment 20001906 PARAMETER Experiment Name: At_Drought_Reproduction_P Parameter: Tissue Value: Siliques
  misc_feature: MA Experiment 20001906 PARAMETER Experiment Name: At_Drought_Reproduction_P Parameter: Treatment Value: Drought vs. No Drought
  misc_feature: MA Experiment ID: 20001907 Result: Down-regulated in Transcription
  misc_feature: MA Experiment 20001907 PARAMETER Experiment Name: At_Drought_Reproduction_P Parameter: Age (day) Value: 37
  misc_feature: MA Experiment 20001907 PARAMETER Experiment Name: At_Drought_Reproduction_P Parameter: Organism Value: A. thaliana
  misc_feature: MA Experiment 20001907 PARAMETER Experiment Name: At_Drought_Reproduction_P Parameter: Plant Line Value: WS
  misc_feature: MA Experiment 20001907 PARAMETER Experiment Name: At_Drought_Reproduction_P Parameter: Timepoint (day) Value: 7
  misc_feature: MA Experiment 20001907 PARAMETER Experiment Name: At_Drought_Reproduction_P Parameter: Tissue Value: Siliques
  misc_feature: MA Experiment 20001907 PARAMETER Experiment Name: At_Drought_Reproduction_P Parameter: Treatment Value: Drought vs. No Drought
atcaaaaaaagcagagcacaaaccagaggaacgacaataatggtgagtcttctatcttttttcttgcttctactcgtccccattttcttcttgttaatcttcaccaagaagatcaaggagtcaaaacaaaatcttcctcctggcccagcaaagcttccgatcatcggaaacctacaccagctccaagggttgcttcataaatgtcttcacgatctctccaagaaacacggacctgtgatgcatctccgtctagggtttgccccaatggtcgtaatttcatcaagtgaagcagctgaagaagctcttaaaacacatgaccttgagtgttgttcaagacctatcactatggcctcaagggttttttcgcgtaacggtaaagacatcggatttggggtttacggtgatgaatggagagagctgcgtaagctttcggttcgcgaattctttagcgtgaaaaaagttcaatccttcaagtatattagagaggaagagaatgacttgatgatcaagaaactgaaagaattggcttcgaagcaatctccggtggatttgagcaaaatcctctttggtctcactgcgagtatcatattcagaaccgcctttggacaaagtttctttgataacaagcatgtcgatcaggaaagcatcaaagaactgatgtttgaatctctgagcaatatgacttttagattctctgattttttccctactgctggtcttaaatggtttataggctttgtgtcaggccaacataagaggctttacaacgtcttcaacagggttgatactttttttaatcatatagttgatgatcatcactcgaagaaagcaactcaagatcgtcctgatatggtcgacgctatcttagatatgatagataatgaacaacaatatgcatctttcaagctcaccgttgatcatctcaaaggagtcctctcaaatatatatcacgctggaattgacacaagcgccatcaccttgatttgggcgatggcagagctcgttagaaacccgcgggtaatgaagaaagctcaagacgagatccgaacttgcattggaatcaaacaggaaggaagaatcatggaagaagatcttgataagcttcaatacttgaagcttgtggtgaaagaaaccttaagactacacccagcagctcctcttttacttcctcgagaaacaatggctgatatcaagattcaaggctacgacattcctcagaaaagagctcttcttgttaatgcatggtctataggacgagatccggaatcctggaaaaatcctgaagagtttaacccggagaggtttattgattgtcctgtggattacaagggacatagctttgagttgttaccatttggttctggtcggagaatttgtccaggaatagctatggcgatcgcaaccattgaattggggctcttgaatttgctctacttctttgattggaatatgcctgagaagaagaaagatatggacatggaagaagctggtgatctcactgttgataagaaagttcctcttgagcttctgccagttattcgcatcagtttgtagatgagcttggagaaaaacatatggtatgcttattgtataaaccagaacgctttttctgtttattttgtttttttgaatctaatgttaaattatattcaaaaaaaaaataatcgttgttacaatcagaactctttttttttatct

SEQ ID NO: 97318 - protein, 517 aa, Arabidopsis thaliana
  peptide (1)..(517): Ceres Seq. ID no. 12736979
  misc_feature (46)..(509): Pfam Name: Cytochrome P450 Pfam Description: Cytochrome P450
  misc_feature (14)..(517): Homolog of NCBI NO: 15231536 NR Description: cytochrome p450 family; protein id: At3g26280.1, by cDNA: gi_19699097, supported by cDNA: gi_3164135 [Arabidopsis >gi|11994449|dbj|BAB02451.1| cytochrome P450 [Arabidopsis
  misc_feature (14)..(517): Homolog of NCBI NO: 5915827 NR Description: Cytochrome P450 71B4 >gi|25282601|pir||T52171
  misc_feature (14)..(513): Homolog of NCBI NO: 15231534 NR Description: cytochrome p450 family; protein id: At3g26270.1 thaliana] >gi|13878381|sp|Q9LTL2|C72P_ARATH Cytochrome P450 71B25
  misc_feature (15)..(513): Homolog of NCBI NO: 15231527 NR Description: cytochrome p450 family; protein id: At3g26220.1, by cDNA: gi_3164133 [Arabidopsis thaliana] Cytochrome P450 71B3 >gi|11994441|dbj|BAB02443.1| cytochrome P450
  misc_feature (15)..(513): Homolog of NCBI NO: 25282600 NR Description: cytochrome P450 monooxygenase [imported] - thaliana >gi|3164134|dbj|BAA28534.1| cytochrome P450
  misc_feature (36)..(513): Homolog of NCBI NO: 17065192 NR Description: cytochrome P450 [Arabidopsis thaliana]
  misc_feature (15)..(513): Homolog of NCBI NO: 15231528 NR Description: cytochrome p450 family; protein id: At3g26230.1 thaliana] >gi|13878382|sp|Q9LTL8|C72O_ARATH Cytochrome P450 71B24
  misc_feature (15)..(514): Homolog of NCBI NO: 15231526 NR Description: cytochrome P450 family; protein id: At3g26210.1 thaliana] >gi|13878383|sp|Q9LTM0|C72N_ARATH Cytochrome P450 71B23
  misc_feature (18)..(512): Homolog of NCBI NO: 15231520 NR Description: cytochrome p450 family; protein id: At3g26170.1, by cDNA: 262802. [Arabidopsis thaliana] Cytochrome P450 71B19 >gi|11994436|dbj|BAB02438.1| cytochrome
  misc_feature (18)..(512): Homolog of NCBI NO: 15231522 NR Description: cytochrome p450 family; protein id: At3g26180.1, by cDNA: gi_15810462, supported by cDNA: gi_16226473 [Arabidopsis >gi|13878386|sp|Q9LTM3|C72K_ARATH Cytochrome P450 71B20
IKKSRAQTRGTTIMVSLLSFFLLLLVPIFFLLIFTKKIKESKQNLPPGPAKLPIIGNLHQLQGLLHKCLHDLSKKHGPVMHLRLGFAPMVVISSSEAAEEALKTHDLECCSRPITMASRVFSRNGKDIGFGVYGDEWRELRKLSVREFFSVKKVQSFKYIREEENDLMIKKLKELASKQSPVDLSKILFGLTASIIFRTAFGQSFFDNKHVDQESIKELMFESLSNMTFRFSDFFPTAGLKWFIGFVSGQHKRLYNVFNRVDTFFNHIVDDHHSKKATQDRPDMVDAILDMIDNEQQYASFKLTVDHLKGVLSNIYHAGIDTSAITLIWAMAELVRNPRVMKKAQDEIRTCIGIKQEGRIMEEDLDKLQYLKLVVKETLRLHPAAPLLLPRETMADIKIQGYDIPQKRALLVNAWSIGRDPESWKNPEEFNPERFIDCPVDYKGHSFELLPFGSGRRICPGIAMAIATIELGLLNLLYFFDWNMPEKKKDMDMEEAGDLTVDKKVPLELLPVIRISL

SEQ ID NO: 97319 - protein, 504 aa, Arabidopsis thaliana
  peptide (1)..(504): Ceres Seq. ID no. 12736980
  misc_feature (33)..(496): Pfam Name: Cytochrome P450 Pfam Description: Cytochrome P450
  misc_feature (1)..(504): Homolog of NCBI NO: 15231536 NR Description: cytochrome p450 family; protein id: At3g26280.1, by cDNA: gi_19699097, supported by cDNA: gi_3164135 [Arabidopsis >gi|11994449|dbj|BAB02451.1| cytochrome P450 [Arabidopsis
  misc_feature (1)..(504): Homolog of NCBI NO: 5915827 NR Description: Cytochrome P450 71B4 >gi|25282601|pir||T52171
  misc_feature (1)..(500): Homolog of NCBI NO: 15231534 NR Description: cytochrome p450 family; protein id: At3g26270.1 thaliana] >gi|13878381|sp|Q9LTL2|C72P_ARATH Cytochrome P450 71B25
  misc_feature (2)..(500): Homolog of NCBI NO: 15231527 NR Description: cytochrome p450 family; protein id: At3g26220.1, by cDNA: gi_3164133 [Arabidopsis thaliana] Cytochrome P450 71B3 >gi|11994441|dbj|BAB02443.1| cytochrome P450
  misc_feature (2)..(500): Homolog of NCBI NO: 25282600 NR Description: cytochrome P450 monooxygenase [imported] - thaliana >gi|3164134|dbj|BAA28534.1| cytochrome P450
  misc_feature (23)..(500): Homolog of NCBI NO: 17065192 NR Description: cytochrome P450 [Arabidopsis thaliana]
  misc_feature (2)..(500): Homolog of NCBI NO: 15231528 NR Description: cytochrome p450 family; protein id: At3g26230.1 thaliana] >gi|13878382|sp|Q9LTL8|C72O_ARATH Cytochrome P450 71B24
  misc_feature (2)..(501): Homolog of NCBI NO: 15231526 NR Description: cytochrome P450 family; protein id: At3g26210.1 thaliana] >gi|13878383|sp|Q9LTM0|C72N_ARATH Cytochrome P450 71B23
  misc_feature (5)..(499): Homolog of NCBI NO: 15231520 NR Description: cytochrome p450 family; protein id: At3g26170.1, by cDNA: 262802. [Arabidopsis thaliana] Cytochrome P450 71B19 >gi|11994436|dbj|BAB02438.1| cytochrome
  misc_feature (5)..(499): Homolog of NCBI NO: 15231522 NR Description: cytochrome p450 family; protein id: At3g26180.1, by cDNA: gi_15810462, supported by cDNA: gi_16226473 [Arabidopsis >gi|13878386|sp|Q9LTM3|C72K_ARATH Cytochrome P450 71B20
MVSLLSFFLLLLVPIFFLLIFTKKIKESKQNLPPGPAKLPIIGNLHQLQGLLHKCLHDLSKKHGPVMHLRLGFAPMVVISSSEAAEEALKTHDLECCSRPITMASRVFSRNGKDIGFGVYGDEWRELRKLSVREFFSVKKVQSFKYIREEENDLMIKKLKELASKQSPVDLSKILFGLTASIIFRTAFGQSFFDNKHVDQESIKELMFESLSNMTFRFSDFFPTAGLKWFIGFVSGQHKRLYNVFNRVDTFFNHIVDDHHSKKATQDRPDMVDAILDMIDNEQQYASFKLTVDHLKGVLSNIYHAGIDTSAITLIWAMAELVRNPRVMKKAQDEIRTCIGIKQEGRIMEEDLDKLQYLKLVVKETLRLHPAAPLLLPRETMADIKIQGYDIPQKRALLVNAWSIGRDPESWKNPEEFNPERFIDCPVDYKGHSFELLPFGSGRRICPGIAMAIATIELGLLNLLYFFDWNMPEKKKDMDMEEAGDLTVDKKVPLELLPVIRISL

SEQ ID NO: 97320 - protein, 438 aa, Arabidopsis thaliana
  peptide (1)..(438): Ceres Seq. ID no. 12736981
  misc_feature (1)..(430): Pfam Name: Cytochrome P450 Pfam Description: Cytochrome P450
  misc_feature (1)..(438): Homolog of NCBI NO: 15231536 NR Description: cytochrome p450 family; protein id: At3g26280.1, by cDNA: gi_19699097, supported by cDNA: gi_3164135 [Arabidopsis >gi|11994449|dbj|BAB02451.1| cytochrome P450 [Arabidopsis
  misc_feature (1)..(438): Homolog of NCBI NO: 5915827 NR Description: Cytochrome P450 71B4 >gi|25282601|pir||T52171
  misc_feature (1)..(434): Homolog of NCBI NO: 15231534 NR Description: cytochrome p450 family; protein id: At3g26270.1 thaliana] >gi|13878381|sp|Q9LTL2|C72P_ARATH Cytochrome P450 71B25
  misc_feature (1)..(434): Homolog of NCBI NO: 15231527 NR Description: cytochrome p450 family; protein id: At3g26220.1, by cDNA: gi_3164133 [Arabidopsis thaliana] Cytochrome P450 71B3 >gi|11994441|dbj|BAB02443.1| cytochrome P450
  misc_feature (1)..(434): Homolog of NCBI NO: 25282600 NR Description: cytochrome P450 monooxygenase [imported] - thaliana >gi|3164134|dbj|BAA28534.1| cytochrome P450
  misc_feature (1)..(434): Homolog of NCBI NO: 17065192 NR Description: cytochrome P450 [Arabidopsis thaliana]
  misc_feature (1)..(434): Homolog of NCBI NO: 15231528 NR Description: cytochrome p450 family; protein id: At3g26230.1 thaliana] >gi|13878382|sp|Q9LTL8|C72O_ARATH Cytochrome P450 71B24
  misc_feature (1)..(435): Homolog of NCBI NO: 15231526 NR Description: cytochrome P450 family; protein id: At3g26210.1 thaliana] >gi|13878383|sp|Q9LTM0|C72N_ARATH Cytochrome P450 71B23
  misc_feature (1)..(433): Homolog of NCBI NO: 15231520 NR Description: cytochrome p450 family; protein id: At3g26170.1, by cDNA: 262802. [Arabidopsis thaliana] Cytochrome P450 71B19 >gi|11994436|dbj|BAB02438.1| cytochrome
  misc_feature (1)..(433): Homolog of NCBI NO: 15231522 NR Description: cytochrome p450 family; protein id: At3g26180.1, by cDNA: gi_15810462, supported by cDNA: gi_16226473 [Arabidopsis >gi|13878386|sp|Q9LTM3|C72K_ARATH Cytochrome P450 71B20
MHLRLGFAPMVVISSSEAAEEALKTHDLECCSRPITMASRVFSRNGKDIGFGVYGDEWRELRKLSVREFFSVKKVQSFKYIREEENDLMIKKLKELASKQSPVDLSKILFGLTASIIFRTAFGQSFFDNKHVDQESIKELMFESLSNMTFRFSDFFPTAGLKWFIGFVSGQHKRLYNVFNRVDTFFNHIVDDHHSKKATQDRPDMVDAILDMIDNEQQYASFKLTVDHLKGVLSNIYHAGIDTSAITLIWAMAELVRNPRVMKKAQDEIRTCIGIKQEGRIMEEDLDKLQYLKLVVKETLRLHPAAPLLLPRETMADIKIQGYDIPQKRALLVNAWSIGRDPESWKNPEEFNPERFIDCPVDYKGHSFELLPFGSGRRICPGIAMAIATIELGLLNLLYFFDWNMPEKKKDMDMEEAGDLTVDKKVPLELLPVIRISL

SEQ ID NO: 97321 - DNA, 1373 bp, Arabidopsis thaliana
  misc_feature (1)..(1373): Ceres Seq. ID no. 12736988
  misc_feature: MA Experiment ID: 20000180 Result: Up-regulated in Transcription
  misc_feature: MA Experiment 20000180 PARAMETER Experiment Name: At_Germinating_Seeds_P Parameter: Age (hr) Value: 24 vs. 0
  misc_feature: MA Experiment 20000180 PARAMETER Experiment Name: At_Germinating_Seeds_P Parameter: Tissue Value: Germinating Seeds
  misc_feature: MA Experiment ID: 20000182 Result: Up-regulated in Transcription
  misc_feature: MA Experiment 20000182 PARAMETER Experiment Name: At_2mM_SA_P Parameter: Age (day) Value: 14
  misc_feature: MA Experiment 20000182 PARAMETER Experiment Name: At_2mM_SA_P Parameter: Organism Value: A. thaliana
  misc_feature: MA Experiment 20000182 PARAMETER Experiment Name: At_2mM_SA_P Parameter: Plant Line Value: WS
  misc_feature: MA Experiment 20000182 PARAMETER Experiment Name: At_2mM_SA_P Parameter: Timepoint (hr) Value: 6
  misc_feature: MA Experiment 20000182 PARAMETER Experiment Name: At_2mM_SA_P Parameter: Tissue Value: Aerial
  misc_feature: MA Experiment 20000182 PARAMETER Experiment Name: At_2mM_SA_P Parameter: Treatment Value: 2mM SA vs. No Treatment
  misc_feature: MA Experiment ID: 20000184 Result: Down-regulated in Transcription
  misc_feature: MA Experiment 20000184 PARAMETER Experiment Name: At_Shoots__P Parameter: Age (day) Value: 7
  misc_feature: MA Experiment 20000184 PARAMETER Experiment Name: At_Shoots__P Parameter: Tissue Value: Shoots vs. Whole Plant
  misc_feature: MA Experiment ID: 20000185 Result: Up-regulated in Transcription
  misc_feature: MA Experiment 20000185 PARAMETER Experiment Name: At_Roots__P Parameter: Age (day) Value: 7 vs. 21
  misc_feature: MA Experiment 20000185 PARAMETER Experiment Name: At_Roots__P Parameter: Organism Value: A. thaliana
  misc_feature: MA Experiment 20000185 PARAMETER Experiment Name: At_Roots__P Parameter: Tissue Value: Roots vs. Whole Plant
  misc_feature: MA Experiment ID: 20000439 Result: Up-regulated in Transcription
  misc_feature: MA Experiment 20000439 PARAMETER Experiment Name: At_Roots__P Parameter: Age (day) Value: 14 vs. 21
  misc_feature: MA Experiment 20000439 PARAMETER Experiment Name: At_Roots__P Parameter: Organism Value: A. thaliana
  misc_feature: MA Experiment 20000439 PARAMETER Experiment Name: At_Roots__P Parameter: Tissue Value: Roots vs. Whole Plant
  misc_feature: MA Experiment ID: 20000453 Result: Up-regulated in Transcription
  misc_feature: MA Experiment 20000453 PARAMETER Experiment Name: At_100uM_ABA_P Parameter: Age (day) Value: 15
  misc_feature: MA Experiment 20000453 PARAMETER Experiment Name: At_100uM_ABA_P Parameter: Organism Value: A. thaliana
  misc_feature: MA Experiment 20000453 PARAMETER Experiment Name: At_100uM_ABA_P Parameter: Plant Line Value: WS
  misc_feature: MA Experiment 20000453 PARAMETER Experiment Name: At_100uM_ABA_P Parameter: Timepoint (hr) Value: 24
  misc_feature: MA Experiment 20000453 PARAMETER Experiment Name: At_100uM_ABA_P Parameter: Tissue Value: Aerial
  misc_feature: MA Experiment 20000453 PARAMETER Experiment Name: At_100uM_ABA_P Parameter: Treatment Value: 100uM ABA vs. No Treatment
  misc_feature: MA Experiment ID: 20000527 Result: Down-regulated in Transcription
  misc_feature: MA Experiment 20000527 PARAMETER Experiment Name: At_10percent_PEG_P Parameter: Age (day) Value: 20
  misc_feature: MA Experiment 20000527 PARAMETER Experiment Name: At_10percent_PEG_P Parameter: Organism Value: A. thaliana
  misc_feature: MA Experiment 20000527 PARAMETER Experiment Name: At_10percent_PEG_P Parameter: Plant Line Value: WS
  misc_feature: MA Experiment 20000527 PARAMETER Experiment Name: At_10percent_PEG_P Parameter: Timepoint (day) Value: 20
  misc_feature: MA Experiment 20000527 PARAMETER Experiment Name: At_10percent_PEG_P Parameter: Tissue Value: Whole Plant
  misc_feature: MA Experiment 20000527 PARAMETER Experiment Name: At_10percent_PEG_P Parameter: Treatment Value: 10percent PEG vs. No Treatment
  misc_feature: MA Experiment ID: 20000794 Result: Up-regulated in Transcription
  misc_feature: MA Experiment 20000794 PARAMETER Experiment Name: At_Petals_P Parameter: Age (day) Value: 23-25 days
  misc_feature: MA Experiment 20000794 PARAMETER Experiment Name: At_Petals_P Parameter: Plant Line Value: WS
  misc_feature: MA Experiment 20000794 PARAMETER Experiment Name: At_Petals_P Parameter: Tissue Value: Petals vs. Whole plant
  misc_feature: MA Experiment ID: 20001451 Result: Up-regulated in Transcription
  misc_feature: MA Experiment 20001451 PARAMETER Experiment Name: At_Far-red-induction_P Parameter: Age (day) Value: 7
  misc_feature: MA Experiment 20001451 PARAMETER Experiment Name: At_Far-red-induction_P Parameter: Light Value: Far-red vs. White
  misc_feature: MA Experiment 20001451 PARAMETER Experiment Name: At_Far-red-induction_P Parameter: Organism Value: A. thaliana
  misc_feature: MA Experiment 20001451 PARAMETER Experiment Name: At_Far-red-induction_P Parameter: Plant Line Value: Columbia
  misc_feature: MA Experiment 20001451 PARAMETER Experiment Name: At_Far-red-induction_P Parameter: Timepoint (hr) Value: 24
  misc_feature: MA Experiment 20001451 PARAMETER Experiment Name: At_Far-red-induction_P Parameter: Tissue Value: Whole Plant
  misc_feature: MA Experiment ID: 20001560 Result: Down-regulated in Transcription
  misc_feature: MA Experiment 20001560 PARAMETER Experiment Name: At_Drought_Soil_Dry_P Parameter: Age (day) Value: 28
  misc_feature: MA Experiment 20001560 PARAMETER Experiment Name: At_Drought_Soil_Dry_P Parameter: Organism Value: A. thaliana
  misc_feature: MA Experiment 20001560 PARAMETER Experiment Name: At_Drought_Soil_Dry_P Parameter: Plant Line Value: WS
  misc_feature: MA Experiment 20001560 PARAMETER Experiment Name: At_Drought_Soil_Dry_P Parameter: Post Timepoint (hr) Value: None
  misc_feature: MA Experiment 20001560 PARAMETER Experiment Name: At_Drought_Soil_Dry_P Parameter: Post-Treatment Value: None
  misc_feature: MA Experiment 20001560 PARAMETER Experiment Name: At_Drought_Soil_Dry_P Parameter: Timepoint (day) Value: 14
  misc_feature: MA Experiment 20001560 PARAMETER Experiment Name: At_Drought_Soil_Dry_P Parameter: Treatment Value: Drought vs. No Drought
  misc_feature: MA Experiment ID: 20001904 Result: Up-regulated in Transcription
  misc_feature: MA Experiment 20001904 PARAMETER Experiment Name: At_Drought_Reproduction_P Parameter: Age (day) Value: 37
  misc_feature: MA Experiment 20001904 PARAMETER Experiment Name: At_Drought_Reproduction_P Parameter: Organism Value: A. thaliana
  misc_feature: MA Experiment 20001904 PARAMETER Experiment Name: At_Drought_Reproduction_P Parameter: Plant Line Value: WS
  misc_feature: MA Experiment 20001904 PARAMETER Experiment Name: At_Drought_Reproduction_P Parameter: Timepoint (day) Value: 7
  misc_feature: MA Experiment 20001904 PARAMETER Experiment Name: At_Drought_Reproduction_P Parameter: Tissue Value: Rosettes
  misc_feature: MA Experiment 20001904 PARAMETER Experiment Name: At_Drought_Reproduction_P Parameter: Treatment Value: Drought vs. No Drought
  misc_feature: MA Experiment ID: 20001905 Result: Up-regulated in Transcription
  misc_feature: MA Experiment 20001905 PARAMETER Experiment Name: At_Drought_Reproduction_P Parameter: Age (day) Value: 40
  misc_feature: MA Experiment 20001905 PARAMETER Experiment Name: At_Drought_Reproduction_P Parameter: Organism Value: A. thaliana
  misc_feature: MA Experiment 20001905 PARAMETER Experiment Name: At_Drought_Reproduction_P Parameter: Plant Line Value: WS
  misc_feature: MA Experiment 20001905 PARAMETER Experiment Name: At_Drought_Reproduction_P Parameter: Timepoint (day) Value: 10
  misc_feature: MA Experiment 20001905 PARAMETER Experiment Name: At_Drought_Reproduction_P Parameter: Tissue Value: Rosettes
  misc_feature: MA Experiment 20001905 PARAMETER Experiment Name: At_Drought_Reproduction_P Parameter: Treatment Value: Drought vs. No Drought
  misc_feature: MA Experiment ID: 20001906 Result: Up-regulated in Transcription
  misc_feature: MA Experiment 20001906 PARAMETER Experiment Name: At_Drought_Reproduction_P Parameter: Age (day) Value: 35
  misc_feature: MA Experiment 20001906 PARAMETER Experiment Name: At_Drought_Reproduction_P Parameter: Organism Value: A. thaliana
  misc_feature: MA Experiment 20001906 PARAMETER Experiment Name: At_Drought_Reproduction_P Parameter: Plant Line Value: WS
  misc_feature: MA Experiment 20001906 PARAMETER Experiment Name: At_Drought_Reproduction_P Parameter: Timepoint (day) Value: 5
  misc_feature: MA Experiment 20001906 PARAMETER Experiment Name: At_Drought_Reproduction_P Parameter: Tissue Value: Siliques
  misc_feature: MA Experiment 20001906 PARAMETER Experiment Name: At_Drought_Reproduction_P Parameter: Treatment Value: Drought vs. No Drought
aaagaaaaaaacagagttcataacttgtgattttgtgctttgtcttatttgttagattacggatagtgaagtctcggagactgaatgatattgtttctggtcaacttaaccaatttcagaacatggcaaacagagcagacaactcaatgcgttgttcaaatagtaagaaaccgaatgacggtatgatgctcgtaatatcgattttcgcgggaatagttatcggatttttattaggcatatctttccctacattgtcactaactaagatgaattttccatcaagcattcttccttctgttgctactgtctacatagaaaatgagaaaccggagaaatcatctaagacgagttcacaaaacgaaagtgatgcatcacatcatcataagatttgggttccatcgaatcctcgaggtgcagagatgttacctccaagttttgttgcagccgaatcggatttttacttacgaagattgtggggattgcctaaagatgatttaccagtggtgaagcctaagtatcttgttgcttttactgtttcttatgaacaaagaaaaaacatcgatgcttgtgtcaaaaaattctcagataacttcaccattgttctgtttcattacgatggaaaaacctcggagtatgatgaatttgaatggtctaaacgggcgatacacgtcagtgtacctaagcaaaccaagtggtggtatgctaaaaggtttctgcatcctgatatcatagcaccatatgaatatatattcatttgggatgaagatcttggcgttgaaaacttcgacgcagaagagtacatcaagattgtgaataagcatggtctagaaatatcgcaacccgctgtggaatcaagaaaatcaatcacatggaagataacaaagagaatacccggaatcgaagttcacaaagaagtcgaagagaaaccaggccgctgcaatgaccctcacctacctccttgtgcagggtttatagagattatggctccagttttctctagagaggcatggcgttgtgtgtggcatatgattcagaatgacttggttcacggttggggtcttgactttgcgctaagaaaatgcgtcgagcctgcacatgagaagattggtgttgtggattctcaatggatcattcatcaaaagattccttctttaggcagccagggaaccgcgcaggaagggaaaaccgcgttccaaggggtaagagagagatgtaaacgggaatggacaatgtttcagaaaagaatgacccgatcagagcagaagtatctgaaagaaattgcatctgcctcttcaaactctacacgtacttaaaccaaaagagtagaggaactgaataacaacctttagtgttcagatagcactttcagtaag

SEQ ID NO: 97322 - protein, 396 aa, Arabidopsis thaliana
  peptide (1)..(396): Ceres Seq. ID no. 12736989
  misc_feature (88)..(266): Pfam Name: Protein of unknown function (DUF707) Pfam Description: Protein of unknown function (DUF707)
  misc_feature (1)..(396): Homolog of NCBI NO: 18404941 NR Description: expressed protein; protein id: At3g26440.1,
  misc_feature (1)..(396): Homolog of NCBI NO: 16612300 NR Description: AT3g26440/F20C19_16 [Arabidopsis thaliana]
  misc_feature (88)..(266): Homolog of NCBI NO: 9294303 NR Description: gb|AAD31054.1~gene_id:F20C19.17~strong similarity
  misc_feature (283)..(396): Homolog of NCBI NO: 9294303 NR Description: gb|AAD31054.1~gene_id:F20C19.17~strong similarity
  misc_feature (1)..(54): Homolog of NCBI NO: 9294303 NR Description: gb|AAD31054.1~gene_id:F20C19.17~strong similarity
  misc_feature (1)..(390): Homolog of NCBI NO: 22329525 NR Description: unknown protein; protein id: At1g13000.1, by cDNA: gi_18175818, supported by cDNA: gi_20465546 [Arabidopsis >gi|18175819|gb|AAL59933.1| unknown protein [Arabidopsis
  misc_feature (88)..(284): Homolog of NCBI NO: 25402748 NR Description: protein F3F19.3 [imported] - Arabidopsis thaliana
  misc_feature (283)..(390): Homolog of NCBI NO: 25402748 NR Description: protein F3F19.3 [imported] - Arabidopsis thaliana
  misc_feature (1)..(54): Homolog of NCBI NO: 25402748 NR Description: protein F3F19.3 [imported] - Arabidopsis thaliana
  misc_feature (10)..(396): Homolog of NCBI NO: 18408876 NR Description: F12A21.2; protein id: At1g67850.1, supported by gi_14326581 [Arabidopsis thaliana] At1g67850/F12A21_2 [Arabidopsis thaliana]
MANRADNSMRCSNSKKPNDGMMLVISIFAGIVIGFLLGISFPTLSLTKMNFPSSILPSVATVYIENEKPEKSSKTSSQNESDASHHHKIWVPSNPRGAEMLPPSFVAAESDFYLRRLWGLPKDDLPVVKPKYLVAFTVSYEQRKNIDACVKKFSDNFTIVLFHYDGKTSEYDEFEWSKRAIHVSVPKQTKWWYAKRFLHPDIIAPYEYIFIWDEDLGVENFDAEEYIKIVNKHGLEISQPAVESRKSITWKITKRIPGIEVHKEVEEKPGRCNDPHLPPCAGFIEIMAPVFSREAWRCVWHMIQNDLVHGWGLDFALRKCVEPAHEKIGVVDSQWIIHQKIPSLGSQGTAQEGKTAFQGVRERCKREWTMFQKRMTRSEQKYLKEIASASSNSTRT

SEQ ID NO: 97323 - protein, 388 aa, Arabidopsis thaliana
  peptide (1)..(388): Ceres Seq. ID no. 12736990
  misc_feature (80)..(258): Pfam Name: Protein of unknown function (DUF707) Pfam Description: Protein of unknown function (DUF707)
  misc_feature (1)..(388): Homolog of NCBI NO: 18404941 NR Description: expressed protein; protein id: At3g26440.1,
  misc_feature (1)..(388): Homolog of NCBI NO: 16612300 NR Description: AT3g26440/F20C19_16 [Arabidopsis thaliana]
  misc_feature (80)..(258): Homolog of NCBI NO: 9294303 NR Description: gb|AAD31054.1~gene_id:F20C19.17~strong similarity
  misc_feature (275)..(388): Homolog of NCBI NO: 9294303 NR Description: gb|AAD31054.1~gene_id:F20C19.17~strong similarity
  misc_feature (1)..(46): Homolog of NCBI NO: 9294303 NR Description: gb|AAD31054.1~gene_id:F20C19.17~strong similarity
  misc_feature (1)..(382): Homolog of NCBI NO: 22329525 NR Description: unknown protein; protein id: At1g13000.1, by cDNA: gi_18175818, supported by cDNA: gi_20465546 [Arabidopsis >gi|18175819|gb|AAL59933.1| unknown protein [Arabidopsis
  misc_feature (80)..(276): Homolog of NCBI NO: 25402748 NR Description: protein F3F19.3 [imported] - Arabidopsis thaliana
  misc_feature (275)..(382): Homolog of NCBI NO: 25402748 NR Description: protein F3F19.3 [imported] - Arabidopsis thaliana
  misc_feature (1)..(46): Homolog of NCBI NO: 25402748 NR Description: protein F3F19.3 [imported] - Arabidopsis thaliana
  misc_feature (2)..(388): Homolog of NCBI NO: 18408876 NR Description: F12A21.2; protein id: At1g67850.1, supported by gi_14326581 [Arabidopsis thaliana] At1g67850/F12A21_2 [Arabidopsis thaliana]
MRCSNSKKPNDGMMLVISIFAGIVIGFLLGISFPTLSLTKMNFPSSILPSVATVYIENEKPEKSSKTSSQNESDASHHHKIWVPSNPRGAEMLPPSFVAAESDFYLRRLWGLPKDDLPVVKPKYLVAFTVSYEQRKNIDACVKKFSDNFTIVLFHYDGKTSEYDEFEWSKRAIHVSVPKQTKWWYAKRFLHPDIIAPYEYIFIWDEDLGVENFDAEEYIKIVNKHGLEISQPAVESRKSITWKITKRIPGIEVHKEVEEKPGRCNDPHLPPCAGFIEIMAPVFSREAWRCVWHMIQNDLVHGWGLDFALRKCVEPAHEKIGVVDSQWIIHQKIPSLGSQGTAQEGKTAFQGVRERCKREWTMFQKRMTRSEQKYLKEIASASSNSTRT

SEQ ID NO: 97324 - protein, 376 aa, Arabidopsis thaliana; identical to SEQ ID NO: 85062
  peptide (1)..(376): Ceres Seq. ID no. 12736991
  misc_feature (68)..(246): Pfam Name: Protein of unknown function (DUF707) Pfam Description: Protein of unknown function (DUF707)
  misc_feature (1)..(376): Homolog of NCBI NO: 18404941 NR Description: expressed protein; protein id: At3g26440.1,
  misc_feature (1)..(376): Homolog of NCBI NO: 16612300 NR Description: AT3g26440/F20C19_16 [Arabidopsis thaliana]
  misc_feature (68)..(246): Homolog of NCBI NO: 9294303 NR Description: gb|AAD31054.1~gene_id:F20C19.17~strong similarity
  misc_feature (263)..(376): Homolog of NCBI NO: 9294303 NR Description: gb|AAD31054.1~gene_id:F20C19.17~strong similarity
  misc_feature (1)..(34): Homolog of NCBI NO: 9294303 NR Description: gb|AAD31054.1~gene_id:F20C19.17~strong similarity
  misc_feature (1)..(370): Homolog of NCBI NO: 22329525 NR Description: unknown protein; protein id: At1g13000.1, by cDNA: gi_18175818, supported by cDNA: gi_20465546 [Arabidopsis >gi|18175819|gb|AAL59933.1| unknown protein [Arabidopsis
  misc_feature (68)..(264): Homolog of NCBI NO: 25402748 NR Description: protein F3F19.3 [imported] - Arabidopsis thaliana
  misc_feature (263)..(370): Homolog of NCBI NO: 25402748 NR Description: protein F3F19.3 [imported] - Arabidopsis thaliana
  misc_feature (1)..(34): Homolog of NCBI NO: 25402748 NR Description: protein F3F19.3 [imported] - Arabidopsis thaliana
  misc_feature (1)..(376): Homolog of NCBI NO: 18408876 NR Description: F12A21.2; protein id: At1g67850.1, supported by gi_14326581 [Arabidopsis thaliana] At1g67850/F12A21_2 [Arabidopsis thaliana]

SEQ ID NO: 97325 - DNA, 1662 bp, Arabidopsis thaliana
  misc_feature (1)..(1662): Ceres Seq. ID no. 12737006
  misc_feature: MA Experiment ID: 20000234 Result: Up-regulated in Transcription
  misc_feature: MA Experiment 20000234 PARAMETER Experiment Name: At_Siliques_P Parameter: Age (day) Value: 21
  misc_feature: MA Experiment 20000234 PARAMETER Experiment Name: At_Siliques_P Parameter: Organism Value: A. thaliana
  misc_feature: MA Experiment 20000234 PARAMETER Experiment Name: At_Siliques_P Parameter: Plant Line Value: WS
  misc_feature: MA Experiment 20000234 PARAMETER Experiment Name: At_Siliques_P Parameter: Tissue Value: Less Than 5mm Siliques vs. Whole Plant
  misc_feature: MA Experiment ID: 20000264 Result: Up-regulated in Transcription
  misc_feature: MA Experiment 20000264 PARAMETER Experiment Name: At_Open_Flower_P Parameter: Age (day) Value: 21
  misc_feature: MA Experiment 20000264 PARAMETER Experiment Name: At_Open_Flower_P Parameter: Plant Line Value: WS
  misc_feature: MA Experiment 20000264 PARAMETER Experiment Name: At_Open_Flower_P Parameter: Tissue Value: Open Flower vs. Whole Plant
  misc_feature: MA Experiment ID: 20000439 Result: Up-regulated in Transcription
  misc_feature: MA Experiment 20000439 PARAMETER Experiment Name: At_Roots__P Parameter: Age (day) Value: 14 vs. 21
  misc_feature: MA Experiment 20000439 PARAMETER Experiment Name: At_Roots__P Parameter: Organism Value: A. thaliana
  misc_feature: MA Experiment 20000439 PARAMETER Experiment Name: At_Roots__P Parameter: Tissue Value: Roots vs. Whole Plant
  misc_feature: MA Experiment ID: 20000441 Result: Down-regulated in Transcription
  misc_feature: MA Experiment 20000441 PARAMETER Experiment Name: At_1uM_BR-BRZ__P Parameter: Tissue Value: Shoot Apices
  misc_feature: MA Experiment 20000441 PARAMETER Experiment Name: At_1uM_BR-BRZ__P Parameter: Treatment Value: 1uM BR vs. No Treatment
  misc_feature: MA Experiment ID: 20000443 Result: Down-regulated in Transcription
  misc_feature: MA Experiment 20000443 PARAMETER Experiment Name: At_1uM_BR-BRZ__P Parameter: Tissue Value: Shoot Apices
  misc_feature: MA Experiment 20000443 PARAMETER Experiment Name: At_1uM_BR-BRZ__P Parameter: Treatment Value: 1uM BRZ vs. No Treatment
  misc_feature: MA Experiment ID: 20000794 Result: Up-regulated in Transcription
  misc_feature: MA Experiment 20000794 PARAMETER Experiment Name: At_Petals_P Parameter: Age (day) Value: 23-25 days
  misc_feature: MA Experiment 20000794 PARAMETER Experiment Name: At_Petals_P Parameter: Plant Line Value: WS
  misc_feature: MA Experiment 20000794 PARAMETER Experiment Name: At_Petals_P Parameter: Tissue Value: Petals vs. Whole plant
  misc_feature: MA Experiment ID: 20001248 Result: Down-regulated in Transcription
  misc_feature: MA Experiment 20001248 PARAMETER Experiment Name: At_Far-red-induction_P Parameter: Age (day) Value: 7
  misc_feature: MA Experiment 20001248 PARAMETER Experiment Name: At_Far-red-induction_P Parameter: Light Value: Far-red vs. White
  misc_feature: MA Experiment 20001248 PARAMETER Experiment Name: At_Far-red-induction_P Parameter: Organism Value: A. thaliana
  misc_feature: MA Experiment 20001248 PARAMETER Experiment Name: At_Far-red-induction_P Parameter: Plant Line Value: Columbia
  misc_feature: MA Experiment 20001248 PARAMETER Experiment Name: At_Far-red-induction_P Parameter: Timepoint (hr) Value: 4
  misc_feature: MA Experiment 20001248 PARAMETER Experiment Name: At_Far-red-induction_P Parameter: Tissue Value: Whole Plant
  misc_feature: MA Experiment ID: 20001450 Result: Down-regulated in Transcription
  misc_feature: MA Experiment 20001450 PARAMETER Experiment Name: At_Far-red-induction_P Parameter: Age (day) Value: 7
  misc_feature: MA Experiment 20001450 PARAMETER Experiment Name: At_Far-red-induction_P Parameter: Light Value: Far-red vs. White
  misc_feature: MA Experiment 20001450 PARAMETER Experiment Name: At_Far-red-induction_P Parameter: Organism Value: A. thaliana
  misc_feature: MA Experiment 20001450 PARAMETER Experiment Name: At_Far-red-induction_P Parameter: Plant Line Value: Columbia
  misc_feature: MA Experiment 20001450 PARAMETER Experiment Name: At_Far-red-induction_P Parameter: Timepoint (hr) Value: 8
  misc_feature: MA Experiment 20001450 PARAMETER Experiment Name: At_Far-red-induction_P Parameter: Tissue Value: Whole Plant
actcgttggtccttagtcttcgacctcctttaatctctccatctctttctcttaagatggcaaaagacaaagatataacggagacgcttctcactgcggcggaagaacgttctgatcttcctttcttatccgtcgacgatattcctccgatcaccaccgtcggtggcttcgttagggaattcaacgtggaaaccaaaaagctatggtacttggccggtcccgccattttcacatccgtgaaccaatattctctcggcgctattactcaggtcttcgccggtcacatcagcaccatcgctcttgccgctgtctccgtcgaaaactccgtcgttgccggcttctcattcggcatcatgcttggaatgggaagtgcgttagaaacgctatgtggacaagcgtttggagcaggaaaattgtcaatgcttggcgtttacttgcaacgatcatgggtgatactaaacgtgactgctcttatcctctctctcctttacattttcgccgcccctatcctcgcgtccattggtcaaacggcggcaatctctagcgcggccggaatattttccatctacatgatccctcaaatctttgcctacgccatcaattttccaaccgctaaatttttgcaatcgcaaagcaagataatggtcatggccgtgatatcggctgttgcacttgttatacacgtgcctctcacgtggtttgtcattgtgaagctccagtggggtatgccaggtctagccgtagtgcttaacgcgtcgtggtgcttcattgacatggctcagcttgtgtacatatttagtggtacgtgtggtgaggcttggtctggtttctcgtgggaggcttttcataatttgtggagtttcgttagattatctttggcttctgctgttatgctctgtttggaggtttggtattttatggcaatcatattatttgctggatatttgaagaatgctgaaatctctgtagctgccctctccatctgcatgaatattttgggatggactgctatgattgctattgggatgaacacagccgtaagtgtgagagtgtctaatgaattaggagctaaccatccaagaaccgcgaaattctcactacttgtggcagtgataacatcgacgctaatcggattcattgtatcaatgattctactcatctttagagatcaatatccatcactttttgtgaaagacgaaaaagtcatcattcttgttaaagaactcacaccaatacttgcactttccattgtcatcaacaatgtccaacctgtcttatcaggtgtggctgtgggagctggatggcaagcagtggtggcctacgttaacatcgcctgctattacgtgtttggaatcccatttggtctattattggggtacaagcttaactatggtgtaatgggaatctggtgtggaatgttgacggggaccgtggttcagacaatagttttaacatggatgatctgcaaaacaaattgggacacagaggcttcaatggctgaggataggataagagaatggggaggagaagtatcagaaataaagcaactcataaactaaaagacatcatagtattcaaagaaacgatctgccccaccctttgtatttggtcacaataggtcttcgttttggttattataagtctttgatagagtttctctaa

SEQ ID NO: 97326 - protein, 518 aa, Arabidopsis thaliana
  peptide (1)..(518): Ceres Seq. ID no. 12737007
  misc_feature (19)..(518): Homolog of NCBI NO: 15231577 NR Description: integral membrane protein, putative; protein id: supported by cDNA: gi_16323120 [Arabidopsis thaliana] unknown [Arabidopsis thaliana] >gi|9293938|dbj|BAB01841.1|
  misc_feature (19)..(518): Homolog of NCBI NO: 15240824 NR Description: putative transmembrane protein; protein id: supported by cDNA: gi_13937233 [Arabidopsis thaliana] emb|CAA66809.1~gene_id:F16F17.3~strong similarity to unknown
  misc_feature (19)..(426): Homolog of NCBI NO: 1495259 NR Description: orf04 [Arabidopsis thaliana]
  misc_feature (17)..(518): Homolog of NCBI NO: 15222119 NR Description: unknown protein; protein id: At1g12950.1
  misc_feature (24)..(516): Homolog of NCBI NO: 15220701 NR Description: conserved hypothetical protein; protein id:
  misc_feature (24)..(495): Homolog of NCBI NO: 25402978 NR Description: protein F26F24.14 [imported] - Arabidopsis >gi|9295710|gb|AAF87016.1|AC005292_25 F26F24.14 [Arabidopsis
  misc_feature (39)..(512): Homolog of NCBI NO: 15220246 NR Description: unknown protein; protein id: At1g47530.1, by cDNA: gi_16604504 [Arabidopsis thaliana]
  misc_feature (39)..(512): Homolog of NCBI NO: 16604505 NR Description: At1g47530/F16N3_20 [Arabidopsis thaliana]
  misc_feature (45)..(517): Homolog of NCBI NO: 30686958 NR Description: MATE efflux protein family [Arabidopsis thaliana]
  misc_feature (35)..(515): Homolog of NCBI NO: 33867697 NR Description: putative anthocyanin permease [Lycopersicon
SLVLSLRPPLISPSLSLKMAKDKDITETLLTAAEERSDLPFLSVDDIPPITTVGGFVREFNVETKKLWYLAGPAIFTSVNQYSLGAITQVFAGHISTIALAAVSVENSVVAGFSFGIMLGMGSALETLCGQAFGAGKLSMLGVYLQRSWVILNVTALILSLLYIFAAPILASIGQTAAISSAAGIFSIYMIPQIFAYAINFPTAKFLQSQSKIMVMAVISAVALVIHVPLTWFVIVKLQWGMPGLAVVLNASWCFIDMAQLVYIFSGTCGEAWSGFSWEAFHNLWSFVRLSLASAVMLCLEVWYFMAIILFAGYLKNAEISVAALSICMNILGWTAMIAIGMNTAVSVRVSNELGANHPRTAKFSLLVAVITSTLIGFIVSMILLIFRDQYPSLFVKDEKVIILVKELTPILALSIVINNVQPVLSGVAVGAGWQAVVAYVNIACYYVFGIPFGLLLGYKLNYGVMGIWCGMLTGTVVQTIVLTWMICKTNWDTEASMAEDRIREWGGEVSEIKQLIN

SEQ ID NO: 97327 - protein, 500 aa, Arabidopsis thaliana
  peptide (1)..(500): Ceres Seq. ID no. 12737008
  misc_feature (1)..(500): Homolog of NCBI NO: 15231577 NR Description: integral membrane protein, putative; protein id: supported by cDNA: gi_16323120 [Arabidopsis thaliana] unknown [Arabidopsis thaliana] >gi|9293938|dbj|BAB01841.1|
  misc_feature (1)..(500): Homolog of NCBI NO: 15240824 NR Description: putative transmembrane protein; protein id: supported by cDNA: gi_13937233 [Arabidopsis thaliana] emb|CAA66809.1~gene_id:F16F17.3~strong similarity to unknown
  misc_feature (1)..(408): Homolog of NCBI NO: 1495259 NR Description: orf04 [Arabidopsis thaliana]
  misc_feature (1)..(500): Homolog of NCBI NO: 15222119 NR Description: unknown protein; protein id: At1g12950.1
  misc_feature (6)..(498): Homolog of NCBI NO: 15220701 NR Description: conserved hypothetical protein; protein id:
  misc_feature (6)..(477): Homolog of NCBI NO: 25402978 NR Description: protein F26F24.14 [imported] - Arabidopsis >gi|9295710|gb|AAF87016.1|AC005292_25 F26F24.14 [Arabidopsis
  misc_feature (21)..(494): Homolog of NCBI NO: 15220246 NR Description: unknown protein; protein id: At1g47530.1, by cDNA: gi_16604504 [Arabidopsis thaliana]
  misc_feature (21)..(494): Homolog of NCBI NO: 16604505 NR Description: At1g47530/F16N3_20 [Arabidopsis thaliana]
  misc_feature (27)..(499): Homolog of NCBI NO: 30686958 NR Description: MATE efflux protein family [Arabidopsis thaliana]
  misc_feature (17)..(497): Homolog of NCBI NO: 33867697 NR Description: putative anthocyanin permease [Lycopersicon
MAKDKDITETLLTAAEERSDLPFLSVDDIPPITTVGGFVREFNVETKKLWYLAGPAIFTSVNQYSLGAITQVFAGHISTIALAAVSVENSVVAGFSFGIMLGMGSALETLCGQAFGAGKLSMLGVYLQRSWVILNVTALILSLLYIFAAPILASIGQTAAISSAAGIFSIYMIPQIFAYAINFPTAKFLQSQSKIMVMAVISAVALVIHVPLTWFVIVKLQWGMPGLAVVLNASWCFIDMAQLVYIFSGTCGEAWSGFSWEAFHNLWSFVRLSLASAVMLCLEVWYFMAIILFAGYLKNAEISVAALSICMNILGWTAMIAIGMNTAVSVRVSNELGANHPRTAKFSLLVAVITSTLIGFIVSMILLIFRDQYPSLFVKDEKVIILVKELTPILALSIVINNVQPVLSGVAVGAGWQAVVAYVNIACYYVFGIPFGLLLGYKLNYGVMGIWCGMLTGTVVQTIVLTWMICKTNWDTEASMAEDRIREWGGEVSEIKQLIN

SEQ ID NO: 97328 - protein, 401 aa, Arabidopsis thaliana
  peptide (1)..(401): Ceres Seq. ID no. 12737009
  misc_feature (1)..(401): Homolog of NCBI NO: 15231577 NR Description: integral membrane protein, putative; protein id: supported by cDNA: gi_16323120 [Arabidopsis thaliana] unknown [Arabidopsis thaliana] >gi|9293938|dbj|BAB01841.1|
  misc_feature (1)..(401): Homolog of NCBI NO: 15240824 NR Description: putative transmembrane protein; protein id: supported by cDNA: gi_13937233 [Arabidopsis thaliana] emb|CAA66809.1~gene_id:F16F17.3~strong similarity to unknown
  misc_feature (1)..(309): Homolog of NCBI NO: 1495259 NR Description: orf04 [Arabidopsis thaliana]
  misc_feature (1)..(401): Homolog of NCBI NO: 15222119 NR Description: unknown protein; protein id: At1g12950.1
  misc_feature (1)..(399): Homolog of NCBI NO: 15220701 NR Description: conserved hypothetical protein; protein id:
  misc_feature (1)..(378): Homolog of NCBI NO: 25402978 NR Description: protein F26F24.14 [imported] - Arabidopsis >gi|9295710|gb|AAF87016.1|AC005292_25 F26F24.14 [Arabidopsis
  misc_feature (1)..(395): Homolog of NCBI NO: 15220246 NR Description: unknown protein; protein id: At1g47530.1, by cDNA: gi_16604504 [Arabidopsis thaliana]
  misc_feature (1)..(395): Homolog of NCBI NO: 16604505 NR Description: At1g47530/F16N3_20 [Arabidopsis thaliana]
  misc_feature (1)..(400): Homolog of NCBI NO: 30686958 NR Description: MATE efflux protein family [Arabidopsis thaliana]
  misc_feature (1)..(398): Homolog of NCBI NO: 33867697 NR Description: putative anthocyanin permease [Lycopersicon
MLGMGSALETLCGQAFGAGKLSMLGVYLQRSWVILNVTALILSLLYIFAAPILASIGQTAAISSAAGIFSIYMIPQIFAYAINFPTAKFLQSQSKIMVMAVISAVALVIHVPLTWFVIVKLQWGMPGLAVVLNASWCFIDMAQLVYIFSGTCGEAWSGFSWEAFHNLWSFVRLSLASAVMLCLEVWYFMAIILFAGYLKNAEISVAALSICMNILGWTAMIAIGMNTAVSVRVSNELGANHPRTAKFSLLVAVITSTLIGFIVSMILLIFRDQYPSLFVKDEKVIILVKELTPILALSIVINNVQPVLSGVAVGAGWQAVVAYVNIACYYVFGIPFGLLLGYKLNYGVMGIWCGMLTGTVVQTIVLTWMICKTNWDTEASMAEDRIREWGGEVSEIKQLIN

SEQ ID NO: 97329 - DNA, 1613 bp, Arabidopsis thaliana
  misc_feature (1)..(1613): Ceres Seq. ID no. 12737016
  misc_feature: MA Experiment ID: 20000185 Result: Down-regulated in Transcription
  misc_feature: MA Experiment 20000185 PARAMETER Experiment Name: At_Roots__P Parameter: Age (day) Value: 7 vs. 21
  misc_feature: MA Experiment 20000185 PARAMETER Experiment Name: At_Roots__P Parameter: Organism Value: A. thaliana
  misc_feature: MA Experiment 20000185 PARAMETER Experiment Name: At_Roots__P Parameter: Tissue Value: Roots vs. Whole Plant
  misc_feature: MA Experiment ID: 20000439 Result: Down-regulated in Transcription
  misc_feature: MA Experiment 20000439 PARAMETER Experiment Name: At_Roots__P Parameter: Age (day) Value: 14 vs. 21
  misc_feature: MA Experiment 20000439 PARAMETER Experiment Name: At_Roots__P Parameter: Organism Value: A. thaliana
  misc_feature: MA Experiment 20000439 PARAMETER Experiment Name: At_Roots__P Parameter: Tissue Value: Roots vs. Whole Plant
  misc_feature: MA Experiment ID: 20001248 Result: Down-regulated in Transcription
  misc_feature: MA Experiment 20001248 PARAMETER Experiment Name: At_Far-red-induction_P Parameter: Age (day) Value: 7
  misc_feature: MA Experiment 20001248 PARAMETER Experiment Name: At_Far-red-induction_P Parameter: Light Value: Far-red vs. White
  misc_feature: MA Experiment 20001248 PARAMETER Experiment Name: At_Far-red-induction_P Parameter: Organism Value: A. thaliana
  misc_feature: MA Experiment 20001248 PARAMETER Experiment Name: At_Far-red-induction_P Parameter: Plant Line Value: Columbia
  misc_feature: MA Experiment 20001248 PARAMETER Experiment Name: At_Far-red-induction_P Parameter: Timepoint (hr) Value: 4
  misc_feature: MA Experiment 20001248 PARAMETER Experiment Name: At_Far-red-induction_P Parameter: Tissue Value: Whole Plant
  misc_feature: MA Experiment ID: 20001450 Result: Down-regulated in Transcription
  misc_feature: MA Experiment 20001450 PARAMETER Experiment Name: At_Far-red-induction_P Parameter: Age (day) Value: 7
  misc_feature: MA Experiment 20001450 PARAMETER Experiment Name: At_Far-red-induction_P Parameter: Light Value: Far-red vs. White
  misc_feature: MA Experiment 20001450 PARAMETER Experiment Name: At_Far-red-induction_P Parameter: Organism Value: A. thaliana
  misc_feature: MA Experiment 20001450 PARAMETER Experiment Name: At_Far-red-induction_P Parameter: Plant Line Value: Columbia
  misc_feature: MA Experiment 20001450 PARAMETER Experiment Name: At_Far-red-induction_P Parameter: Timepoint (hr) Value: 8
  misc_feature: MA Experiment 20001450 PARAMETER Experiment Name: At_Far-red-induction_P Parameter: Tissue Value: Whole Plant
  misc_feature: MA Experiment ID: 20001451 Result: Down-regulated in Transcription
  misc_feature: MA Experiment 20001451 PARAMETER Experiment Name: At_Far-red-induction_P Parameter: Age (day) Value: 7
  misc_feature: MA Experiment 20001451 PARAMETER Experiment Name: At_Far-red-induction_P Parameter: Light Value: Far-red vs. White
  misc_feature: MA Experiment 20001451 PARAMETER Experiment Name: At_Far-red-induction_P Parameter: Organism Value: A. thaliana
  misc_feature: MA Experiment 20001451 PARAMETER Experiment Name: At_Far-red-induction_P Parameter: Plant Line Value: Columbia
  misc_feature: MA Experiment 20001451 PARAMETER Experiment Name: At_Far-red-induction_P Parameter: Timepoint (hr) Value: 24
  misc_feature: MA Experiment 20001451 PARAMETER Experiment Name: At_Far-red-induction_P Parameter: Tissue Value: Whole Plant
gaggaaagagtgaatgtgagaatttggtgatttatcgttaatccatggcggctccgtcgccgtcttcaccaccaaacctcctctctcctccaccattccgatctcccgaagcttcttactttctccgaacttgttcaaatttctctcaattgaaacaaattcacaccaaaatcatcaaacacaatctcaccaacgatcagttactagttcgtcagctcataagtgtttcttcttccttcggagaaacccaatacgcttctctcgtctttaatcaacttcaatctccttctacttttacctggaaccttatgataagatctctctctgttaatcacaaacctcgtgaagctcttcttctctttatccttatgatgatctctcatcaatcccagtttgataaattcactttcccttttgttatcaaagcttgtctcgcttcttcgtcgattcgtttaggtacccaagttcatggtttagctattaaagctgggttttttaatgatgtcttcttccaaaacactctcatggatctttactttaagtgtgggaaaccagatagtggacgtaaggtgtttgataaaatgcctgggagaagtattgtttcatggactactatgctttatggtcttgtctccaattctcagttagattctgcagagattgtattcaatcaaatgccaatgagaaacgttgtttcatggactgcaatgattacggcttacgttaagaaccgtagacccgacgaggcgtttcagctctttaggagaatgcaggttgatgatgtcaagcctaatgagtttacgattgttaatttgttgcaagcttctactcagttaggaagcttgtctatgggaagatgggttcatgactatgctcataaaaacggttttgtgcttgattgtttccttggaaccgctttgatcgatatgtatagcaaatgtggaagcttgcaggacgcaaggaaagtatttgacgtgatgcagggtaagagtttagcgacttggaactcgatgatcactagcttaggggtacatggatgtggtgaagaggctttgtctctgtttgaagagatggaagaagaagcaagcgtagaaccagacgctatcactttcgttggtgtcttatccgcttgtgcgaatactggaaatgtaaaggatggtttgaggtactttactcggatgatccaagtttacggtatctcacctattcgagaacataatgcttgtatgatccaattgttggagcaagcccttgaggtggagaaagcttcaaacttggttgaatccatggattctgatccagacttcaattcttcatttggtaatgaatacacggatggaatgaatgaaacgaacgaaactccgagccaacatcaaattatgttcaccaagtgggatacaggccgattttgaaggttcagtgtctcttgacatatatattttcgtctattaaacagattcattgatcatctttgtaactatacaagaaaagctccttcaaaagtagtgtaatgtcatgtacttgtaaaaggaatgggagcttaagcagggaaaatagtaaattcgatttgtaatagtgtcatgtattttgtaaacagattcatttatcttttt

SEQ ID NO: 97330 - protein, 455 aa, Arabidopsis thaliana
  peptide (1)..(455): Ceres Seq. ID no. 12737017
  misc_feature (155)..(189): Pfam Name: PPR repeat Pfam Description: PPR repeat
  misc_feature (1)..(455): Homolog of NCBI NO: 15231592 NR Description: unknown protein; protein id: At3g26630.1, by cDNA: gi_20466383 [Arabidopsis thaliana] unknown [Arabidopsis thaliana] >gi|1495263|emb|CAA66119.1| orf09
  misc_feature (27)..(420): Homolog of NCBI NO: 15239979 NR Description: selenium-binding protein-like; protein id:
  misc_feature (30)..(420): Homolog of NCBI NO: 15228028 NR Description: hypothetical protein; protein id: At2g42920.1
  misc_feature (26)..(455): Homolog of NCBI NO: 15225375 NR Description: unknown protein; protein id: At2g20540.1
  misc_feature (27)..(420): Homolog of NCBI NO: 15225445 NR Description: hypothetical protein; protein id: At2g13600.1
  misc_feature (27)..(419): Homolog of NCBI NO: 15241448 NR Description: selenium-binding protein-like; protein id:
  misc_feature (201)..(418): Homolog of NCBI NO: 15230248 NR Description: hypothetical protein; protein id: At3g25060.1 thaliana] >gi|9293988|dbj|BAB01891.1|
  misc_feature (21)..(211): Homolog of NCBI NO: 15230248 NR Description: hypothetical protein; protein id: At3g25060.1 thaliana] >gi|9293988|dbj|BAB01891.1|
  misc_feature (37)..(420): Homolog of NCBI NO: 15221713 NR Description: PPR-repeat protein; protein id: At1g31430.1
  misc_feature (201)..(426): Homolog of NCBI NO: 15221400 NR Description: hypothetical protein; protein id: At1g06140.1
MAAPSPSSPPNLLSPPPFRSPEASYFLRTCSNFSQLKQIHTKIIKHNLTNDQLLVRQLISVSSSFGETQYASLVFNQLQSPSTFTWNLMIRSLSVNHKPREALLLFILMMISHQSQFDKFTFPFVIKACLASSSIRLGTQVHGLAIKAGFFNDVFFQNTLMDLYFKCGKPDSGRKVFDKMPGRSIVSWTTMLYGLVSNSQLDSAEIVFNQMPMRNVVSWTAMITAYVKNRRPDEAFQLFRRMQVDDVKPNEFTIVNLLQASTQLGSLSMGRWVHDYAHKNGFVLDCFLGTALIDMYSKCGSLQDARKVFDVMQGKSLATWNSMITSLGVHGCGEEALSLFEEMEEEASVEPDAITFVGVLSACANTGNVKDGLRYFTRMIQVYGISPIREHNACMIQLLEQALEVEKASNLVESMDSDPDFNSSFGNEYTDGMNETNETPSQHQIMFTKWDTGRF

SEQ ID NO: 97331 - protein, 367 aa, Arabidopsis thaliana
  peptide (1)..(367): Ceres Seq. ID no. 12737018
  misc_feature (67)..(101): Pfam Name: PPR repeat Pfam Description: PPR repeat
  misc_feature (1)..(367): Homolog of NCBI NO: 15231592 NR Description: unknown protein; protein id: At3g26630.1, by cDNA: gi_20466383 [Arabidopsis thaliana] unknown [Arabidopsis thaliana] >gi|1495263|emb|CAA66119.1| orf09
  misc_feature (1)..(332): Homolog of NCBI NO: 15239979 NR Description: selenium-binding protein-like; protein id:
  misc_feature (1)..(332): Homolog of NCBI NO: 15228028 NR Description: hypothetical protein; protein id: At2g42920.1
  misc_feature (1)..(367): Homolog of NCBI NO: 15225375 NR Description: unknown protein; protein id: At2g20540.1
  misc_feature (1)..(332): Homolog of NCBI NO: 15225445 NR Description: hypothetical protein; protein id: At2g13600.1
  misc_feature (1)..(331): Homolog of NCBI NO: 15241448 NR Description: selenium-binding protein-like; protein id:
  misc_feature (113)..(330): Homolog of NCBI NO: 15230248 NR Description: hypothetical protein; protein id: At3g25060.1 thaliana] >gi|9293988|dbj|BAB01891.1|
  misc_feature (1)..(123): Homolog of NCBI NO: 15230248 NR Description: hypothetical protein; protein id: At3g25060.1 thaliana] >gi|9293988|dbj|BAB01891.1|
  misc_feature (1)..(332): Homolog of NCBI NO: 15221713 NR Description: PPR-repeat protein; protein id: At1g31430.1
  misc_feature (113)..(338): Homolog of NCBI NO: 15221400 NR Description: hypothetical protein; protein id: At1g06140.1
MIRSLSVNHKPREALLLFILMMISHQSQFDKFTFPFVIKACLASSSIRLGTQVHGLAIKAGFFNDVFFQNTLMDLYFKCGKPDSGRKVFDKMPGRSIVSWTTMLYGLVSNSQLDSAEIVFNQMPMRNVVSWTAMITAYVKNRRPDEAFQLFRRMQVDDVKPNEFTIVNLLQASTQLGSLSMGRWVHDYAHKNGFVLDCFLGTALIDMYSKCGSLQDARKVFDVMQGKSLATWNSMITSLGVHGCGEEALSLFEEMEEEASVEPDAITFVGVLSACANTGNVKDGLRYFTRMIQVYGISPIREHNACMIQLLEQALEVEKASNLVESMDSDPDFNSSFGNEYTDGMNETNETPSQHQIMFTKWDTGRF

SEQ ID NO: 97332 - protein, 347 aa, Arabidopsis thaliana
  peptide (1)..(347): Ceres Seq. ID no. 12737019
  misc_feature (47)..(81): Pfam Name: PPR repeat Pfam Description: PPR repeat
  misc_feature (1)..(347): Homolog of NCBI NO: 15231592 NR Description: unknown protein; protein id: At3g26630.1, by cDNA: gi_20466383 [Arabidopsis thaliana] unknown [Arabidopsis thaliana] >gi|1495263|emb|CAA66119.1| orf09
  misc_feature (1)..(312): Homolog of NCBI NO: 15239979 NR Description: selenium-binding protein-like; protein id:
  misc_feature (1)..(312): Homolog of NCBI NO: 15228028 NR Description: hypothetical protein; protein id: At2g42920.1
  misc_feature (1)..(347): Homolog of NCBI NO: 15225375 NR Description: unknown protein; protein id: At2g20540.1
  misc_feature (1)..(312): Homolog of NCBI NO: 15225445 NR Description: hypothetical protein; protein id: At2g13600.1
  misc_feature (1)..(311): Homolog of NCBI NO: 15241448 NR Description: selenium-binding protein-like; protein id:
  misc_feature (93)..(310): Homolog of NCBI NO: 15230248 NR Description: hypothetical protein; protein id: At3g25060.1 thaliana] >gi|9293988|dbj|BAB01891.1|
  misc_feature (1)..(103): Homolog of NCBI NO: 15230248 NR Description: hypothetical protein; protein id: At3g25060.1 thaliana] >gi|9293988|dbj|BAB01891.1|
  misc_feature (1)..(312): Homolog of NCBI NO: 15221713 NR Description: PPR-repeat protein; protein id: At1g31430.1
  misc_feature (93)..(318): Homolog of NCBI NO: 15221400 NR Description: hypothetical protein; protein id: At1g06140.1
MMISHQSQFDKFTFPFVIKACLASSSIRLGTQVHGLAIKAGFFNDVFFQNTLMDLYFKCGKPDSGRKVFDKMPGRSIVSWTTMLYGLVSNSQLDSAEIVFNQMPMRNVVSWTAMITAYVKNRRPDEAFQLFRRMQVDDVKPNEFTIVNLLQASTQLGSLSMGRWVHDYAHKNGFVLDCFLGTALIDMYSKCGSLQDARKVFDVMQGKSLATWNSMITSLGVHGCGEEALSLFEEMEEEASVEPDAITFVGVLSACANTGNVKDGLRYFTRMIQVYGISPIREHNACMIQLLEQALEVEKASNLVESMDSDPDFNSSFGNEYTDGMNETNETPSQHQIMFTKWDTGRF

SEQ ID NO: 97333 - DNA, 1053 bp, Arabidopsis thaliana
  misc_feature (1)..(1053): Ceres Seq. ID no. 12737020
  misc_feature: MA Experiment ID: 20000180 Result: Up-regulated in Transcription
  misc_feature: MA Experiment 20000180 PARAMETER Experiment Name: At_Germinating_Seeds_P Parameter: Age (hr) Value: 24 vs. 0
  misc_feature: MA Experiment 20000180 PARAMETER Experiment Name: At_Germinating_Seeds_P Parameter: Tissue Value: Germinating Seeds
  misc_feature: MA Experiment ID: 20000185 Result: Down-regulated in Transcription
  misc_feature: MA Experiment 20000185 PARAMETER Experiment Name: At_Roots__P Parameter: Age (day) Value: 7 vs. 21
  misc_feature: MA Experiment 20000185 PARAMETER Experiment Name: At_Roots__P Parameter: Organism Value: A. thaliana
  misc_feature: MA Experiment 20000185 PARAMETER Experiment Name: At_Roots__P Parameter: Tissue Value: Roots vs. Whole Plant
  misc_feature: MA Experiment ID: 20000227 Result: Down-regulated in Transcription
  misc_feature: MA Experiment 20000227 PARAMETER Experiment Name: At_Root-Tips-vs-Tops_P Parameter: Tissue Value: Root Tips vs. Root Tops
  misc_feature: MA Experiment ID: 20000437 Result: Down-regulated in Transcription
  misc_feature: MA Experiment 20000437 PARAMETER Experiment Name: At_Drought_P Parameter: Age (day) Value: 8
  misc_feature: MA Experiment 20000437 PARAMETER Experiment Name: At_Drought_P Parameter: Organism Value: A. thaliana
  misc_feature: MA Experiment 20000437 PARAMETER Experiment Name: At_Drought_P Parameter: Plant Line Value: WS
  misc_feature: MA Experiment 20000437 PARAMETER Experiment Name: At_Drought_P Parameter: Timepoint (hr) Value: 24
  misc_feature: MA Experiment 20000437 PARAMETER Experiment Name: At_Drought_P Parameter: Tissue Value: Whole Plant
  misc_feature: MA Experiment 20000437 PARAMETER Experiment Name: At_Drought_P Parameter: Treatment Value: Drought vs. No Drought
  misc_feature: MA Experiment ID: 20000439 Result: Down-regulated in Transcription
  misc_feature: MA Experiment 20000439 PARAMETER Experiment Name: At_Roots__P Parameter: Age (day) Value: 14 vs. 21
  misc_feature: MA Experiment 20000439 PARAMETER Experiment Name: At_Roots__P Parameter: Organism Value: A. thaliana
  misc_feature: MA Experiment 20000439 PARAMETER Experiment Name: At_Roots__P Parameter: Tissue Value: Roots vs. Whole Plant
  misc_feature: MA Experiment ID: 20000794 Result: Down-regulated in Transcription
  misc_feature: MA Experiment 20000794 PARAMETER Experiment Name: At_Petals_P Parameter: Age (day) Value: 23-25 days
  misc_feature: MA Experiment 20000794 PARAMETER Experiment Name: At_Petals_P Parameter: Plant Line Value: WS
  misc_feature: MA Experiment 20000794 PARAMETER Experiment Name: At_Petals_P Parameter: Tissue Value: Petals vs. Whole plant
  misc_feature: MA Experiment ID: 20001451 Result: Down-regulated in Transcription
  misc_feature: MA Experiment 20001451 PARAMETER Experiment Name: At_Far-red-induction_P Parameter: Age (day) Value: 7
  misc_feature: MA Experiment 20001451 PARAMETER Experiment Name: At_Far-red-induction_P Parameter: Light Value: Far-red vs. White
  misc_feature: MA Experiment 20001451 PARAMETER Experiment Name: At_Far-red-induction_P Parameter: Organism Value: A. thaliana
  misc_feature: MA Experiment 20001451 PARAMETER Experiment Name: At_Far-red-induction_P Parameter: Plant Line Value: Columbia
  misc_feature: MA Experiment 20001451 PARAMETER Experiment Name: At_Far-red-induction_P Parameter: Timepoint (hr) Value: 24
  misc_feature: MA Experiment 20001451 PARAMETER Experiment Name: At_Far-red-induction_P Parameter: Tissue Value: Whole Plant
  misc_feature: MA Experiment ID: 20001557 Result: Down-regulated in Transcription
  misc_feature: MA Experiment 20001557 PARAMETER Experiment Name: At_Drought_Soil_Dry_P Parameter: Age (day) Value: 27
  misc_feature: MA Experiment 20001557 PARAMETER Experiment Name: At_Drought_Soil_Dry_P Parameter: Organism Value: A. thaliana
  misc_feature: MA Experiment 20001557 PARAMETER Experiment Name: At_Drought_Soil_Dry_P Parameter: Plant Line Value: WS
  misc_feature: MA Experiment 20001557 PARAMETER Experiment Name: At_Drought_Soil_Dry_P Parameter: Post Timepoint (hr) Value: 3
  misc_feature: MA Experiment 20001557 PARAMETER Experiment Name: At_Drought_Soil_Dry_P Parameter: Post-Treatment Value: Re-Water vs. No Drought
  misc_feature: MA Experiment 20001557 PARAMETER Experiment Name: At_Drought_Soil_Dry_P Parameter: Timepoint (day) Value: 13
  misc_feature: MA Experiment 20001557 PARAMETER Experiment Name: At_Drought_Soil_Dry_P Parameter: Treatment Value: Drought vs. No Drought
  misc_feature: MA Experiment ID: 20001757 Result: Up-regulated in Transcription
  misc_feature: MA Experiment 20001757 PARAMETER Experiment Name: At_50mM_NH4NO3_L-to-H_P Parameter: Timepoint (hr) Value: 6
  misc_feature: MA Experiment 20001757 PARAMETER Experiment Name: At_50mM_NH4NO3_L-to-H_P Parameter: Tissue Value: Leaf
  misc_feature: MA Experiment 20001757 PARAMETER Experiment Name: At_50mM_NH4NO3_L-to-H_P Parameter: Treatment Value: 50mM NH4NO3 vs 100mM Mannitol
  misc_feature: MA Experiment ID: 20001904 Result: Down-regulated in Transcription
  misc_feature: MA Experiment 20001904 PARAMETER Experiment Name: At_Drought_Reproduction_P Parameter: Age (day) Value: 37
  misc_feature: MA Experiment 20001904 PARAMETER Experiment Name: At_Drought_Reproduction_P Parameter: Organism Value: A. thaliana
  misc_feature: MA Experiment 20001904 PARAMETER Experiment Name: At_Drought_Reproduction_P Parameter: Plant Line Value: WS
  misc_feature: MA Experiment 20001904 PARAMETER Experiment Name: At_Drought_Reproduction_P Parameter: Timepoint (day) Value: 7
  misc_feature: MA Experiment 20001904 PARAMETER Experiment Name: At_Drought_Reproduction_P Parameter: Tissue Value: Rosettes
  misc_feature: MA Experiment 20001904 PARAMETER Experiment Name: At_Drought_Reproduction_P Parameter: Treatment Value: Drought vs. No Drought
  misc_feature: MA Experiment ID: 20001906 Result: Down-regulated in Transcription
  misc_feature: MA Experiment 20001906 PARAMETER Experiment Name: At_Drought_Reproduction_P Parameter: Age (day) Value: 35
  misc_feature: MA Experiment 20001906 PARAMETER Experiment Name: At_Drought_Reproduction_P Parameter: Organism Value: A. thaliana
  misc_feature: MA Experiment 20001906 PARAMETER Experiment Name: At_Drought_Reproduction_P Parameter: Plant Line Value: WS
  misc_feature: MA Experiment 20001906 PARAMETER Experiment Name: At_Drought_Reproduction_P Parameter: Timepoint (day) Value: 5
  misc_feature: MA Experiment 20001906 PARAMETER Experiment Name: At_Drought_Reproduction_P Parameter: Tissue Value: Siliques
  misc_feature: MA Experiment 20001906 PARAMETER Experiment Name: At_Drought_Reproduction_P Parameter: Treatment Value: Drought vs. No Drought
atgggaagcagtggtggatacaggaaaggtgtgactgaggccaagcttaaggtggccattaatggattcggtaggatcgggaggaacttcctgagatgttggcatggtcgcaaggactctcctcttgatatcattgccattaatgacactggtggcgtcaagcaggcttcgcatttacttaaatacgactctactctcggaatctttgatgctgatgtcaaaccttctggagagactgcaatctctgttgatggaaagatcatccaagttgtctctaaccgaaacccgtctcttctcccttggaaggagctaggaattgacattgtcatcgaaggaaccggagtgtttgtggatagagaaggtgcagggaaacacattgaagctggtgccaagaaggttatcattactgctccaggcaaaggagatattccaacttatgtcgttggtgtcaatgcagatgcttacagtcatgatgaacctatcatcagcaatgcatcttgcactaccaactgtcttgctccctttgtcaaagttcttgaccagaaattcggtatcataaagggtacaatgacgactactcactcttacaccggtgaccagaggttgctagacgcgagtcaccgtgatctaaggagagcaagagcagctgctttgaacattgttcctacttctacaggagcagctaaagctgtggctcttgtgctccctaacctcaaaggaaaactcaacgggatcgctctccgtgtaccaacaccaaacgtatcagtggttgatctcgttgtgcaggtctcaaagaagacatttgctgaggaagtcaacgctgctttcagagattctgcagagaaagagcttaaaggtatactcgatgtctgcgatgagccactagtgtccgttgatttcagatgctcagatttttcaacgaccattgattcatcactcactatggttatgggagatgatatggttaaggtgattgcttggtatgataatgaatggggttactcacagagagttgttgacttggctgacattgttgccaacaactggaagtga

SEQ ID NO: 97334 - protein, 350 aa, Arabidopsis thaliana; identical to SEQ ID NO: 45929
  peptide (1)..(350): Ceres Seq. ID no. 12737021
  misc_feature (168)..(328): Pfam Name: Glyceraldehyde 3-phosphate dehydrogenase, Pfam Description: Glyceraldehyde 3-phosphate dehydrogenase,
  misc_feature (1)..(350): Homolog of NCBI NO: 30688425 NR Description: glyceraldehyde 3-phosphate dehydrogenase A
  misc_feature (1)..(350): Homolog of NCBI NO: 166702 NR Description: glyceraldehyde 3-phosphate dehydrogenase A
  misc_feature (1)..(350): Homolog of NCBI NO: 2117520 NR Description: glyceraldehyde-3-phosphate dehydrogenase (NADP)
  misc_feature (1)..(350): Homolog of NCBI NO: 15222111 NR Description: putative calcium-binding protein, calreticulin;
  misc_feature (1)..(350): Homolog of NCBI NO: 120658 NR Description: Glyceraldehyde 3-phosphate dehydrogenase A,
  misc_feature (1)..(350): Homolog of NCBI NO: 20729 NR Description: precursor (AA -68 to 337) [Pisum sativum]
  misc_feature (1)..(350): Homolog of NCBI NO: 22240 NR Description: GADPH (383 AA) [Zea mays]
  misc_feature (1)..(350): Homolog of NCBI NO: 120657 NR Description: Glyceraldehyde 3-phosphate dehydrogenase A,
  misc_feature (1)..(350): Homolog of NCBI NO: 20455487 NR Description: Glyceraldehyde 3-phosphate dehydrogenase A,
  misc_feature (1)..(350): Homolog of NCBI NO: 7431526 NR Description: glyceraldehyde-3-phosphate dehydrogenase (NADP)

SEQ ID NO: 97335 - DNA, 810 bp, Arabidopsis thaliana
  misc_feature (1)..(810): Ceres Seq. ID no. 12737037
  misc_feature: MA Experiment ID: 20000185 Result: Up-regulated in Transcription
  misc_feature: MA Experiment 20000185 PARAMETER Experiment Name: At_Roots__P Parameter: Age (day) Value: 7 vs. 21
  misc_feature: MA Experiment 20000185 PARAMETER Experiment Name: At_Roots__P Parameter: Organism Value: A. thaliana
  misc_feature: MA Experiment 20000185 PARAMETER Experiment Name: At_Roots__P Parameter: Tissue Value: Roots vs. Whole Plant
  misc_feature: MA Experiment ID: 20000444 Result: Up-regulated in Transcription
  misc_feature: MA Experiment 20000444 PARAMETER Experiment Name: At_100uM_NAA__P Parameter: Age (day) Value: 14
  misc_feature: MA Experiment 20000444 PARAMETER Experiment Name: At_100uM_NAA__P Parameter: Organism Value: A. thaliana
  misc_feature: MA Experiment 20000444 PARAMETER Experiment Name: At_100uM_NAA__P Parameter: Plant Line Value: WS
  misc_feature: MA Experiment 20000444 PARAMETER Experiment Name: At_100uM_NAA__P Parameter: Timepoint (hr) Value: 1
  misc_feature: MA Experiment 20000444 PARAMETER Experiment Name: At_100uM_NAA__P Parameter: Tissue Value: Aerial
  misc_feature: MA Experiment 20000444 PARAMETER Experiment Name: At_100uM_NAA__P Parameter: Treatment Value: 100uM NAA vs. No Treatment
  misc_feature: MA Experiment ID: 20001247 Result: Up-regulated in Transcription
  misc_feature: MA Experiment 20001247 PARAMETER Experiment Name: At_Far-red-induction_P Parameter: Age (day) Value: 7
  misc_feature: MA Experiment 20001247 PARAMETER Experiment Name: At_Far-red-induction_P Parameter: Light Value: Far-red vs. White
  misc_feature: MA Experiment 20001247 PARAMETER Experiment Name: At_Far-red-induction_P Parameter: Organism Value: A. thaliana
  misc_feature: MA Experiment 20001247 PARAMETER Experiment Name: At_Far-red-induction_P Parameter: Plant Line Value: Columbia
  misc_feature: MA Experiment 20001247 PARAMETER Experiment Name: At_Far-red-induction_P Parameter: Timepoint (hr) Value: 1
  misc_feature: MA Experiment 20001247 PARAMETER Experiment Name: At_Far-red-induction_P Parameter: Tissue Value: Whole Plant
  misc_feature: MA Experiment ID: 20001248 Result: Up-regulated in Transcription
  misc_feature: MA Experiment 20001248 PARAMETER Experiment Name: At_Far-red-induction_P Parameter: Age (day) Value: 7
  misc_feature: MA Experiment 20001248 PARAMETER Experiment Name: At_Far-red-induction_P Parameter: Light Value: Far-red vs. White
  misc_feature: MA Experiment 20001248 PARAMETER Experiment Name: At_Far-red-induction_P Parameter: Organism Value: A. thaliana
  misc_feature: MA Experiment 20001248 PARAMETER Experiment Name: At_Far-red-induction_P Parameter: Plant Line Value: Columbia
  misc_feature: MA Experiment 20001248 PARAMETER Experiment Name: At_Far-red-induction_P Parameter: Timepoint (hr) Value: 4
  misc_feature: MA Experiment 20001248 PARAMETER Experiment Name: At_Far-red-induction_P Parameter: Tissue Value: Whole Plant
atgtatagaaagttagaaggaaaagtagcggtcataaccggcggggcaagcggaatagggaaggccacagcggaggaatttgtgagccaaggtgcgcaagtgattatcgtagatatagatgaagaggctggtcatatggtcgcgaccgaacttggctcagccgcacatttcttaagatgtgatgtcactgaggaggaacaaatcgctaaggccgtggagaccgccgtgactcgtcatgggaagctcgacgtaatgctcaatagtgcgggaatatcatgctccatatcaccaccaagcatagcggacctagacatggacacttacgacaaagtgatgcgtctcaacgtgcgaggtactgtcttagggataaagcacgcggctcgagccatgatccccgctggctcgggctccatcctctgcctctctagcatcagcggcttgatgggtggtctaggcccacacgcatactcaatctctaaattcacaatcccgggtgtggtcaagacggttgcgagcgagctgtgtaagcacggactaagaatcaattgtatatcgcccgcaggcatcccgacgcctctaactttgaggatgtttcgagaggcgtttgcgggtcatagcattcgggaggaacaacttttggcgattgtgaacgcgacgggagaactaaagggagagaagtgtgaggagatagatgtggctaaagcggctttgtatttggcatcggatgatgctaagtttgtgacggggcataaccttgttgttgatggtggatttacttgtttcaagtctcttaatctcccttctgcttaa

SEQ ID NO: 97336 - protein, 269 aa, Arabidopsis thaliana
  peptide (1)..(269): Ceres Seq. ID no. 12737038
  misc_feature (3)..(269): Homolog of NCBI NO: 30688484 NR Description: short-chain dehydrogenase/reductase family protein
  misc_feature (3)..(267): Homolog of NCBI NO: 18405088 NR Description: putative short chain alcohol dehydrogenase; id: At3g26770.1, supported by cDNA: gi_15529183 [Arabidopsis
  misc_feature (3)..(267): Homolog of NCBI NO: 15529184 NR Description: AT3g26770/MDJ14_21 [Arabidopsis thaliana]
  misc_feature (2)..(268): Homolog of NCBI NO: 18412155 NR Description: putative alcohol dehydrogenase; protein id:
  misc_feature (3)..(268): Homolog of NCBI NO: 25283123 NR Description: probable alcohol dehydrogenase [imported] - thaliana >gi|4262142|gb|AAD14442.1| putative alcohol [Arabidopsis thaliana] >gi|7270184|emb|CAB77799.1| putative
  misc_feature (4)..(269): Homolog of NCBI NO: 34899216 NR Description: alcohol dehydrogenase-like protein [Oryza sativa
  misc_feature (4)..(269): Homolog of NCBI NO: 34899218 NR Description: alcohol dehydrogenase-like protein~contains EST
  misc_feature (4)..(268): Homolog of NCBI NO: 34899188 NR Description: similar to alcohol dehydrogenase [Oryza sativa
  misc_feature (3)..(269): Homolog of NCBI NO: 34899230 NR Description: alcohol dehydrogenase-like protein [Oryza sativa
  misc_feature (3)..(268): Homolog of NCBI NO: 34899220 NR Description: alcohol dehydrogenase-like protein [Oryza sativa
MYRKLEGKVAVITGGASGIGKATAEEFVSQGAQVIIVDIDEEAGHMVATELGSAAHFLRCDVTEEEQIAKAVETAVTRHGKLDVMLNSAGISCSISPPSIADLDMDTYDKVMRLNVRGTVLGIKHAARAMIPAGSGSILCLSSISGLMGGLGPHAYSISKFTIPGVVKTVASELCKHGLRINCISPAGIPTPLTLRMFREAFAGHSIREEQLLAIVNATGELKGEKCEEIDVAKAALYLASDDAKFVTGHNLVVDGGFTCFKSLNLPSA

SEQ ID NO: 97337 - protein, 224 aa, Arabidopsis thaliana
  peptide (1)..(224): Ceres Seq. ID no. 12737039
  misc_feature (1)..(224): Homolog of NCBI NO: 30688484 NR Description: short-chain dehydrogenase/reductase family protein
  misc_feature (1)..(222): Homolog of NCBI NO: 18405088 NR Description: putative short chain alcohol dehydrogenase; id: At3g26770.1, supported by cDNA: gi_15529183 [Arabidopsis
  misc_feature (1)..(222): Homolog of NCBI NO: 15529184 NR Description: AT3g26770/MDJ14_21 [Arabidopsis thaliana]
  misc_feature (1)..(223): Homolog of NCBI NO: 18412155 NR Description: putative alcohol dehydrogenase; protein id:
  misc_feature (1)..(223): Homolog of NCBI NO: 25283123 NR Description: probable alcohol dehydrogenase [imported] - thaliana >gi|4262142|gb|AAD14442.1| putative alcohol [Arabidopsis thaliana] >gi|7270184|emb|CAB77799.1| putative
  misc_feature (1)..(224): Homolog of NCBI NO: 34899216 NR Description: alcohol dehydrogenase-like protein [Oryza sativa
  misc_feature (1)..(224): Homolog of NCBI NO: 34899218 NR Description: alcohol dehydrogenase-like protein~contains EST
  misc_feature (1)..(223): Homolog of NCBI NO: 34899188 NR Description: similar to alcohol dehydrogenase [Oryza sativa
  misc_feature (1)..(224): Homolog of NCBI NO: 34899230 NR Description: alcohol dehydrogenase-like protein [Oryza sativa
  misc_feature (1)..(223): Homolog of NCBI NO: 34899220 NR Description: alcohol dehydrogenase-like protein [Oryza sativa
MVATELGSAAHFLRCDVTEEEQIAKAVETAVTRHGKLDVMLNSAGISCSISPPSIADLDMDTYDKVMRLNVRGTVLGIKHAARAMIPAGSGSILCLSSISGLMGGLGPHAYSISKFTIPGVVKTVASELCKHGLRINCISPAGIPTPLTLRMFREAFAGHSIREEQLLAIVNATGELKGEKCEEIDVAKAALYLASDDAKFVTGHNLVVDGGFTCFKSLNLPSA

SEQ ID NO: 97338 - protein, 185 aa, Arabidopsis thaliana
  peptide (1)..(185): Ceres Seq. ID no. 12737040
  misc_feature (1)..(185): Homolog of NCBI NO: 30688484 NR Description: short-chain dehydrogenase/reductase family protein
  misc_feature (1)..(183): Homolog of NCBI NO: 18405088 NR Description: putative short chain alcohol dehydrogenase; id: At3g26770.1, supported by cDNA: gi_15529183 [Arabidopsis
  misc_feature (1)..(183): Homolog of NCBI NO: 15529184 NR Description: AT3g26770/MDJ14_21 [Arabidopsis thaliana]
  misc_feature (1)..(184): Homolog of NCBI NO: 18412155 NR Description: putative alcohol dehydrogenase; protein id:
  misc_feature (1)..(184): Homolog of NCBI NO: 25283123 NR Description: probable alcohol dehydrogenase [imported] - thaliana >gi|4262142|gb|AAD14442.1| putative alcohol [Arabidopsis thaliana] >gi|7270184|emb|CAB77799.1| putative
  misc_feature (1)..(185): Homolog of NCBI NO: 34899216 NR Description: alcohol dehydrogenase-like protein [Oryza sativa
  misc_feature (1)..(185): Homolog of NCBI NO: 34899218 NR Description: alcohol dehydrogenase-like protein~contains EST
  misc_feature (1)..(184): Homolog of NCBI NO: 34899188 NR Description: similar to alcohol dehydrogenase [Oryza sativa
  misc_feature (1)..(185): Homolog of NCBI NO: 34899230 NR Description: alcohol dehydrogenase-like protein [Oryza sativa
  misc_feature (1)..(184): Homolog of NCBI NO: 34899220 NR Description: alcohol dehydrogenase-like protein [Oryza sativa
MLNSAGISCSISPPSIADLDMDTYDKVMRLNVRGTVLGIKHAARAMIPAGSGSILCLSSISGLMGGLGPHAYSISKFTIPGVVKTVASELCKHGLRINCISPAGIPTPLTLRMFREAFAGHSIREEQLLAIVNATGELKGEKCEEIDVAKAALYLASDDAKFVTGHNLVVDGGFTCFKSLNLPSA

SEQ ID NO: 97339 - DNA, 999 bp, Arabidopsis thaliana
  misc_feature (1)..(999): Ceres Seq. ID no. 12737041
  misc_feature: MA Experiment ID: 20000180 Result: Down-regulated in Transcription
  misc_feature: MA Experiment 20000180 PARAMETER Experiment Name: At_Germinating_Seeds_P Parameter: Age (hr) Value: 24 vs. 0
  misc_feature: MA Experiment 20000180 PARAMETER Experiment Name: At_Germinating_Seeds_P Parameter: Tissue Value: Germinating Seeds
  misc_feature: MA Experiment ID: 20001458 Result: Up-regulated in Transcription
  misc_feature: MA Experiment 20001458 PARAMETER Experiment Name: At_50mM_NH4NO3_L-to-H_P Parameter: Age (day) Value: Undefined
  misc_feature: MA Experiment 20001458 PARAMETER Experiment Name: At_50mM_NH4NO3_L-to-H_P Parameter: Organism Value: Undefined
  misc_feature: MA Experiment 20001458 PARAMETER Experiment Name: At_50mM_NH4NO3_L-to-H_P Parameter: Plant Line Value: Undefined
  misc_feature: MA Experiment 20001458 PARAMETER Experiment Name: At_50mM_NH4NO3_L-to-H_P Parameter: Timepoint (hr) Value: 2
  misc_feature: MA Experiment 20001458 PARAMETER Experiment Name: At_50mM_NH4NO3_L-to-H_P Parameter: Tissue Value: Siliques
  misc_feature: MA Experiment 20001458 PARAMETER Experiment Name: At_50mM_NH4NO3_L-to-H_P Parameter: Treatment Value: 50mM NH4NO3 vs. 100mM Manitol
  misc_feature: MA Experiment ID: 20001557 Result: Up-regulated in Transcription
  misc_feature: MA Experiment 20001557 PARAMETER Experiment Name: At_Drought_Soil_Dry_P Parameter: Age (day) Value: 27
  misc_feature: MA Experiment 20001557 PARAMETER Experiment Name: At_Drought_Soil_Dry_P Parameter: Organism Value: A. thaliana
  misc_feature: MA Experiment 20001557 PARAMETER Experiment Name: At_Drought_Soil_Dry_P Parameter: Plant Line Value: WS
  misc_feature: MA Experiment 20001557 PARAMETER Experiment Name: At_Drought_Soil_Dry_P Parameter: Post Timepoint (hr) Value: 3
  misc_feature: MA Experiment 20001557 PARAMETER Experiment Name: At_Drought_Soil_Dry_P Parameter: Post-Treatment Value: Re-Water vs. No Drought
  misc_feature: MA Experiment 20001557 PARAMETER Experiment Name: At_Drought_Soil_Dry_P Parameter: Timepoint (day) Value: 13
  misc_feature: MA Experiment 20001557 PARAMETER Experiment Name: At_Drought_Soil_Dry_P Parameter: Treatment Value: Drought vs. No Drought
  misc_feature: MA Experiment ID: 20001558 Result: Up-regulated in Transcription
  misc_feature: MA Experiment 20001558 PARAMETER Experiment Name: At_Drought_Soil_Dry_P Parameter: Age (day) Value: 27
  misc_feature: MA Experiment 20001558 PARAMETER Experiment Name: At_Drought_Soil_Dry_P Parameter: Organism Value: A. thaliana
  misc_feature: MA Experiment 20001558 PARAMETER Experiment Name: At_Drought_Soil_Dry_P Parameter: Plant Line Value: WS
  misc_feature: MA Experiment 20001558 PARAMETER Experiment Name: At_Drought_Soil_Dry_P Parameter: Post Timepoint (hr) Value: 6
  misc_feature: MA Experiment 20001558 PARAMETER Experiment Name: At_Drought_Soil_Dry_P Parameter: Post-Treatment Value: Re-Water vs. No Drought
  misc_feature: MA Experiment 20001558 PARAMETER Experiment Name: At_Drought_Soil_Dry_P Parameter: Timepoint (day) Value: 13
  misc_feature: MA Experiment 20001558 PARAMETER Experiment Name: At_Drought_Soil_Dry_P Parameter: Treatment Value: Drought vs. No Drought
  misc_feature: MA Experiment ID: 20001757 Result: Up-regulated in Transcription
  misc_feature: MA Experiment 20001757 PARAMETER Experiment Name: At_50mM_NH4NO3_L-to-H_P Parameter: Timepoint (hr) Value: 6
  misc_feature: MA Experiment 20001757 PARAMETER Experiment Name: At_50mM_NH4NO3_L-to-H_P Parameter: Tissue Value: Leaf
  misc_feature: MA Experiment 20001757 PARAMETER Experiment Name: At_50mM_NH4NO3_L-to-H_P Parameter: Treatment Value: 50mM NH4NO3 vs 100mM Mannitol
agcagtcttatggcggccatagtactgatcagatctatcgtcagaaactttaaacggccagccaccgcagcctcagccgcttactcgacaggtggtggtggcggcggttgtacttgtacgagtaaaaagctagaaggcaaagtagctctcataactggtggtgctagcgggctcggtaaggccacggccagcgagtttctccgccatggtgcccgagtcgtgatcgccgacttagacgcggaaaccgggacaaaaaccgctaaagaactaggctcggaggcagagtttgtgcggtgtgatgtcacggtggaggctgatatcgctggagccgtggaaatgacggtggagcggtatgggaagctagacgtgatgtacaataacgctgggattgttggacctatgactccagcgagcatatcgcagcttgatatgacagaattcgagagagtaatgaggattaatgtttttggtgttgtctccggcatcaaacacgccgctaagtttatgattccggctaggtctggatgcattttgtgcacatcaagcgttgcaggcgtgactggagggttggctccacattcatacacaatctcaaagttcacaactcccggaatagtcaagtcggcagcaagcgagctctgcgaacacggcgtgcgtataaactgtatctcaccgggtacggtggctacaccgctcactctcagttaccttcagaaagtgtttccgaaggtatcggaggagaagctacgcgaaacagtgaaaggaatgggtgagttaaaaggagctgagtgtgaagaagctgacgtggctaaggctgctttgtatttggcttccaacgacggtaaatacgttactggccataacttggtcgtggatggtggcatgactgctttcaaaatagctggttttccttttccttcggattcatgatcaatcattttgtatcgtctataaataactttgtactgtattcaagattttatatcaaagttggatctt

SEQ ID NO: 97340 - protein, 309 aa, Arabidopsis thaliana
  peptide (1)..(309): Ceres Seq. ID no. 12737042
  misc_feature (4)..(309): Homolog of NCBI NO: 18405088 NR Description: putative short chain alcohol dehydrogenase; id: At3g26770.1, supported by cDNA: gi_15529183 [Arabidopsis
  misc_feature (4)..(309): Homolog of NCBI NO: 15529184 NR Description: AT3g26770/MDJ14_21 [Arabidopsis thaliana]
  misc_feature (40)..(304): Homolog of NCBI NO: 30688484 NR Description: short-chain dehydrogenase/reductase family protein
  misc_feature (39)..(306): Homolog of NCBI NO: 18412155 NR Description: putative alcohol dehydrogenase; protein id:
  misc_feature (42)..(306): Homolog of NCBI NO: 25283123 NR Description: probable alcohol dehydrogenase [imported] - thaliana >gi|4262142|gb|AAD14442.1| putative alcohol [Arabidopsis thaliana] >gi|7270184|emb|CAB77799.1| putative
  misc_feature (9)..(299): Homolog of NCBI NO: 33146507 NR Description: putative short-chain alcohol dehydrogenase [Oryza
  misc_feature (41)..(306): Homolog of NCBI NO: 34899188 NR Description: similar to alcohol dehydrogenase [Oryza sativa
  misc_feature (42)..(303): Homolog of NCBI NO: 34899216 NR Description: alcohol dehydrogenase-like protein [Oryza sativa
  misc_feature (40)..(299): Homolog of NCBI NO: 34899222 NR Description: alcohol dehydrogenase-like protein~contains EST
  misc_feature (1)..(296): Homolog of NCBI NO: 1877480 NR Description: short-chain alcohol dehydrogenase [Tripsacum
SSLMAAIVLIRSIVRNFKRPATAASAAYSTGGGGGGCTCTSKKLEGKVALITGGASGLGKATASEFLRHGARVVIADLDAETGTKTAKELGSEAEFVRCDVTVEADIAGAVEMTVERYGKLDVMYNNAGIVGPMTPASISQLDMTEFERVMRINVFGVVSGIKHAAKFMIPARSGCILCTSSVAGVTGGLAPHSYTISKFTTPGIVKSAASELCEHGVRINCISPGTVATPLTLSYLQKVFPKVSEEKLRETVKGMGELKGAECEEADVAKAALYLASNDGKYVTGHNLVVDGGMTAFKIAGFPFPSDS

SEQ ID NO: 97341 - protein, 306 aa, Arabidopsis thaliana
  peptide (1)..(306): Ceres Seq. ID no. 12737043
  misc_feature (1)..(306): Homolog of NCBI NO: 18405088 NR Description: putative short chain alcohol dehydrogenase; id: At3g26770.1, supported by cDNA: gi_15529183 [Arabidopsis
  misc_feature (1)..(306): Homolog of NCBI NO: 15529184 NR Description: AT3g26770/MDJ14_21 [Arabidopsis thaliana]
  misc_feature (37)..(301): Homolog of NCBI NO: 30688484 NR Description: short-chain dehydrogenase/reductase family protein
  misc_feature (36)..(303): Homolog of NCBI NO: 18412155 NR Description: putative alcohol dehydrogenase; protein id:
  misc_feature (39)..(303): Homolog of NCBI NO: 25283123 NR Description: probable alcohol dehydrogenase [imported] - thaliana >gi|4262142|gb|AAD14442.1| putative alcohol [Arabidopsis thaliana] >gi|7270184|emb|CAB77799.1| putative
  misc_feature (6)..(296): Homolog of NCBI NO: 33146507 NR Description: putative short-chain alcohol dehydrogenase [Oryza
  misc_feature (38)..(303): Homolog of NCBI NO: 34899188 NR Description: similar to alcohol dehydrogenase [Oryza sativa
  misc_feature (39)..(300): Homolog of NCBI NO: 34899216 NR Description: alcohol dehydrogenase-like protein [Oryza sativa
  misc_feature (37)..(296): Homolog of NCBI NO: 34899222 NR Description: alcohol dehydrogenase-like protein~contains EST
  misc_feature (1)..(293): Homolog of NCBI NO: 1877480 NR Description: short-chain alcohol dehydrogenase [Tripsacum
MAAIVLIRSIVRNFKRPATAASAAYSTGGGGGGCTCTSKKLEGKVALITGGASGLGKATASEFLRHGARVVIADLDAETGTKTAKELGSEAEFVRCDVTVEADIAGAVEMTVERYGKLDVMYNNAGIVGPMTPASISQLDMTEFERVMRINVFGVVSGIKHAAKFMIPARSGCILCTSSVAGVTGGLAPHSYTISKFTTPGIVKSAASELCEHGVRINCISPGTVATPLTLSYLQKVFPKVSEEKLRETVKGMGELKGAECEEADVAKAALYLASNDGKYVTGHNLVVDGGMTAFKIAGFPFPSDS

SEQ ID NO: 97342 - protein, 197 aa, Arabidopsis thaliana
  peptide (1)..(197): Ceres Seq. ID no. 12737044
  misc_feature (1)..(197): Homolog of NCBI NO: 18405088 NR Description: putative short chain alcohol dehydrogenase; id: At3g26770.1, supported by cDNA: gi_15529183 [Arabidopsis
  misc_feature (1)..(197): Homolog of NCBI NO: 15529184 NR Description: AT3g26770/MDJ14_21 [Arabidopsis thaliana]
  misc_feature (1)..(192): Homolog of NCBI NO: 30688484 NR Description: short-chain dehydrogenase/reductase family protein
  misc_feature (1)..(194): Homolog of NCBI NO: 18412155 NR Description: putative alcohol dehydrogenase; protein id:
  misc_feature (1)..(194): Homolog of NCBI NO: 25283123 NR Description: probable alcohol dehydrogenase [imported] - thaliana >gi|4262142|gb|AAD14442.1| putative alcohol [Arabidopsis thaliana] >gi|7270184|emb|CAB77799.1| putative
  misc_feature (1)..(187): Homolog of NCBI NO: 33146507 NR Description: putative short-chain alcohol dehydrogenase [Oryza
  misc_feature (1)..(194): Homolog of NCBI NO: 34899188 NR Description: similar to alcohol dehydrogenase [Oryza sativa
  misc_feature (1)..(191): Homolog of NCBI NO: 34899216 NR Description: alcohol dehydrogenase-like protein [Oryza sativa
  misc_feature (1)..(187): Homolog of NCBI NO: 34899222 NR Description: alcohol dehydrogenase-like protein~contains EST
  misc_feature (1)..(184): Homolog of NCBI NO: 1877480 NR Description: short-chain alcohol dehydrogenase [Tripsacum
MTVERYGKLDVMYNNAGIVGPMTPASISQLDMTEFERVMRINVFGVVSGIKHAAKFMIPARSGCILCTSSVAGVTGGLAPHSYTISKFTTPGIVKSAASELCEHGVRINCISPGTVATPLTLSYLQKVFPKVSEEKLRETVKGMGELKGAECEEADVAKAALYLASNDGKYVTGHNLVVDGGMTAFKIAGFPFPSDS

SEQ ID NO: 97343 - DNA, 1238 bp, Arabidopsis thaliana
  misc_feature (1)..(1238): Ceres Seq. ID no. 12737045
  misc_feature: MA Experiment ID: 20000184 Result: Down-regulated in Transcription
  misc_feature: MA Experiment 20000184 PARAMETER Experiment Name: At_Shoots__P Parameter: Age (day) Value: 7
  misc_feature: MA Experiment 20000184 PARAMETER Experiment Name: At_Shoots__P Parameter: Tissue Value: Shoots vs. Whole Plant
  misc_feature: MA Experiment ID: 20000443 Result: Down-regulated in Transcription
  misc_feature: MA Experiment 20000443 PARAMETER Experiment Name: At_1uM_BR-BRZ__P Parameter: Tissue Value: Shoot Apices
  misc_feature: MA Experiment 20000443 PARAMETER Experiment Name: At_1uM_BR-BRZ__P Parameter: Treatment Value: 1uM BRZ vs. No Treatment
  misc_feature: MA Experiment ID: 20001459 Result: Down-regulated in Transcription
  misc_feature: MA Experiment 20001459 PARAMETER Experiment Name: At_50mM_NH4NO3_L-to-H_P Parameter: Age (day) Value: Undefined
  misc_feature: MA Experiment 20001459 PARAMETER Experiment Name: At_50mM_NH4NO3_L-to-H_P Parameter: Organism Value: Undefined
  misc_feature: MA Experiment 20001459 PARAMETER Experiment Name: At_50mM_NH4NO3_L-to-H_P Parameter: Plant Line Value: Undefined
  misc_feature: MA Experiment 20001459 PARAMETER Experiment Name: At_50mM_NH4NO3_L-to-H_P Parameter: Timepoint (hr) Value: 4
  misc_feature: MA Experiment 20001459 PARAMETER Experiment Name: At_50mM_NH4NO3_L-to-H_P Parameter: Tissue Value: Siliques
  misc_feature: MA Experiment 20001459 PARAMETER Experiment Name: At_50mM_NH4NO3_L-to-H_P Parameter: Treatment Value: 50mM NH4NO3 vs. 100mM Manitol
  misc_feature: MA Experiment ID: 20001906 Result: Up-regulated in Transcription
  misc_feature: MA Experiment 20001906 PARAMETER Experiment Name: At_Drought_Reproduction_P Parameter: Age (day) Value: 35
  misc_feature: MA Experiment 20001906 PARAMETER Experiment Name: At_Drought_Reproduction_P Parameter: Organism Value: A. thaliana
  misc_feature: MA Experiment 20001906 PARAMETER Experiment Name: At_Drought_Reproduction_P Parameter: Plant Line Value: WS
  misc_feature: MA Experiment 20001906 PARAMETER Experiment Name: At_Drought_Reproduction_P Parameter: Timepoint (day) Value: 5
  misc_feature: MA Experiment 20001906 PARAMETER Experiment Name: At_Drought_Reproduction_P Parameter: Tissue Value: Siliques
  misc_feature: MA Experiment 20001906 PARAMETER Experiment Name: At_Drought_Reproduction_P Parameter: Treatment Value: Drought vs. No Drought
  misc_feature: MA Experiment ID: 20001908 Result: Up-regulated in Transcription
  misc_feature: MA Experiment 20001908 PARAMETER Experiment Name: At_Drought_Reproduction_P Parameter: Age (day) Value: 40
  misc_feature: MA Experiment 20001908 PARAMETER Experiment Name: At_Drought_Reproduction_P Parameter: Organism Value: A. thaliana
  misc_feature: MA Experiment 20001908 PARAMETER Experiment Name: At_Drought_Reproduction_P Parameter: Plant Line Value: WS
  misc_feature: MA Experiment 20001908 PARAMETER Experiment Name: At_Drought_Reproduction_P Parameter: Timepoint (day) Value: 10
  misc_feature: MA Experiment 20001908 PARAMETER Experiment Name: At_Drought_Reproduction_P Parameter: Tissue Value: Siliques
  misc_feature: MA Experiment 20001908 PARAMETER Experiment Name: At_Drought_Reproduction_P Parameter: Treatment Value: Drought vs. No Drought
cacaaaccacagtctctctttctctctctatctatcttctctttctctctctatctctatcactgaaacccaaagagatccaccatttgttcttttttccttcacacagagaactgttttcttccacacttcctttttactaggcagtgttaaccaattgagagagaaaaatgatggttgatgaaaatgtggaaaccaaggcctctactttagtggcaagtgttgatcatgggtttggatccgggtcgggtcatgatcatcatgggttatcggcgtctgtgcctcttcttggtgttaactggaagaagagaaggatgcctagacagagacgatcttcttcttcctttaaccttctctctttccctcctcctatgcctcctatttcccacgtgccaactcctctccccgcacgtaaaattgacccaagaaagctaagattcctcttccaaaaggaactcaagaacagtgacgtcagctctctccgacgtatgatactcccgaagaaagccgcggaggctcacttgccggcacttgaatgcaaggaagggattcctataagaatggaagatttggacggttttcacgtttggaccttcaagtataggtactggccaaacaacaatagcagaatgtacgtgctagaaaacacaggcgattttgtgaatgctcatggtctgcagctaggtgacttcatcatggtttaccaagatctctactcaaacaattacgttatacaagcaagaaaagcatcggaagaagaagaagtagacgtaatcaatcttgaagaagacgacgtttacacaaacttaacaaggatcgaaaacactgtggttaacgatcttctcctccaagattttaatcatcacaacaacaacaacaacaacaacagcaacagcaacagcaacaaatgttcttactattatccagtcatagatgatgtcaccacaaacacagagtcttttgtctacgacacgacggctcttacctccaacgatactcctctcgattttttgggtggacatacgacgactactaataattattactccaagttcggaacattcgatggtttgggctccgttgagaatatctctctcgatgacttctactagataatcaatcgatgggctcatggtattcttgatggtgatcagctatttaatatccttataatatatataagaattaaatgcaatttgcatatatattatcaagtgttgaatataacattacagttt

SEQ ID NO: 97344 - protein, 313 aa, Arabidopsis thaliana
  peptide (1)..(313): Ceres Seq. ID no. 12737046
  misc_feature (91)..(196): Pfam Name: B3 DNA binding domain Pfam Description: B3 DNA binding domain
  misc_feature (1)..(313): Homolog of NCBI NO: 18405094 NR Description: transcriptional regulator (FUSCA3); protein id:
  misc_feature (2)..(313): Homolog of NCBI NO: 3582520 NR Description: FUSCA3 [Arabidopsis thaliana]
  misc_feature (2)..(313): Homolog of NCBI NO: 9279669 NR Description: FUSCA3 [Arabidopsis thaliana]
  misc_feature (2)..(313): Homolog of NCBI NO: 3582518 NR Description: FUSCA3 [Arabidopsis thaliana]
  misc_feature (86)..(195): Homolog of NCBI NO: 33309513 NR Description: viviparous protein; abscissic acid insensitive
  misc_feature (86)..(198): Homolog of NCBI NO: 7451507 NR Description: transcription factor Vp1 - common ice plant
  misc_feature (85)..(196): Homolog of NCBI NO: 22335711 NR Description: ABA insensitive 3 [Pisum sativum]
  misc_feature (85)..(195): Homolog of NCBI NO: 2661460 NR Description: ABI3 [Populus balsamifera subsp. trichocarpa]
  misc_feature (85)..(195): Homolog of NCBI NO: 2661462 NR Description: ABI3 [Populus balsamifera subsp. trichocarpa]
  misc_feature (85)..(196): Homolog of NCBI NO: 7451508 NR Description: transcription activator PvAlf, acidic - kidney
MMVDENVETKASTLVASVDHGFGSGSGHDHHGLSASVPLLGVNWKKRRMPRQRRSSSSFNLLSFPPPMPPISHVPTPLPARKIDPRKLRFLFQKELKNSDVSSLRRMILPKKAAEAHLPALECKEGIPIRMEDLDGFHVWTFKYRYWPNNNSRMYVLENTGDFVNAHGLQLGDFIMVYQDLYSNNYVIQARKASEEEEVDVINLEEDDVYTNLTRIENTVVNDLLLQDFNHHNNNNNNNSNSNSNKCSYYYPVIDDVTTNTESFVYDTTALTSNDTPLDFLGGHTTTTNNYYSKFGTFDGLGSVENISLDDFY

SEQ ID NO: 97345 - protein, 312 aa, Arabidopsis thaliana
  peptide (1)..(312): Ceres Seq. ID no. 12737047
  misc_feature (90)..(195): Pfam Name: B3 DNA binding domain Pfam Description: B3 DNA binding domain
  misc_feature (1)..(312): Homolog of NCBI NO: 18405094 NR Description: transcriptional regulator (FUSCA3); protein id:
  misc_feature (1)..(312): Homolog of NCBI NO: 3582520 NR Description: FUSCA3 [Arabidopsis thaliana]
  misc_feature (1)..(312): Homolog of NCBI NO: 9279669 NR Description: FUSCA3 [Arabidopsis thaliana]
  misc_feature (1)..(312): Homolog of NCBI NO: 3582518 NR Description: FUSCA3 [Arabidopsis thaliana]
  misc_feature (85)..(194): Homolog of NCBI NO: 33309513 NR Description: viviparous protein; abscissic acid insensitive
  misc_feature (85)..(197): Homolog of NCBI NO: 7451507 NR Description: transcription factor Vp1 - common ice plant
  misc_feature (84)..(195): Homolog of NCBI NO: 22335711 NR Description: ABA insensitive 3 [Pisum sativum]
  misc_feature (84)..(194): Homolog of NCBI NO: 2661460 NR Description: ABI3 [Populus balsamifera subsp. trichocarpa]
  misc_feature (84)..(194): Homolog of NCBI NO: 2661462 NR Description: ABI3 [Populus balsamifera subsp. trichocarpa]
  misc_feature (84)..(195): Homolog of NCBI NO: 7451508 NR Description: transcription activator PvAlf, acidic - kidney
MVDENVETKASTLVASVDHGFGSGSGHDHHGLSASVPLLGVNWKKRRMPRQRRSSSSFNLLSFPPPMPPISHVPTPLPARKIDPRKLRFLFQKELKNSDVSSLRRMILPKKAAEAHLPALECKEGIPIRMEDLDGFHVWTFKYRYWPNNNSRMYVLENTGDFVNAHGLQLGDFIMVYQDLYSNNYVIQARKASEEEEVDVINLEEDDVYTNLTRIENTVVNDLLLQDFNHHNNNNNNNSNSNSNKCSYYYPVIDDVTTNTESFVYDTTALTSNDTPLDFLGGHTTTTNNYYSKFGTFDGLGSVENISLDDFY

SEQ ID NO: 97346 - protein, 265 aa, Arabidopsis thaliana
  peptide (1)..(265): Ceres Seq. ID no. 12737048
  misc_feature (43)..(148): Pfam Name: B3 DNA binding domain Pfam Description: B3 DNA binding domain
  misc_feature (1)..(265): Homolog of NCBI NO: 18405094 NR Description: transcriptional regulator (FUSCA3); protein id:
  misc_feature (1)..(265): Homolog of NCBI NO: 3582520 NR Description: FUSCA3 [Arabidopsis thaliana]
  misc_feature (1)..(265): Homolog of NCBI NO: 9279669 NR Description: FUSCA3 [Arabidopsis thaliana]
  misc_feature (1)..(265): Homolog of NCBI NO: 3582518 NR Description: FUSCA3 [Arabidopsis thaliana]
  misc_feature (38)..(147): Homolog of NCBI NO: 33309513 NR Description: viviparous protein; abscissic acid insensitive
  misc_feature (38)..(150): Homolog of NCBI NO: 7451507 NR Description: transcription factor Vp1 - common ice plant
  misc_feature (37)..(148): Homolog of NCBI NO: 22335711 NR Description: ABA insensitive 3 [Pisum sativum]
  misc_feature (37)..(147): Homolog of NCBI NO: 2661460 NR Description: ABI3 [Populus balsamifera subsp. trichocarpa]
  misc_feature (37)..(147): Homolog of NCBI NO: 2661462 NR Description: ABI3 [Populus balsamifera subsp. trichocarpa]
  misc_feature (37)..(148): Homolog of NCBI NO: 7451508 NR Description: transcription activator PvAlf, acidic - kidney
MPRQRRSSSSFNLLSFPPPMPPISHVPTPLPARKIDPRKLRFLFQKELKNSDVSSLRRMILPKKAAEAHLPALECKEGIPIRMEDLDGFHVWTFKYRYWPNNNSRMYVLENTGDFVNAHGLQLGDFIMVYQDLYSNNYVIQARKASEEEEVDVINLEEDDVYTNLTRIENTVVNDLLLQDFNHHNNNNNNNSNSNSNKCSYYYPVIDDVTTNTESFVYDTTALTSNDTPLDFLGGHTTTTNNYYSKFGTFDGLGSVENISLDDFY

SEQ ID NO: 97347 - DNA, 1680 bp, Arabidopsis thaliana
  misc_feature (1)..(1680): Ceres Seq. ID no. 12737059
  misc_feature: MA Experiment ID: 20000307 Result: Up-regulated in Transcription
  misc_feature: MA Experiment 20000307 PARAMETER Experiment Name: At_Germinating_Seeds_Sub_P Parameter: Age (hr) Value: 24 vs. 0
  misc_feature: MA Experiment 20000307 PARAMETER Experiment Name: At_Germinating_Seeds_Sub_P Parameter: Organism Value: A. thaliana
  misc_feature: MA Experiment 20000307 PARAMETER Experiment Name: At_Germinating_Seeds_Sub_P Parameter: Plant Line Value: WS
  misc_feature: MA Experiment 20000307 PARAMETER Experiment Name: At_Germinating_Seeds_Sub_P Parameter: Tissue Value: Germinating Seeds
  misc_feature: MA Experiment ID: 20000314 Result: Up-regulated in Transcription
  misc_feature: MA Experiment 20000314 PARAMETER Experiment Name: At_14day_Shoots-Roots_Sub_P Parameter: Age (day) Value: 14
  misc_feature: MA Experiment 20000314 PARAMETER Experiment Name: At_14day_Shoots-Roots_Sub_P Parameter: Organism Value: A. thaliana
  misc_feature: MA Experiment 20000314 PARAMETER Experiment Name: At_14day_Shoots-Roots_Sub_P Parameter: Plant Line Value: WS
  misc_feature: MA Experiment 20000314 PARAMETER Experiment Name: At_14day_Shoots-Roots_Sub_P Parameter: Tissue Value: Roots vs. Whole Plant
atgggaatagagaactgcatagtttatgttgtggttctaagtgctattgcggctacggtgacatcatacccttactcatctcctcaaaccccaagttacaattctcccagctatgaacacaaaggccctaagtacgcgccacatccaaaaccatatgttaaaagttccccaccaccacaatactacactccatcgccaaaggtaaactacaaatctccaccaccaccatatgtatacagctccccacctccaccgtactactctccatctccaaaggtagactacaagtccccaccaccaccatacgtctacagctccccaccaccaccgtattactctccatctccaaaggttgactacaagtctccaccaccaccatatgtatacagctccccacctccaccgtactactctccatctccaaaggtagactacaagtccccaccaccaccgtacgtctacaactccccgcccccaccgtactattctccatctccaaaggtagactacaagtctccaccaccaccgtacgtctacagttccccacccccaccgtactattctccttctccaaaggtatactacaagtctccaccaccaccatacgtctacagctccccaccaccaccgtactattctccttctccaaaggtatactacaagtctccaccaccaccatacgtctacagctccccaccaccaccgtactattctccttctccaaaggtatactacaagtctccaccaccaccatacgtctacagctccccaccaccaccatactactctccttctcctaaggtttactacaagtccccacctccaccgtacgtctacagctccccaccaccaccatactattctccttctcctaaggtttactacaagtccccacctccaccatacgtctacagctctccacctccaccatactactctccttctcctaaggtttactacaagtccccacctccaccatacgtctacagctccccacctccaccatactactctccttctcctaaggtttactacaagtccccacctccaccatacgtctacagctccccacctccaccatactactctccttctcctaaggtttactacaagtccccacctccaccatacgtctacagctccccacctccaccatactactctccttctccaaaggtttactacaagtctccaccaccaccatacgtctacaactctccaccaccaccatactactctccttctcctaaggtttactacaagtccccacctccaccatacgtctacagctccccacctccaccatactactctccttctcctaaggtttactacaagtctccacctccaccatacgtctacagctccccaccaccaccgtactactcgccttctccaaaggtttactacaagtctccaccaccatcatacgtctacagctccccaccaccaccgtactactcgccttctccaaaggtttactacaagtctccaccaccatcatacgtctacagctctccaccaccaccatactactctccttctcctaaggtttactacaagtccccacctccaccatacgtctacagctccccacctcctccatactactctccttctcctaaagtcacttacaagtctccaccaccaccatatgtctacaagacgccttactattga

SEQ ID NO: 97348 - protein, 559 aa, Arabidopsis thaliana
  peptide (1)..(559): Ceres Seq. ID no. 12737060
  misc_feature (98)..(401): Pfam Name: Formin Homology 2 Domain Pfam Description: Formin Homology 2 Domain
  misc_feature (1)..(559): Homolog of NCBI NO: 15240117 NR Description: putative protein; protein id: At5g06640.1 thaliana] >gi|10178120|dbj|BAB11413.1|
  misc_feature (1)..(559): Homolog of NCBI NO: 15239790 NR Description: putative protein; protein id: At5g49080.1 thaliana] >gi|10176941|dbj|BAB10090.1|
  misc_feature (1)..(559): Homolog of NCBI NO: 15236488 NR Description: extensin-like protein; protein id: At4g08410.1
  misc_feature (23)..(559): Homolog of NCBI NO: 15232553 NR Description: extensin precursor -like protein; protein id: [Arabidopsis thaliana] >gi|21263625|sp|Q9M1G9|EXT2_ARATH Extensin
  misc_feature (23)..(559): Homolog of NCBI NO: 15232553 NR Description: extensin precursor -like protein; protein id: [Arabidopsis thaliana] >gi|21263625|sp|Q9M1G9|EXT2_ARATH Extensin
  misc_feature (23)..(559): Homolog of NCBI NO: 15232553 NR Description: extensin precursor -like protein; protein id: [Arabidopsis thaliana] >gi|21263625|sp|Q9M1G9|EXT2_ARATH Extensin
  misc_feature (23)..(559): Homolog of NCBI NO: 11357288 NR Description: extensin-like protein T14E10.160 [imported] -
  misc_feature (24)..(559): Homolog of NCBI NO: 15232553 NR Description: extensin precursor -like protein; protein id: [Arabidopsis thaliana] >gi|21263625|sp|Q9M1G9|EXT2_ARATH Extensin
  misc_feature (23)..(559): Homolog of NCBI NO: 15232553 NR Description: extensin precursor -like protein; protein id: [Arabidopsis thaliana] >gi|21263625|sp|Q9M1G9|EXT2_ARATH Extensin
  misc_feature (10)..(559): Homolog of NCBI NO: 15232553 NR Description: extensin precursor -like protein; protein id: [Arabidopsis thaliana] >gi|21263625|sp|Q9M1G9|EXT2_ARATH Extensin
MGIENCIVYVVVLSAIAATVTSYPYSSPQTPSYNSPSYEHKGPKYAPHPKPYVKSSPPPQYYTPSPKVNYKSPPPPYVYSSPPPPYYSPSPKVDYKSPPPPYVYSSPPPPYYSPSPKVDYKSPPPPYVYSSPPPPYYSPSPKVDYKSPPPPYVYNSPPPPYYSPSPKVDYKSPPPPYVYSSPPPPYYSPSPKVYYKSPPPPYVYSSPPPPYYSPSPKVYYKSPPPPYVYSSPPPPYYSPSPKVYYKSPPPPYVYSSPPPPYYSPSPKVYYKSPPPPYVYSSPPPPYYSPSPKVYYKSPPPPYVYSSPPPPYYSPSPKVYYKSPPPPYVYSSPPPPYYSPSPKVYYKSPPPPYVYSSPPPPYYSPSPKVYYKSPPPPYVYSSPPPPYYSPSPKVYYKSPPPPYVYNSPPPPYYSPSPKVYYKSPPPPYVYSSPPPPYYSPSPKVYYKSPPPPYVYSSPPPPYYSPSPKVYYKSPPPSYVYSSPPPPYYSPSPKVYYKSPPPSYVYSSPPPPYYSPSPKVYYKSPPPPYVYSSPPPPYYSPSPKVTYKSPPPPYVYKTPYY

SEQ ID NO: 97349 - DNA, 1515 bp, Arabidopsis thaliana
  misc_feature (1)..(1515): Ceres Seq. ID no. 12737065
  misc_feature: MA Experiment ID: 108463 Result: Up-regulated in Transcription
  misc_feature: MA Experiment 108463 PARAMETER Experiment Name: At_Germinating_Seeds_cDNA_P Parameter: Age (day) Value: 3 vs. 0
  misc_feature: MA Experiment 108463 PARAMETER Experiment Name: At_Germinating_Seeds_cDNA_P Parameter: Tissue Value: Germinating Seeds
  misc_feature: MA Experiment ID: 108464 Result: Up-regulated in Transcription
  misc_feature: MA Experiment 108464 PARAMETER Experiment Name: At_Germinating_Seeds_cDNA_P Parameter: Age (day) Value: 4 vs. 0
  misc_feature: MA Experiment 108464 PARAMETER Experiment Name: At_Germinating_Seeds_cDNA_P Parameter: Tissue Value: Germinating Seeds
  misc_feature: MA Experiment ID: 108595 Result: Down-regulated in Transcription
  misc_feature: MA Experiment 108595 PARAMETER Experiment Name: At_Ler-pi_Ovule_cDNA_P Parameter: Plant Line Value: null
  misc_feature: MA Experiment ID: 20000112 Result: Up-regulated in Transcription
  misc_feature: MA Experiment 20000112 PARAMETER Experiment Name: At_42deg_Heat_cDNA_P Parameter: Temperature (deg C) Value: 42 vs. 22
  misc_feature: MA Experiment 20000112 PARAMETER Experiment Name: At_42deg_Heat_cDNA_P Parameter: Timepoint (hr) Value: 2
  misc_feature: MA Experiment 20000112 PARAMETER Experiment Name: At_42deg_Heat_cDNA_P Parameter: Tissue Value: Aerial
  misc_feature: MA Experiment ID: 20000184 Result: Down-regulated in Transcription
  misc_feature: MA Experiment 20000184 PARAMETER Experiment Name: At_Shoots__P Parameter: Age (day) Value: 7
  misc_feature: MA Experiment 20000184 PARAMETER Experiment Name: At_Shoots__P Parameter: Tissue Value: Shoots vs. Whole Plant
  misc_feature: MA Experiment ID: 20000235 Result: Down-regulated in Transcription
  misc_feature: MA Experiment 20000235 PARAMETER Experiment Name: At_Siliques_P Parameter: Age (day) Value: 21
  misc_feature: MA Experiment 20000235 PARAMETER Experiment Name: At_Siliques_P Parameter: Organism Value: A. thaliana
  misc_feature: MA Experiment 20000235 PARAMETER Experiment Name: At_Siliques_P Parameter: Plant Line Value: WS
  misc_feature: MA Experiment 20000235 PARAMETER Experiment Name: At_Siliques_P Parameter: Tissue Value: 5-10mm Siliques vs. Whole Plant
  misc_feature: MA Experiment ID: 20000286 Result: Down-regulated in Transcription
  misc_feature: MA Experiment 20000286 PARAMETER Experiment Name: At_Open_Flower_P Parameter: Age (day) Value: 21
  misc_feature: MA Experiment 20000286 PARAMETER Experiment Name: At_Open_Flower_P Parameter: Plant Line Value: WS
  misc_feature: MA Experiment 20000286 PARAMETER Experiment Name: At_Open_Flower_P Parameter: Tissue Value: Half Open vs. Whole Plant
ttttgtccttaggatttgattgtacatacatctgatctcaagtgatttcaagtggttggttctgttccttttctcgtccccgatcaagtttcttctcctaaactccagaatttggtcttgaagatctctaaaggctcttcctttttgttcatttctctacccagatatcgatgggtacatacctaagttctccgaaaactgaaaagttatcagaagatggtgagaatgataagctcagatttggtttatcgtctatgcaaggttggcgcgctaccatggaagacgcgcatgctgcaattcttgatcttgatgataagacatcgttcttcggtgtgtatgatggccatggaggtaaagtcgttgcaaagttctgtgccaagtatctacaccagcaggttatcagtaatgaagcgtataaaactggagacgtcgaaacatctcttcgaagagcattctttagaatggatgacatgatgcaaggacaaagaggatggcgagagttagctgtacttggcgacaagatgaacaaatttagcggcatgattgaaggatttatatggtcaccaagaagcggtgacaccaataaccaacccgatagttggcctcttgaagatggtcctcattctgatttcacgggacctacctcggggtgcacagcgtgtgtagctcttattaaagataagaagctctttgttgcaaatgccggtgactcacgttgtgtgatatcaagaaagagtcaggcttacaatctttctaaagatcacaagcctgatcttgaagttgaaaaagaaaggatattgaaagctggtggctttattcacgctgggagaatcaatggaagcttgaatctgacaagagccattggtgatatggagttcaagcagaataagtttttaccatctgaaaagcaaatggttactgctgatccagatataaacactattgacctatgtgatgatgatgactttcttgttgttgcttgcgatggaatatgggattgtatgtcaagccaggaactagttgattttatccatgaacagttaaaatctgaaacaaaactttcaacagtatgtgaaaaggttgttgatagatgtttggctccagatacagcgactggtgaaggttgtgataatatgaccatcatcttggttcagttcaagaagcctaacccatctgagactgaaccagaagattccaaaccagaaccaagcgaagatgagccgagctcatcaagctagatatctttaaagagccaagaggaagaagatttgtgaaagtgtctcttttatcattgactttttgttcaacattgtaaatccttttgaatgtggcttagattcaagaagctggctttttcccagtttagcttcaagaagtctgagatgtcacagagtttggtttaatcttaaaaggacctttgtatagatatttcttgtgattgatgttttcagctatagtttaaaaaattcacaaggacaagctttttgtaccaacatcatgggatttgttttcatc

SEQ ID NO: 97350 - protein, 355 aa, Arabidopsis thaliana; identical to SEQ ID NO: 28678
  peptide (1)..(355): Ceres Seq. ID no. 12737066
  misc_feature (22)..(322): Pfam Name: Protein phosphatase 2C Pfam Description: Protein phosphatase 2C
  misc_feature (1)..(355): Homolog of NCBI NO: 15224677 NR Description: protein phosphatase 2C (PP2C); protein id: supported by cDNA: 11428., supported by cDNA: gi_15292878, by cDNA: gi_18652942, supported by cDNA: gi_20258908 [Arabidopsis
  misc_feature (1)..(355): Homolog of NCBI NO: 15236548 NR Description: protein phosphatase 2C (PP2C); protein id: supported by cDNA: gi_16209697 [Arabidopsis thaliana]
  misc_feature (1)..(343): Homolog of NCBI NO: 12003990 NR Description: protein phosphatase type-2C [Zea mays]
  misc_feature (134)..(355): Homolog of NCBI NO: 27697184 NR Description: Similar to protein phosphatase 1G (formerly 2C),
  misc_feature (156)..(348): Homolog of NCBI NO: 4505999 NR Description: protein phosphatase 1G (formerly 2C), gamma isoform; protein phosphatase 1G (formerly 2C),; protein
  misc_feature (1)..(120): Homolog of NCBI NO: 27697184 NR Description: Similar to protein phosphatase 1G (formerly 2C),
  misc_feature (1)..(117): Homolog of NCBI NO: 4505999 NR Description: protein phosphatase 1G (formerly 2C), gamma isoform; protein phosphatase 1G (formerly 2C),; protein
  misc_feature (156)..(348): Homolog of NCBI NO: 22219444 NR Description: protein phosphatase 1G (formerly 2C), gamma isoform [Rattus norvegicus] >gi|22087629|gb|AAM90993.1|
  misc_feature (1)..(117): Homolog of NCBI NO: 22219444 NR Description: protein phosphatase 1G (formerly 2C), gamma isoform [Rattus norvegicus] >gi|22087629|gb|AAM90993.1|
  misc_feature (156)..(348): Homolog of NCBI NO: 27807391 NR Description: protein phosphatase 1G (formerly 2C), gamma isoform [Bos taurus] >gi|3122591|sp|P79126|P2CG_BOVIN

SEQ ID NO: 97351 - protein, 327 aa, Arabidopsis thaliana; identical to SEQ ID NO: 28679
  peptide (1)..(327): Ceres Seq. ID no. 12737067
  misc_feature (1)..(294): Pfam Name: Protein phosphatase 2C Pfam Description: Protein phosphatase 2C
  misc_feature (1)..(327): Homolog of NCBI NO: 15224677 NR Description: protein phosphatase 2C (PP2C); protein id: supported by cDNA: 11428., supported by cDNA: gi_15292878, by cDNA: gi_18652942, supported by cDNA: gi_20258908 [Arabidopsis
  misc_feature (1)..(327): Homolog of NCBI NO: 15236548 NR Description: protein phosphatase 2C (PP2C); protein id: supported by cDNA: gi_16209697 [Arabidopsis thaliana]
  misc_feature (1)..(315): Homolog of NCBI NO: 12003990 NR Description: protein phosphatase type-2C [Zea mays]
  misc_feature (106)..(327): Homolog of NCBI NO: 27697184 NR Description: Similar to protein phosphatase 1G (formerly 2C),
  misc_feature (128)..(320): Homolog of NCBI NO: 4505999 NR Description: protein phosphatase 1G (formerly 2C), gamma isoform; protein phosphatase 1G (formerly 2C),; protein
  misc_feature (1)..(92): Homolog of NCBI NO: 27697184 NR Description: Similar to protein phosphatase 1G (formerly 2C),
  misc_feature (1)..(89): Homolog of NCBI NO: 4505999 NR Description: protein phosphatase 1G (formerly 2C), gamma isoform; protein phosphatase 1G (formerly 2C),; protein
  misc_feature (128)..(320): Homolog of NCBI NO: 22219444 NR Description: protein phosphatase 1G (formerly 2C), gamma isoform [Rattus norvegicus] >gi|22087629|gb|AAM90993.1|
  misc_feature (1)..(89): Homolog of NCBI NO: 22219444 NR Description: protein phosphatase 1G (formerly 2C), gamma isoform [Rattus norvegicus] >gi|22087629|gb|AAM90993.1|
  misc_feature (128)..(320): Homolog of NCBI NO: 27807391 NR Description: protein phosphatase 1G (formerly 2C), gamma isoform [Bos taurus] >gi|3122591|sp|P79126|P2CG_BOVIN

SEQ ID NO: 97352 - protein, 320 aa, Arabidopsis thaliana; identical to SEQ ID NO: 28680
  peptide (1)..(320): Ceres Seq. ID no. 12737068
  misc_feature (1)..(287): Pfam Name: Protein phosphatase 2C Pfam Description: Protein phosphatase 2C
  misc_feature (1)..(320): Homolog of NCBI NO: 15224677 NR Description: protein phosphatase 2C (PP2C); protein id: supported by cDNA: 11428., supported by cDNA: gi_15292878, by cDNA: gi_18652942, supported by cDNA: gi_20258908 [Arabidopsis
  misc_feature (1)..(320): Homolog of NCBI NO: 15236548 NR Description: protein phosphatase 2C (PP2C); protein id: supported by cDNA: gi_16209697 [Arabidopsis thaliana]
  misc_feature (1)..(308): Homolog of NCBI NO: 12003990 NR Description: protein phosphatase type-2C [Zea mays]
  misc_feature (99)..(320): Homolog of NCBI NO: 27697184 NR Description: Similar to protein phosphatase 1G (formerly 2C),
  misc_feature (121)..(313): Homolog of NCBI NO: 4505999 NR Description: protein phosphatase 1G (formerly 2C), gamma isoform; protein phosphatase 1G (formerly 2C),; protein
  misc_feature (1)..(85): Homolog of NCBI NO: 27697184 NR Description: Similar to protein phosphatase 1G (formerly 2C),
  misc_feature (1)..(82): Homolog of NCBI NO: 4505999 NR Description: protein phosphatase 1G (formerly 2C), gamma isoform; protein phosphatase 1G (formerly 2C),; protein
  misc_feature (121)..(313): Homolog of NCBI NO: 22219444 NR Description: protein phosphatase 1G (formerly 2C), gamma isoform [Rattus norvegicus] >gi|22087629|gb|AAM90993.1|
  misc_feature (1)..(82): Homolog of NCBI NO: 22219444 NR Description: protein phosphatase 1G (formerly 2C), gamma isoform [Rattus norvegicus] >gi|22087629|gb|AAM90993.1|
  misc_feature (121)..(313): Homolog of NCBI NO: 27807391 NR Description: protein phosphatase 1G (formerly 2C), gamma isoform [Bos taurus] >gi|3122591|sp|P79126|P2CG_BOVIN

SEQ ID NO: 97353 - DNA, 961 bp, Arabidopsis thaliana
  misc_feature (1)..(961): Ceres Seq. ID no. 12737069
  misc_feature: MA Experiment ID: 108435 Result: Down-regulated in Transcription
  misc_feature: MA Experiment 108435 PARAMETER Experiment Name: At_stm_Mutants_cDNA_P Parameter: Plant Line Value: wt Landsburg vs stm
  misc_feature: MA Experiment 108435 PARAMETER Experiment Name: At_stm_Mutants_cDNA_P Parameter: Tissue Value: Shoot Apical Meristem Region
  misc_feature: MA Experiment ID: 108463 Result: Up-regulated in Transcription
  misc_feature: MA Experiment 108463 PARAMETER Experiment Name: At_Germinating_Seeds_cDNA_P Parameter: Age (day) Value: 3 vs. 0
  misc_feature: MA Experiment 108463 PARAMETER Experiment Name: At_Germinating_Seeds_cDNA_P Parameter: Tissue Value: Germinating Seeds
  misc_feature: MA Experiment ID: 108464 Result: Up-regulated in Transcription
  misc_feature: MA Experiment 108464 PARAMETER Experiment Name: At_Germinating_Seeds_cDNA_P Parameter: Age (day) Value: 4 vs. 0
  misc_feature: MA Experiment 108464 PARAMETER Experiment Name: At_Germinating_Seeds_cDNA_P Parameter: Tissue Value: Germinating Seeds
  misc_feature: MA Experiment ID: 108488 Result: Up-regulated in Transcription
  misc_feature: MA Experiment ID: 108577 Result: Up-regulated in Transcription
  misc_feature: MA Experiment 108577 PARAMETER Experiment Name: At_42deg_Heat_cDNA_P Parameter: Temperature (deg C) Value: 42 vs. 22
  misc_feature: MA Experiment 108577 PARAMETER Experiment Name: At_42deg_Heat_cDNA_P Parameter: Timepoint (hr) Value: 6
  misc_feature: MA Experiment 108577 PARAMETER Experiment Name: At_42deg_Heat_cDNA_P Parameter: Tissue Value: Aerial
  misc_feature: MA Experiment ID: 108594 Result: Down-regulated in Transcription
  misc_feature: MA Experiment 108594 PARAMETER Experiment Name: At_Ler-rhl_Root_cDNA_P Parameter: Plant Line Value: null
  misc_feature: MA Experiment ID: 108595 Result: Down-regulated in Transcription
  misc_feature: MA Experiment 108595 PARAMETER Experiment Name: At_Ler-pi_Ovule_cDNA_P Parameter: Plant Line Value: null
  misc_feature: MA Experiment ID: 20000086 Result: Down-regulated in Transcription
  misc_feature: MA Experiment 20000086 PARAMETER Experiment Name: At_100uM_ABA_Mutants_cDNA_P Parameter: Plant Line Value: CS22
  misc_feature: MA Experiment 20000086 PARAMETER Experiment Name: At_100uM_ABA_Mutants_cDNA_P Parameter: Timepoint (hr) Value: 6
  misc_feature: MA Experiment 20000086 PARAMETER Experiment Name: At_100uM_ABA_Mutants_cDNA_P Parameter: Tissue Value: Aerial
  misc_feature: MA Experiment 20000086 PARAMETER Experiment Name: At_100uM_ABA_Mutants_cDNA_P Parameter: Treatment Value: 100uM ABA vs. No Treatment
  misc_feature: MA Experiment ID: 20000087 Result: Down-regulated in Transcription
  misc_feature: MA Experiment 20000087 PARAMETER Experiment Name: At_100uM_ABA_Mutants_cDNA_P Parameter: Plant Line Value: WS
  misc_feature: MA Experiment 20000087 PARAMETER Experiment Name: At_100uM_ABA_Mutants_cDNA_P Parameter: Timepoint (hr) Value: 6
  misc_feature: MA Experiment 20000087 PARAMETER Experiment Name: At_100uM_ABA_Mutants_cDNA_P Parameter: Tissue Value: Aerial
  misc_feature: MA Experiment 20000087 PARAMETER Experiment Name: At_100uM_ABA_Mutants_cDNA_P Parameter: Treatment Value: 100uM ABA vs. No Treatment
  misc_feature: MA Experiment ID: 20000090 Result: Down-regulated in Transcription
  misc_feature: MA Experiment ID: 20000185 Result: Down-regulated in Transcription
  misc_feature: MA Experiment 20000185 PARAMETER Experiment Name: At_Roots__P Parameter: Age (day) Value: 7 vs. 21
  misc_feature: MA Experiment 20000185 PARAMETER Experiment Name: At_Roots__P Parameter: Organism Value: A. thaliana
  misc_feature: MA Experiment 20000185 PARAMETER Experiment Name: At_Roots__P Parameter: Tissue Value: Roots vs. Whole Plant
  misc_feature: MA Experiment ID: 20000227 Result: Down-regulated in Transcription
  misc_feature: MA Experiment 20000227 PARAMETER Experiment Name: At_Root-Tips-vs-Tops_P Parameter: Tissue Value: Root Tips vs. Root Tops
  misc_feature: MA Experiment ID: 20000234 Result: Down-regulated in Transcription
  misc_feature: MA Experiment 20000234 PARAMETER Experiment Name: At_Siliques_P Parameter: Age (day) Value: 21
  misc_feature: MA Experiment 20000234 PARAMETER Experiment Name: At_Siliques_P Parameter: Organism Value: A. thaliana
  misc_feature: MA Experiment 20000234 PARAMETER Experiment Name: At_Siliques_P Parameter: Plant Line Value: WS
  misc_feature: MA Experiment 20000234 PARAMETER Experiment Name: At_Siliques_P Parameter: Tissue Value: Less Than 5mm Siliques vs. Whole Plant
  misc_feature: MA Experiment ID: 20000235 Result: Down-regulated in Transcription
  misc_feature: MA Experiment 20000235 PARAMETER Experiment Name: At_Siliques_P Parameter: Age (day) Value: 21
  misc_feature: MA Experiment 20000235 PARAMETER Experiment Name: At_Siliques_P Parameter: Organism Value: A. thaliana
  misc_feature: MA Experiment 20000235 PARAMETER Experiment Name: At_Siliques_P Parameter: Plant Line Value: WS
  misc_feature: MA Experiment 20000235 PARAMETER Experiment Name: At_Siliques_P Parameter: Tissue Value: 5-10mm Siliques vs. Whole Plant
  misc_feature: MA Experiment ID: 20000286 Result: Down-regulated in Transcription
  misc_feature: MA Experiment 20000286 PARAMETER Experiment Name: At_Open_Flower_P Parameter: Age (day) Value: 21
  misc_feature: MA Experiment 20000286 PARAMETER Experiment Name: At_Open_Flower_P Parameter: Plant Line Value: WS
  misc_feature: MA Experiment 20000286 PARAMETER Experiment Name: At_Open_Flower_P Parameter: Tissue Value: Half Open vs. Whole Plant
  misc_feature: MA Experiment ID: 20000308 Result: Down-regulated in Transcription
  misc_feature: MA Experiment 20000308 PARAMETER Experiment Name: At_100mM_NaCl__P Parameter: Age (day) Value: 17
  misc_feature: MA Experiment 20000308 PARAMETER Experiment Name: At_100mM_NaCl__P Parameter: Organism Value: A. thaliana
  misc_feature: MA Experiment 20000308 PARAMETER Experiment Name: At_100mM_NaCl__P Parameter: Plant Line Value: WS
  misc_feature: MA Experiment 20000308 PARAMETER Experiment Name: At_100mM_NaCl__P Parameter: Timepoint (hr) Value: 72
  misc_feature: MA Experiment 20000308 PARAMETER Experiment Name: At_100mM_NaCl__P Parameter: Tissue Value: Whole Plant
  misc_feature: MA Experiment 20000308 PARAMETER Experiment Name: At_100mM_NaCl__P Parameter: Treatment Value: 100mM NaCl vs. No Treatment
  misc_feature: MA Experiment ID: 20000438 Result: Up-regulated in Transcription
  misc_feature: MA Experiment 20000438 PARAMETER Experiment Name: At_Shoots__P Parameter: Age (day) Value: 14
  misc_feature: MA Experiment 20000438 PARAMETER Experiment Name: At_Shoots__P Parameter: Tissue Value: Shoots vs. Whole Plant
  misc_feature: MA Experiment ID: 20000439 Result: Down-regulated in Transcription
  misc_feature: MA Experiment 20000439 PARAMETER Experiment Name: At_Roots__P Parameter: Age (day) Value: 14 vs. 21
  misc_feature: MA Experiment 20000439 PARAMETER Experiment Name: At_Roots__P Parameter: Organism Value: A. thaliana
  misc_feature: MA Experiment 20000439 PARAMETER Experiment Name: At_Roots__P Parameter: Tissue Value: Roots vs. Whole Plant
  misc_feature: MA Experiment ID: 20000527 Result: Up-regulated in Transcription
  misc_feature: MA Experiment 20000527 PARAMETER Experiment Name: At_10percent_PEG_P Parameter: Age (day) Value: 20
  misc_feature: MA Experiment 20000527 PARAMETER Experiment Name: At_10percent_PEG_P Parameter: Organism Value: A. thaliana
  misc_feature: MA Experiment 20000527 PARAMETER Experiment Name: At_10percent_PEG_P Parameter: Plant Line Value: WS
  misc_feature: MA Experiment 20000527 PARAMETER Experiment Name: At_10percent_PEG_P Parameter: Timepoint (day) Value: 20
  misc_feature: MA Experiment 20000527 PARAMETER Experiment Name: At_10percent_PEG_P Parameter: Tissue Value: Whole Plant
  misc_feature: MA Experiment 20000527 PARAMETER Experiment Name: At_10percent_PEG_P Parameter: Treatment Value: 10percent PEG vs. No Treatment
  misc_feature: MA Experiment ID: 20001247 Result: Up-regulated in Transcription
  misc_feature: MA Experiment 20001247 PARAMETER Experiment Name: At_Far-red-induction_P Parameter: Age (day) Value: 7
  misc_feature: MA Experiment 20001247 PARAMETER Experiment Name: At_Far-red-induction_P Parameter: Light Value: Far-red vs. White
  misc_feature: MA Experiment 20001247 PARAMETER Experiment Name: At_Far-red-induction_P Parameter: Organism Value: A. thaliana
  misc_feature: MA Experiment 20001247 PARAMETER Experiment Name: At_Far-red-induction_P Parameter: Plant Line Value: Columbia
  misc_feature: MA Experiment 20001247 PARAMETER Experiment Name: At_Far-red-induction_P Parameter: Timepoint (hr) Value: 1
  misc_feature: MA Experiment 20001247 PARAMETER Experiment Name: At_Far-red-induction_P Parameter: Tissue Value: Whole Plant
  misc_feature: MA Experiment ID: 20001248 Result: Down-regulated in Transcription
  misc_feature: MA Experiment 20001248 PARAMETER Experiment Name: At_Far-red-induction_P Parameter: Age (day) Value: 7
  misc_feature: MA Experiment 20001248 PARAMETER Experiment Name: At_Far-red-induction_P Parameter: Light Value: Far-red vs. White
  misc_feature: MA Experiment 20001248 PARAMETER Experiment Name: At_Far-red-induction_P Parameter: Organism Value: A. thaliana
  misc_feature: MA Experiment 20001248 PARAMETER Experiment Name: At_Far-red-induction_P Parameter: Plant Line Value: Columbia
  misc_feature: MA Experiment 20001248 PARAMETER Experiment Name: At_Far-red-induction_P Parameter: Timepoint (hr) Value: 4
  misc_feature: MA Experiment 20001248 PARAMETER Experiment Name: At_Far-red-induction_P Parameter: Tissue Value: Whole Plant
  misc_feature: MA Experiment ID: 20001556 Result: Down-regulated in Transcription
  misc_feature: MA Experiment 20001556 PARAMETER Experiment Name: At_Drought_Soil_Dry_P Parameter: Age (day) Value: 26
  misc_feature: MA Experiment 20001556 PARAMETER Experiment Name: At_Drought_Soil_Dry_P Parameter: Organism Value: A. thaliana
  misc_feature: MA Experiment 20001556 PARAMETER Experiment Name: At_Drought_Soil_Dry_P Parameter: Plant Line Value: WS
  misc_feature: MA Experiment 20001556 PARAMETER Experiment Name: At_Drought_Soil_Dry_P Parameter: Post Timepoint (hr) Value: None
  misc_feature: MA Experiment 20001556 PARAMETER Experiment Name: At_Drought_Soil_Dry_P Parameter: Post-Treatment Value: None
  misc_feature: MA Experiment 20001556 PARAMETER Experiment Name: At_Drought_Soil_Dry_P Parameter: Timepoint (day) Value: 12
  misc_feature: MA Experiment 20001556 PARAMETER Experiment Name: At_Drought_Soil_Dry_P Parameter: Treatment Value: Drought vs. No Drought
  misc_feature: MA Experiment ID: 20001557 Result: Down-regulated in Transcription
  misc_feature: MA Experiment 20001557 PARAMETER Experiment Name: At_Drought_Soil_Dry_P Parameter: Age (day) Value: 27
  misc_feature: MA Experiment 20001557 PARAMETER Experiment Name: At_Drought_Soil_Dry_P Parameter: Organism Value: A. thaliana
  misc_feature: MA Experiment 20001557 PARAMETER Experiment Name: At_Drought_Soil_Dry_P Parameter: Plant Line Value: WS
  misc_feature: MA Experiment 20001557 PARAMETER Experiment Name: At_Drought_Soil_Dry_P Parameter: Post Timepoint (hr) Value: 3
  misc_feature: MA Experiment 20001557 PARAMETER Experiment Name: At_Drought_Soil_Dry_P Parameter: Post-Treatment Value: Re-Water vs. No Drought
  misc_feature: MA Experiment 20001557 PARAMETER Experiment Name: At_Drought_Soil_Dry_P Parameter: Timepoint (day) Value: 13
  misc_feature: MA Experiment 20001557 PARAMETER Experiment Name: At_Drought_Soil_Dry_P Parameter: Treatment Value: Drought vs. No Drought
  misc_feature: MA Experiment ID: 20001558 Result: Down-regulated in Transcription
  misc_feature: MA Experiment 20001558 PARAMETER Experiment Name: At_Drought_Soil_Dry_P Parameter: Age (day) Value: 27
  misc_feature: MA Experiment 20001558 PARAMETER Experiment Name: At_Drought_Soil_Dry_P Parameter: Organism Value: A. thaliana
  misc_feature: MA Experiment 20001558 PARAMETER Experiment Name: At_Drought_Soil_Dry_P Parameter: Plant Line Value: WS
  misc_feature: MA Experiment 20001558 PARAMETER Experiment Name: At_Drought_Soil_Dry_P Parameter: Post Timepoint (hr) Value: 6
  misc_feature: MA Experiment 20001558 PARAMETER Experiment Name: At_Drought_Soil_Dry_P Parameter: Post-Treatment Value: Re-Water vs. No Drought
  misc_feature: MA Experiment 20001558 PARAMETER Experiment Name: At_Drought_Soil_Dry_P Parameter: Timepoint (day) Value: 13
  misc_feature: MA Experiment 20001558 PARAMETER Experiment Name: At_Drought_Soil_Dry_P Parameter: Treatment Value: Drought vs. No Drought
  misc_feature: MA Experiment ID: 20001559 Result: Down-regulated in Transcription
  misc_feature: MA Experiment 20001559 PARAMETER Experiment Name: At_Drought_Soil_Dry_P Parameter: Age (day) Value: 28
  misc_feature: MA Experiment 20001559 PARAMETER Experiment Name: At_Drought_Soil_Dry_P Parameter: Organism Value: A. thaliana
  misc_feature: MA Experiment 20001559 PARAMETER Experiment Name: At_Drought_Soil_Dry_P Parameter: Plant Line Value: WS
  misc_feature: MA Experiment 20001559 PARAMETER Experiment Name: At_Drought_Soil_Dry_P Parameter: Post Timepoint (hr) Value: 29
  misc_feature: MA Experiment 20001559 PARAMETER Experiment Name: At_Drought_Soil_Dry_P Parameter: Post-Treatment Value: Re-Water vs. No Drought
  misc_feature: MA Experiment 20001559 PARAMETER Experiment Name: At_Drought_Soil_Dry_P Parameter: Timepoint (day) Value: 14
  misc_feature: MA Experiment 20001559 PARAMETER Experiment Name: At_Drought_Soil_Dry_P Parameter: Treatment Value: Drought vs. No Drought
  misc_feature: MA Experiment ID: 20001560 Result: Down-regulated in Transcription
  misc_feature: MA Experiment 20001560 PARAMETER Experiment Name: At_Drought_Soil_Dry_P Parameter: Age (day) Value: 28
  misc_feature: MA Experiment 20001560 PARAMETER Experiment Name: At_Drought_Soil_Dry_P Parameter: Organism Value: A. thaliana
  misc_feature: MA Experiment 20001560 PARAMETER Experiment Name: At_Drought_Soil_Dry_P Parameter: Plant Line Value: WS
  misc_feature: MA Experiment 20001560 PARAMETER Experiment Name: At_Drought_Soil_Dry_P Parameter: Post Timepoint (hr) Value: None
  misc_feature: MA Experiment 20001560 PARAMETER Experiment Name: At_Drought_Soil_Dry_P Parameter: Post-Treatment Value: None
  misc_feature: MA Experiment 20001560 PARAMETER Experiment Name: At_Drought_Soil_Dry_P Parameter: Timepoint (day) Value: 14
  misc_feature: MA Experiment 20001560 PARAMETER Experiment Name: At_Drought_Soil_Dry_P Parameter: Treatment Value: Drought vs. No Drought
  misc_feature: MA Experiment ID: 20001757 Result: Up-regulated in Transcription
  misc_feature: MA Experiment 20001757 PARAMETER Experiment Name: At_50mM_NH4NO3_L-to-H_P Parameter: Timepoint (hr) Value: 6
  misc_feature: MA Experiment 20001757 PARAMETER Experiment Name: At_50mM_NH4NO3_L-to-H_P Parameter: Tissue Value: Leaf
  misc_feature: MA Experiment 20001757 PARAMETER Experiment Name: At_50mM_NH4NO3_L-to-H_P Parameter: Treatment Value: 50mM NH4NO3 vs 100mM Mannitol
  misc_feature: MA Experiment ID: 20001904 Result: Down-regulated in Transcription
  misc_feature: MA Experiment 20001904 PARAMETER Experiment Name: At_Drought_Reproduction_P Parameter: Age (day) Value: 37
  misc_feature: MA Experiment 20001904 PARAMETER Experiment Name: At_Drought_Reproduction_P Parameter: Organism Value: A. thaliana
  misc_feature: MA Experiment 20001904 PARAMETER Experiment Name: At_Drought_Reproduction_P Parameter: Plant Line Value: WS
  misc_feature: MA Experiment 20001904 PARAMETER Experiment Name: At_Drought_Reproduction_P Parameter: Timepoint (day) Value: 7
  misc_feature: MA Experiment 20001904 PARAMETER Experiment Name: At_Drought_Reproduction_P Parameter: Tissue Value: Rosettes
  misc_feature: MA Experiment 20001904 PARAMETER Experiment Name: At_Drought_Reproduction_P Parameter: Treatment Value: Drought vs. No Drought
  misc_feature: MA Experiment ID: 20001905 Result: Down-regulated in Transcription
  misc_feature: MA Experiment 20001905 PARAMETER Experiment Name: At_Drought_Reproduction_P Parameter: Age (day) Value: 40
  misc_feature: MA Experiment 20001905 PARAMETER Experiment Name: At_Drought_Reproduction_P Parameter: Organism Value: A. thaliana
  misc_feature: MA Experiment 20001905 PARAMETER Experiment Name: At_Drought_Reproduction_P Parameter: Plant Line Value: WS
  misc_feature: MA Experiment 20001905 PARAMETER Experiment Name: At_Drought_Reproduction_P Parameter: Timepoint (day) Value: 10
  misc_feature: MA Experiment 20001905 PARAMETER Experiment Name: At_Drought_Reproduction_P Parameter: Tissue Value: Rosettes
  misc_feature: MA Experiment 20001905 PARAMETER Experiment Name: At_Drought_Reproduction_P Parameter: Treatment Value: Drought vs. No Drought
atctctcggtttcactattgaacgtgtaacactggtcgaaagaagacgaacataaactcgtctccggtaaccaaaaatggtttccatgactacttcatcttcttcgtacggaacattctctacagtcgtcaacagttctagacctaattcctcagcaacctttctcgtcccttccttgaaattctccaccggaatatcgaatttcgcgaatctgagtaatgggttttctctaaaatctccaattaatcctgggtttctcttcaagtctcgtcctttcactgtccaagctagagctgctgcagaaaaaaccgttcacgatttcaccgttaaggacattgatgggaaggatgttgctttgaacaaattcaaggggaaagttatgttgattgtcaatgttgcttcaagatgtggtttgacatcatcaaattactcagagctttcacatctgtacgagaaatacaaaactcaaggatttgagattctagcttttccctgcaatcagtttggtttccaagagcccgggtcaaactccgagatcaaacaattcgcttgcacccggtttaaagcagagttccctatatttgataaggttgacgtgaatggaccaagcacagcgccgatctacgagttcttgaaatcaaacgcaggaggattcttgggtggtctcattaaatggaactttgagaagttcttgattgataaaaagggaaaggtcgttgagaggtaccctcccaccacatcccctttccaaatcgagaaagacatccagaagttgcttgccgcttaaaaacttttgctcatgagtgagcatatagagactgatggttaaagtaaccgtaaattgtgacataaagtttccggttattgcttgtataccttcttacattctaagttgtactaatcgcttaataatttgcgtataatggtaatgttatatacattatattataaaaatggtgtt

SEQ ID NO: 97354 - protein, 236 aa, Arabidopsis thaliana [sequence omitted]

SEQ ID NO: 97355 - protein, 233 aa, Arabidopsis thaliana; identical to SEQ ID NO: 85339
  peptide (1)..(233): Ceres Seq. ID no. 12737071
  misc_feature (75)..(184): Pfam Name: Glutathione peroxidase Pfam Description: Glutathione peroxidase
  misc_feature (1)..(233): Homolog of NCBI NO: 15224678 NR Description: glutathione peroxidase, putative; protein id: supported by cDNA: gi_14334959, supported by cDNA: gi_17104618 thaliana] >gi|20141398|sp|P52032|GSHY_ARATH Phospholipid
  misc_feature (1)..(232): Homolog of NCBI NO: 2129599 NR Description: glutathione peroxidase (EC 1.11.1.9) precursor - thaliana >gi|1061036|emb|CAA61965.1| glutathione peroxidase
  misc_feature (7)..(233): Homolog of NCBI NO: 22329066 NR Description: glutathione peroxidase, putative; protein id:
  misc_feature (7)..(230): Homolog of NCBI NO: 7433114 NR Description: glutathione peroxidase (EC 1.11.1.9) F11C18.70 -
  misc_feature (4)..(233): Homolog of NCBI NO: 20147455 NR Description: glutathione peroxidase [Brassica napus]
  misc_feature (4)..(233): Homolog of NCBI NO: 40388501 NR Description: GPx [Brassica oleracea var. botrytis]
  misc_feature (19)..(233): Homolog of NCBI NO: 2982362 NR Description: glutathione peroxidase [Zantedeschia aethiopica]
  misc_feature (1)..(233): Homolog of NCBI NO: 20138099 NR Description: Phospholipid hydroperoxide glutathione chloroplast precursor (PHGPx) >gi|7433115|pir||T06462 glutathione
  misc_feature (68)..(233): Homolog of NCBI NO: 21360380 NR Description: glutathione peroxidase 1 [Oryza sativa]
  misc_feature (18)..(233): Homolog of NCBI NO: 6179600 NR Description: GPX12Hv, glutathione peroxidase-like protein

SEQ ID NO: 97356 - protein, 135 aa, Arabidopsis thaliana; identical to SEQ ID NO: 29401
  peptide (1)..(135): Ceres Seq. ID no. 12737072
  misc_feature (1)..(86): Pfam Name: Glutathione peroxidase Pfam Description: Glutathione peroxidase
  misc_feature (1)..(135): Homolog of NCBI NO: 15224678 NR Description: glutathione peroxidase, putative; protein id: supported by cDNA: gi_14334959, supported by cDNA: gi_17104618 thaliana] >gi|20141398|sp|P52032|GSHY_ARATH Phospholipid
  misc_feature (1)..(134): Homolog of NCBI NO: 2129599 NR Description: glutathione peroxidase (EC 1.11.1.9) precursor - thaliana >gi|1061036|emb|CAA61965.1| glutathione peroxidase
  misc_feature (1)..(135): Homolog of NCBI NO: 22329066 NR Description: glutathione peroxidase, putative; protein id:
  misc_feature (1)..(132): Homolog of NCBI NO: 7433114 NR Description: glutathione peroxidase (EC 1.11.1.9) F11C18.70 -
  misc_feature (1)..(135): Homolog of NCBI NO: 20147455 NR Description: glutathione peroxidase [Brassica napus]
  misc_feature (1)..(135): Homolog of NCBI NO: 40388501 NR Description: GPx [Brassica oleracea var. botrytis]
  misc_feature (1)..(135): Homolog of NCBI NO: 2982362 NR Description: glutathione peroxidase [Zantedeschia aethiopica]
  misc_feature (1)..(135): Homolog of NCBI NO: 20138099 NR Description: Phospholipid hydroperoxide glutathione chloroplast precursor (PHGPx) >gi|7433115|pir||T06462 glutathione
  misc_feature (1)..(135): Homolog of NCBI NO: 21360380 NR Description: glutathione peroxidase 1 [Oryza sativa]
  misc_feature (1)..(135): Homolog of NCBI NO: 6179600 NR Description: GPX12Hv, glutathione peroxidase-like protein

SEQ ID NO: 97357 - DNA, 3223 bp, Arabidopsis thaliana
  misc_feature (1)..(3223): Ceres Seq. ID no. 12737081
  misc_feature: MA Experiment ID: 20000314 Result: Up-regulated in Transcription
  misc_feature: MA Experiment 20000314 PARAMETER Experiment Name: At_14day_Shoots-Roots_Sub_P Parameter: Age (day) Value: 14
  misc_feature: MA Experiment 20000314 PARAMETER Experiment Name: At_14day_Shoots-Roots_Sub_P Parameter: Organism Value: A. thaliana
  misc_feature: MA Experiment 20000314 PARAMETER Experiment Name: At_14day_Shoots-Roots_Sub_P Parameter: Plant Line Value: WS
  misc_feature: MA Experiment 20000314 PARAMETER Experiment Name: At_14day_Shoots-Roots_Sub_P Parameter: Tissue Value: Roots vs. Whole Plant
  misc_feature: MA Experiment ID: 20000327 Result: Up-regulated in Transcription
  misc_feature: MA Experiment 20000327 PARAMETER Experiment Name: At_42deg_Heat_Sub_P Parameter: Age (day) Value: 14
  misc_feature: MA Experiment 20000327 PARAMETER Experiment Name: At_42deg_Heat_Sub_P Parameter: Organism Value: A. thaliana
  misc_feature: MA Experiment 20000327 PARAMETER Experiment Name: At_42deg_Heat_Sub_P Parameter: Plant Line Value: WS
  misc_feature: MA Experiment 20000327 PARAMETER Experiment Name: At_42deg_Heat_Sub_P Parameter: Temperature (deg C) Value: 42 vs. 22
  misc_feature: MA Experiment 20000327 PARAMETER Experiment Name: At_42deg_Heat_Sub_P Parameter: Timepoint (hr) Value: 1
  misc_feature: MA Experiment 20000327 PARAMETER Experiment Name: At_42deg_Heat_Sub_P Parameter: Tissue Value: Aerial
  misc_feature: MA Experiment ID: 20000355 Result: Up-regulated in Transcription
  misc_feature: MA Experiment 20000355 PARAMETER Experiment Name: At_Siliques_Sub_P Parameter: Age (day) Value: 21
  misc_feature: MA Experiment 20000355 PARAMETER Experiment Name: At_Siliques_Sub_P Parameter: Organism Value: A. thaliana
  misc_feature: MA Experiment 20000355 PARAMETER Experiment Name: At_Siliques_Sub_P Parameter: Plant Line Value: WS
  misc_feature: MA Experiment 20000355 PARAMETER Experiment Name: At_Siliques_Sub_P Parameter: Tissue Value: Less Than 5mm Siliques vs. Whole Plant
aacttctcgatgaaatgactttcttctacaaacttctttttccctcttctccaagcttacgcttgtctccatgtaaaaaacctccgtcgtcttcttcctcctccttcataaccctaaaccaaaaaccctcatttccttcaatcttcttactcacatggcgctaaggagattatcaaagtctgtttcgtcagccatcaaagctcaatacactctctcgagaccctctcctctcctccgttctcgctctctctcttcctctcctcactacacctctattggccggccaacaaattcattcatcggaaaaatcaataactcttctatcactcatgcgactactactcatggtcaactcttccctctttcttctccgcgacgcttttgtactaccacagctcaggttaatcaaaatgagtttacggagatggcatgggaagggcttatcaacgcctttgacgcggctcgtgaatcgaaacaacagattgtggaatctgaacatttgatgaaagctcttcttgagcaaaaagatggtatggctagaaagattttcactaaagctggaattgacaattcctctgttcttcaagctacagacttgttcatatctaaacaaccaacggttagtgatgcaagtggtcagagactagggtcatctcttagtgttatattagaaaatgcaaagaggcataagaaagatatgttggatagttatgtatccgtggagcactttttgttggcttattattcagatacaaggtttggacaagagtttttcagggacatgaaacttgatattcaagtgctaaaggatgctattaaagatgtacgcggtgatcaacgagtaactgatcggaatcctgaaagcaaatatcaagcacttgaaaagtatggaaatgatttaactgagatggctagacgagggaagctggatcctgtcattgggcgggatgatgaaattaggcgttgcatccagatattatgtaggagaacaaaaaacaatccggttattattggtgaacctggtgtagggaaaactgcaattgcagaggggttggctcaacgaattgtgcgaggagatgtccctgaacctctcatgaatcgaaagttgatatctctcgacatgggttcacttcttgctggtgccaaatttcgaggagattttgaggagaggttgaaagcagtaatgaaggaagtatctgcttccaatgggcaaacaatcttgtttattgatgagatccacactgttgttggtgcaggagctatggatggagcaatggatgcaagcaacctcttgaaaccaatgcttggacgaggtgaactgagatgcattggtgcaactacactgaccgaataccgcaaatatatagagaaagacccagctctagagcgtaggtttcaacaagtgttatgtgttcagccctctgttgaagatacaatctcgattcttcgtgggttaagagagcggtacgagttacaccatggcgttactatatcagatagtgcccttgtttcagcagcagttcttgcagaccgctacatcaccgaacgctttctgccagacaaagctattgatcttgttgacgaagctggtgcaaagctgaagatggagatcacttctaaaccaactgaactagatggaatagatagagctgtgatcaaattggagatggaaaagctttctcttaaaaatgatactgataaagcatctaaagaacggctacagaagattgagaatgatctgtccacgctcaaacagaaacagaaagaactcaatgtccaatgggagaaagaaaagtcgctcatgacaaaaatacgttcgtttaaggaagagattgatcgagttaacctcgaaattgaatctgctgaacgtgaatatgatctaaaccgagctgctgagctgaagtatggaacacttttgtccctccaacgccaattagaagaagctgagaagaatctcacgaatttccgacagtttggacagtcactactccgagaagtggttaccgatcttgacatagcagaaatagtaagcaagtggactggtattccactatctaatcttcagcaatcagagagagagaagttagtgatgttggaagaagtgctccaccatagagttattggtcaagacatggctgtaaaatcagtagcagatgctatccgacgttcaagggctggtctttctgatcctaaccgcccaatagctagtttcatgttcatgggtccaacaggtgttggtaagaccgagcttgccaaggctctagcgggatacctttttaacactgaaaatgcaatagtgagggtcgatatgagtgagtacatggaaaaacactcagtctcacggcttgttggtgcaccacctggctatgtcggttatgaagaaggtgggcagttaactgaagttgttcgcaggagaccttactcggtggttctgtttgatgagatcgagaaagcccaccctgatgtctttaatatcttgctacaactgctagacgatggaagaataactgattctcaaggaaggaccgtaagtttcaaaaactgtgttgtaattatgacgtcgaatataggatctcaccacatacttgagaccctccgcaacaatgaagacagcaaagaagcagtttatgagataatgaagcggcaagttgtggagttagcaagacaaaatttcaggcctgagttcatgaacagaattgacgagtacatagttttccagccgctggattctaacgaaatctccaaaatcgtagagttacagatgagacgggtgaagaatagcttggaacagaagaaaatcaaacttcagtataccaaagaggcagtggatctccttgctcagcttggctttgaccctaactacggggcaaggccggtgaagcgagtgattcaacagatggtggagaatgagatcgctgtcgggattttgaaaggagattttgcagaagaagataccgttcttgtcgatgttgaccacttggctagtgacaacaaattggttatcaagaagcttgagagtaatgcttcagctgaagaaatggccgcttaattgcacaaacaaaattagacgattcggggtttagcgtttataactcttttgttctgtcttttgtagattcgtactttagtgttgctctctcttctaactcgtacggaatgtaatgttttgaggattatcttttgccgacaaaagtaaatgggaacacaccgacttattcctccg

SEQ ID NO: 97358 - protein, 964 aa, Arabidopsis thaliana
  peptide (1)..(964): Ceres Seq. ID no. 12737082
  misc_feature (685)..(921): Pfam Name: ATPase family associated with various cellular Pfam Description: ATPase family associated with various cellular
  misc_feature (84)..(941): Homolog of NCBI NO: 23123825 NR Description: hypothetical protein [Nostoc punctiforme]
  misc_feature (84)..(952): Homolog of NCBI NO: 22298932 NR Description: ClpB protein [Thermosynechococcus elongatus BP-1]
  misc_feature (84)..(953): Homolog of NCBI NO: 23128455 NR Description: hypothetical protein [Nostoc punctiforme]
  misc_feature (84)..(953): Homolog of NCBI NO: 23040907 NR Description: hypothetical protein [Trichodesmium erythraeum
  misc_feature (117)..(941): Homolog of NCBI NO: 17232576 NR Description: endopeptidase Clp ATP-binding chain B [Nostoc sp.
  misc_feature (79)..(953): Homolog of NCBI NO: 1705924 NR Description: CLPB PROTEIN >gi|885934|gb|AAB09631.1| ClpB
  misc_feature (83)..(565): Homolog of NCBI NO: 23612849 NR Description: hypothetical protein [Plasmodium falciparum 3D7]
  misc_feature (510)..(952): Homolog of NCBI NO: 23612849 NR Description: hypothetical protein [Plasmodium falciparum 3D7]
  misc_feature (69)..(940): Homolog of NCBI NO: 23104238 NR Description: hypothetical protein [Azotobacter vinelandii]
  misc_feature (83)..(964): Homolog of NCBI NO: 22957954 NR Description: hypothetical protein [Rhodobacter sphaeroides]
MALRRLSKSVSSAIKAQYTLSRPSPLLRSRSLSSSPHYTSIGRPTNSFIGKINNSSITHATTTHGQLFPLSSPRRFCTTTAQVNQNEFTEMAWEGLINAFDAARESKQQIVESEHLMKALLEQKDGMARKIFTKAGIDNSSVLQATDLFISKQPTVSDASGQRLGSSLSVILENAKRHKKDMLDSYVSVEHFLLAYYSDTRFGQEFFRDMKLDIQVLKDAIKDVRGDQRVTDRNPESKYQALEKYGNDLTEMARRGKLDPVIGRDDEIRRCIQILCRRTKNNPVIIGEPGVGKTAIAEGLAQRIVRGDVPEPLMNRKLISLDMGSLLAGAKFRGDFEERLKAVMKEVSASNGQTILFIDEIHTVVGAGAMDGAMDASNLLKPMLGRGELRCIGATTLTEYRKYIEKDPALERRFQQVLCVQPSVEDTISILRGLRERYELHHGVTISDSALVSAAVLADRYITERFLPDKAIDLVDEAGAKLKMEITSKPTELDGIDRAVIKLEMEKLSLKNDTDKASKERLQKIENDLSTLKQKQKELNVQWEKEKSLMTKIRSFKEEIDRVNLEIESAEREYDLNRAAELKYGTLLSLQRQLEEAEKNLTNFRQFGQSLLREVVTDLDIAEIVSKWTGIPLSNLQQSEREKLVMLEEVLHHRVIGQDMAVKSVADAIRRSRAGLSDPNRPIASFMFMGPTGVGKTELAKALAGYLFNTENAIVRVDMSEYMEKHSVSRLVGAPPGYVGYEEGGQLTEVVRRRPYSVVLFDEIEKAHPDVFNILLQLLDDGRITDSQGRTVSFKNCVVIMTSNIGSHHILETLRNNEDSKEAVYEIMKRQVVELARQNFRPEFMNRIDEYIVFQPLDSNEISKIVELQMRRVKNSLEQKKIKLQYTKEAVDLLAQLGFDPNYGARPVKRVIQQMVENEIAVGILKGDFAEEDTVLVDVDHLASDNKLVIKKLESNASAEEMAA

SEQ ID NO: 97359 - protein, 874 aa, Arabidopsis thaliana
  peptide (1)..(874): Ceres Seq. ID no. 12737083
  misc_feature (595)..(831): Pfam Name: ATPase family associated with various cellular Pfam Description: ATPase family associated with various cellular
  misc_feature (1)..(851): Homolog of NCBI NO: 23123825 NR Description: hypothetical protein [Nostoc punctiforme]
  misc_feature (1)..(862): Homolog of NCBI NO: 22298932 NR Description: ClpB protein [Thermosynechococcus elongatus BP-1]
  misc_feature (1)..(863): Homolog of NCBI NO: 23128455 NR Description: hypothetical protein [Nostoc punctiforme]
  misc_feature (1)..(863): Homolog of NCBI NO: 23040907 NR Description: hypothetical protein [Trichodesmium erythraeum
  misc_feature (27)..(851): Homolog of NCBI NO: 17232576 NR Description: endopeptidase Clp ATP-binding chain B [Nostoc sp.
  misc_feature (1)..(863): Homolog of NCBI NO: 1705924 NR Description: CLPB PROTEIN >gi|885934|gb|AAB09631.1| ClpB
  misc_feature (1)..(475): Homolog of NCBI NO: 23612849 NR Description: hypothetical protein [Plasmodium falciparum 3D7]
  misc_feature (420)..(862): Homolog of NCBI NO: 23612849 NR Description: hypothetical protein [Plasmodium falciparum 3D7]
  misc_feature (1)..(850): Homolog of NCBI NO: 23104238 NR Description: hypothetical protein [Azotobacter vinelandii]
  misc_feature (1)..(874): Homolog of NCBI NO: 22957954 NR Description: hypothetical protein [Rhodobacter sphaeroides]
MAWEGLINAFDAARESKQQIVESEHLMKALLEQKDGMARKIFTKAGIDNSSVLQATDLFISKQPTVSDASGQRLGSSLSVILENAKRHKKDMLDSYVSVEHFLLAYYSDTRFGQEFFRDMKLDIQVLKDAIKDVRGDQRVTDRNPESKYQALEKYGNDLTEMARRGKLDPVIGRDDEIRRCIQILCRRTKNNPVIIGEPGVGKTAIAEGLAQRIVRGDVPEPLMNRKLISLDMGSLLAGAKFRGDFEERLKAVMKEVSASNGQTILFIDEIHTVVGAGAMDGAMDASNLLKPMLGRGELRCIGATTLTEYRKYIEKDPALERRFQQVLCVQPSVEDTISILRGLRERYELHHGVTISDSALVSAAVLADRYITERFLPDKAIDLVDEAGAKLKMEITSKPTELDGIDRAVIKLEMEKLSLKNDTDKASKERLQKIENDLSTLKQKQKELNVQWEKEKSLMTKIRSFKEEIDRVNLEIESAEREYDLNRAAELKYGTLLSLQRQLEEAEKNLTNFRQFGQSLLREVVTDLDIAEIVSKWTGIPLSNLQQSEREKLVMLEEVLHHRVIGQDMAVKSVADAIRRSRAGLSDPNRPIASFMFMGPTGVGKTELAKALAGYLFNTENAIVRVDMSEYMEKHSVSRLVGAPPGYVGYEEGGQLTEVVRRRPYSVVLFDEIEKAHPDVFNILLQLLDDGRITDSQGRTVSFKNCVVIMTSNIGSHHILETLRNNEDSKEAVYEIMKRQVVELARQNFRPEFMNRIDEYIVFQPLDSNEISKIVELQMRRVKNSLEQKKIKLQYTKEAVDLLAQLGFDPNYGARPVKRVIQQMVENEIAVGILKGDFAEEDTVLVDVDHLASDNKLVIKKLESNASAEEMAA

SEQ ID NO: 97360 - protein, 848 aa, Arabidopsis thaliana
  peptide (1)..(848): Ceres Seq. ID no. 12737084
  misc_feature (569)..(805): Pfam Name: ATPase family associated with various cellular Pfam Description: ATPase family associated with various cellular
  misc_feature (1)..(825): Homolog of NCBI NO: 23123825 NR Description: hypothetical protein [Nostoc punctiforme]
  misc_feature (1)..(836): Homolog of NCBI NO: 22298932 NR Description: ClpB protein [Thermosynechococcus elongatus BP-1]
  misc_feature (1)..(837): Homolog of NCBI NO: 23128455 NR Description: hypothetical protein [Nostoc punctiforme]
  misc_feature (1)..(837): Homolog of NCBI NO: 23040907 NR Description: hypothetical protein [Trichodesmium erythraeum
  misc_feature (1)..(825): Homolog of NCBI NO: 17232576 NR Description: endopeptidase Clp ATP-binding chain B [Nostoc sp.
  misc_feature (1)..(837): Homolog of NCBI NO: 1705924 NR Description: CLPB PROTEIN >gi|885934|gb|AAB09631.1| ClpB
  misc_feature (1)..(449): Homolog of NCBI NO: 23612849 NR Description: hypothetical protein [Plasmodium falciparum 3D7]
  misc_feature (394)..(836): Homolog of NCBI NO: 23612849 NR Description: hypothetical protein [Plasmodium falciparum 3D7]
  misc_feature (1)..(824): Homolog of NCBI NO: 23104238 NR Description: hypothetical protein [Azotobacter vinelandii]
  misc_feature (1)..(848): Homolog of NCBI NO: 22957954 NR Description: hypothetical protein [Rhodobacter sphaeroides]
MKALLEQKDGMARKIFTKAGIDNSSVLQATDLFISKQPTVSDASGQRLGSSLSVILENAKRHKKDMLDSYVSVEHFLLAYYSDTRFGQEFFRDMKLDIQVLKDAIKDVRGDQRVTDRNPESKYQALEKYGNDLTEMARRGKLDPVIGRDDEIRRCIQILCRRTKNNPVIIGEPGVGKTAIAEGLAQRIVRGDVPEPLMNRKLISLDMGSLLAGAKFRGDFEERLKAVMKEVSASNGQTILFIDEIHTVVGAGAMDGAMDASNLLKPMLGRGELRCIGATTLTEYRKYIEKDPALERRFQQVLCVQPSVEDTISILRGLRERYELHHGVTISDSALVSAAVLADRYITERFLPDKAIDLVDEAGAKLKMEITSKPTELDGIDRAVIKLEMEKLSLKNDTDKASKERLQKIENDLSTLKQKQKELNVQWEKEKSLMTKIRSFKEEIDRVNLEIESAEREYDLNRAAELKYGTLLSLQRQLEEAEKNLTNFRQFGQSLLREVVTDLDIAEIVSKWTGIPLSNLQQSEREKLVMLEEVLHHRVIGQDMAVKSVADAIRRSRAGLSDPNRPIASFMFMGPTGVGKTELAKALAGYLFNTENAIVRVDMSEYMEKHSVSRLVGAPPGYVGYEEGGQLTEVVRRRPYSVVLFDEIEKAHPDVFNILLQLLDDGRITDSQGRTVSFKNCVVIMTSNIGSHHILETLRNNEDSKEAVYEIMKRQVVELARQNFRPEFMNRIDEYIVFQPLDSNEISKIVELQMRRVKNSLEQKKIKLQYTKEAVDLLAQLGFDPNYGARPVKRVIQQMVENEIAVGILKGDFAEEDTVLVDVDHLASDNKLVIKKLESNASAEEMAA

SEQ ID NO: 97361 - DNA, 1158 bp, Arabidopsis thaliana
  misc_feature (1)..(1158): Ceres Seq. ID no. 12737104
  misc_feature: MA Experiment ID: 20000307 Result: Up-regulated in Transcription
  misc_feature: MA Experiment 20000307 PARAMETER Experiment Name: At_Germinating_Seeds_Sub_P Parameter: Age (hr) Value: 24 vs. 0
  misc_feature: MA Experiment 20000307 PARAMETER Experiment Name: At_Germinating_Seeds_Sub_P Parameter: Organism Value: A. thaliana
  misc_feature: MA Experiment 20000307 PARAMETER Experiment Name: At_Germinating_Seeds_Sub_P Parameter: Plant Line Value: WS
  misc_feature: MA Experiment 20000307 PARAMETER Experiment Name: At_Germinating_Seeds_Sub_P Parameter: Tissue Value: Germinating Seeds
  misc_feature: MA Experiment ID: 20000314 Result: Up-regulated in Transcription
  misc_feature: MA Experiment 20000314 PARAMETER Experiment Name: At_14day_Shoots-Roots_Sub_P Parameter: Age (day) Value: 14
  misc_feature: MA Experiment 20000314 PARAMETER Experiment Name: At_14day_Shoots-Roots_Sub_P Parameter: Organism Value: A. thaliana
  misc_feature: MA Experiment 20000314 PARAMETER Experiment Name: At_14day_Shoots-Roots_Sub_P Parameter: Plant Line Value: WS
  misc_feature: MA Experiment 20000314 PARAMETER Experiment Name: At_14day_Shoots-Roots_Sub_P Parameter: Tissue Value: Roots vs. Whole Plant
atggagttgggaaaatcgattgagaaccataacgacgttgtggtaagactaacgaagcatgtcatcgctaccgtcgccaatggctccaatcttgtcttctcaccgatatcaatcaacgttttgctcagcctcatcgcggcaggttcatgttcagtcaccaaagaacaaatcctctcattcctcatgttaccgtcaacggatcacctcaacctagtcttggctcagatcatcgacggcggcaccgagaaaagtgatttgcgcttgtctatagccaatggtgtttggatagacaagtttttctccttgaagctttcctttaaagaccttttggagaattcttacaaggcaacttgtagtcaagttgacttcgcaagcaagccttctgaagtgattgatgaggtgaatacatgggctgaagtccacaccaatggactcatcaagcagattctttcacgcgattctatcgatactatccgtagcagcacactcgttcttgcaaatgctgtatatttcaaaggagcgtggagcagtaaatttgatgcaaacatgacaaaaaaaaacgattttcatcttcttgatggtacctcggtgaaagtcccctttatgaccaattacgaggaccagtacctaagaagctatgatggtttcaaagttttgcgcctcccttatatagaggatcaacgtcaattctccatgtacatttatctgcctaatgataaagaaggattagctcctctgcttgagaagataggctccgaaccaagtttcttcgataaccatattccgctccactgtatatcagttggtgcttttagaatcccaaagtttaaattctctttcgagtttaatgcttcagaagttctgaaagatatggggctgacttcaccatttaataatggaggtggtttaactgagatggttgattcaccttccaatggtgacgatctatacgtctcaagcattcttcataaagcttgtattgaagtggatgaagagggaaccgaagctgcagccgtctctgttggcgtcgtaagttgcacttcttttaggcggaatcccgatttcgtagctgaccgtccatttctgttcactgtcagagaagacaagagtggagtgattttgttcatgggtcaagttcttgatccttcaaaacattga

SEQ ID NO: 97362 - protein, 385 aa, Arabidopsis thaliana
  peptide (1)..(385): Ceres Seq. ID no. 12737105
  misc_feature (1)..(385): Homolog of NCBI NO: 15224694 NR Description: putative serpin; protein id: At2g25240.1
  misc_feature (1)..(385): Homolog of NCBI NO: 15225297 NR Description: putative serpin; protein id: At2g26390.1
  misc_feature (1)..(385): Homolog of NCBI NO: 15230638 NR Description: serpin-like protein; protein id: At3g45220.1
  misc_feature (1)..(382): Homolog of NCBI NO: 15220298 NR Description: serpin, putative; protein id: At1g47710.1
  misc_feature (5)..(382): Homolog of NCBI NO: 26224736 NR Description: serpin-like protein [Citrus x paradisi]
MELGKSIENHNDVVVRLTKHVIATVANGSNLVFSPISINVLLSLIAAGSCSVTKEQILSFLMLPSTDHLNLVLAQIIDGGTEKSDLRLSIANGVWIDKFFSLKLSFKDLLENSYKATCSQVDFASKPSEVIDEVNTWAEVHTNGLIKQILSRDSIDTIRSSTLVLANAVYFKGAWSSKFDANMTKKNDFHLLDGTSVKVPFMTNYEDQYLRSYDGFKVLRLPYIEDQRQFSMYIYLPNDKEGLAPLLEKIGSEPSFFDNHIPLHCISVGAFRIPKFKFSFEFNASEVLKDMGLTSPFNNGGGLTEMVDSPSNGDDLYVSSILHKACIEVDEEGTEAAAVSVGVVSCTSFRRNPDFVADRPFLFTVREDKSGVILFMGQVLDPSKH

SEQ ID NO: 97363 - protein, 324 aa, Arabidopsis thaliana
  peptide (1)..(324): Ceres Seq. ID no. 12737106
  misc_feature (1)..(324): Homolog of NCBI NO: 15224694 NR Description: putative serpin; protein id: At2g25240.1
  misc_feature (1)..(324): Homolog of NCBI NO: 15225297 NR Description: putative serpin; protein id: At2g26390.1
  misc_feature (1)..(324): Homolog of NCBI NO: 15230638 NR Description: serpin-like protein; protein id: At3g45220.1
  misc_feature (1)..(321): Homolog of NCBI NO: 15220298 NR Description: serpin, putative; protein id: At1g47710.1
  misc_feature (1)..(321): Homolog of NCBI NO: 26224736 NR Description: serpin-like protein [Citrus x paradisi]
MLPSTDHLNLVLAQIIDGGTEKSDLRLSIANGVWIDKFFSLKLSFKDLLENSYKATCSQVDFASKPSEVIDEVNTWAEVHTNGLIKQILSRDSIDTIRSSTLVLANAVYFKGAWSSKFDANMTKKNDFHLLDGTSVKVPFMTNYEDQYLRSYDGFKVLRLPYIEDQRQFSMYIYLPNDKEGLAPLLEKIGSEPSFFDNHIPLHCISVGAFRIPKFKFSFEFNASEVLKDMGLTSPFNNGGGLTEMVDSPSNGDDLYVSSILHKACIEVDEEGTEAAAVSVGVVSCTSFRRNPDFVADRPFLFTVREDKSGVILFMGQVLDPSKH

SEQ ID NO: 97364 - protein, 203 aa, Arabidopsis thaliana
  peptide (1)..(203): Ceres Seq. ID no. 12737107
  misc_feature (1)..(203): Homolog of NCBI NO: 15224694 NR Description: putative serpin; protein id: At2g25240.1
  misc_feature (1)..(203): Homolog of NCBI NO: 15225297 NR Description: putative serpin; protein id: At2g26390.1
  misc_feature (1)..(203): Homolog of NCBI NO: 15230638 NR Description: serpin-like protein; protein id: At3g45220.1
  misc_feature (1)..(200): Homolog of NCBI NO: 15220298 NR Description: serpin, putative; protein id: At1g47710.1
  misc_feature (1)..(200): Homolog of NCBI NO: 26224736 NR Description: serpin-like protein [Citrus x paradisi]
MTKKNDFHLLDGTSVKVPFMTNYEDQYLRSYDGFKVLRLPYIEDQRQFSMYIYLPNDKEGLAPLLEKIGSEPSFFDNHIPLHCISVGAFRIPKFKFSFEFNASEVLKDMGLTSPFNNGGGLTEMVDSPSNGDDLYVSSILHKACIEVDEEGTEAAAVSVGVVSCTSFRRNPDFVADRPFLFTVREDKSGVILFMGQVLDPSKH

SEQ ID NO: 97365 - DNA, 660 bp, Arabidopsis thaliana
  misc_feature (1)..(660): Ceres Seq. ID no. 12737110
  misc_feature: MA Experiment ID: 20000329 Result: Down-regulated in Transcription
  misc_feature: MA Experiment 20000329 PARAMETER Experiment Name: At_4deg_Cold_Sub_P Parameter: Age (day) Value: 14
  misc_feature: MA Experiment 20000329 PARAMETER Experiment Name: At_4deg_Cold_Sub_P Parameter: Organism Value: A. thaliana
  misc_feature: MA Experiment 20000329 PARAMETER Experiment Name: At_4deg_Cold_Sub_P Parameter: Plant Line Value: WS
  misc_feature: MA Experiment 20000329 PARAMETER Experiment Name: At_4deg_Cold_Sub_P Parameter: Temperature (deg C) Value: 4 vs. 22
  misc_feature: MA Experiment 20000329 PARAMETER Experiment Name: At_4deg_Cold_Sub_P Parameter: Timepoint (hr) Value: 6
  misc_feature: MA Experiment 20000329 PARAMETER Experiment Name: At_4deg_Cold_Sub_P Parameter: Tissue Value: Aerial
  misc_feature: MA Experiment ID: 20000355 Result: Down-regulated in Transcription
  misc_feature: MA Experiment 20000355 PARAMETER Experiment Name: At_Siliques_Sub_P Parameter: Age (day) Value: 21
  misc_feature: MA Experiment 20000355 PARAMETER Experiment Name: At_Siliques_Sub_P Parameter: Organism Value: A. thaliana
  misc_feature: MA Experiment 20000355 PARAMETER Experiment Name: At_Siliques_Sub_P Parameter: Plant Line Value: WS
  misc_feature: MA Experiment 20000355 PARAMETER Experiment Name: At_Siliques_Sub_P Parameter: Tissue Value: Less Than 5mm Siliques vs. Whole Plant
  misc_feature: MA Experiment ID: 20000440 Result: Down-regulated in Transcription
  misc_feature: MA Experiment 20000440 PARAMETER Experiment Name: At_Closed-Flower__Sub_P Parameter: Tissue Value: Closed Flower vs. Whole Plant
atgtcgatattatacgcgttggtggcgcgtggaacggtggttcttgcggagttaagcactacgtccacgaacgctagcacgatcgcgaagcagatccttgagaagatccctggtaacggcgacagccacgtgtcatactctcaggatcgttacgtcttccacgtaaaacgtactgatggcctcaccgttctttgtatggctgatgaagacgccggaaggaggattccattttcgtttctagaggatattcatcagaggtttgttcggacttatggccgcgcaattcattcggcacaagcttatgctatgaatgatgagttctcaagagttcttaaccaacaaattgagtattactctaatgatcctaatgccgatacgataagtcgaattaagggtgaaatgaatcaggtgagggatgttatgatagagaacattgacaacattcttgatagaggtgaacgtcttgagcttcttgtcgataaaaccgcgaacatgcaagggaataccttccgattcagaaagcaaacacgtcgtttcaacaacacggtgtggtggagaaattgcaagctcacgctactcttaatactagtgttgttggtgatcatatacatcggtgtggcctttgcttgccatggaccaactctaccctcttgcgtttaa

SEQ ID NO: 97366 - protein, 219 aa, Arabidopsis thaliana
  peptide (1)..(219): Ceres Seq. ID no. 12737111
  misc_feature (123)..(211): Pfam Name: Synaptobrevin Pfam Description: Synaptobrevin
  misc_feature (1)..(219): Homolog of NCBI NO: 15224711 NR Description: putative synaptobrevin; protein id: At2g25340.1
  misc_feature (1)..(219): Homolog of NCBI NO: 15236687 NR Description: synaptobrevin-like protein; protein id: supported by cDNA: 41543., supported by cDNA: gi_16612291
  misc_feature (1)..(218): Homolog of NCBI NO: 15238971 NR Description: putative protein; protein id: At5g11150.1, by cDNA: gi_20259406 [Arabidopsis thaliana]
  misc_feature (1)..(219): Homolog of NCBI NO: 34898442 NR Description: ESTs AU082579(S2069),D40238(S2069) correspond to
  misc_feature (1)..(218): Homolog of NCBI NO: 15242224 NR Description: synaptobrevin-like protein; protein id:
  misc_feature (1)..(218): Homolog of NCBI NO: 37531190 NR Description: putative synaptobrevin-like protein [Oryza sativa
  misc_feature (1)..(212): Homolog of NCBI NO: 28828593 NR Description: similar to Arabidopsis thaliana (Mouse-ear cress).
  misc_feature (1)..(219): Homolog of NCBI NO: 19921940 NR Description: CG1599-PA [Drosophila melanogaster]
  misc_feature (1)..(137): Homolog of NCBI NO: 16323190 NR Description: AT5g22360/MWD9_16 [Arabidopsis thaliana]
  misc_feature (1)..(219): Homolog of NCBI NO: 33468929 NR Description: synaptobrevin like 1 [Mus musculus]
MSILYALVARGTVVLAELSTTSTNASTIAKQILEKIPGNGDSHVSYSQDRYVFHVKRTDGLTVLCMADEDAGRRIPFSFLEDIHQRFVRTYGRAIHSAQAYAMNDEFSRVLNQQIEYYSNDPNADTISRIKGEMNQVRDVMIENIDNILDRGERLELLVDKTANMQGNTFRFRKQTRRFNNTVWWRNCKLTLLLILVLLVIIYIGVAFACHGPTLPSCV

SEQ ID NO: 97367 - protein, 154 aa, Arabidopsis thaliana
  peptide (1)..(154): Ceres Seq. ID no. 12737112
  misc_feature (58)..(146): Pfam Name: Synaptobrevin Pfam Description: Synaptobrevin
  misc_feature (1)..(154): Homolog of NCBI NO: 15224711 NR Description: putative synaptobrevin; protein id: At2g25340.1
  misc_feature (1)..(154): Homolog of NCBI NO: 15236687 NR Description: synaptobrevin-like protein; protein id: supported by cDNA: 41543., supported by cDNA: gi_16612291
  misc_feature (1)..(153): Homolog of NCBI NO: 15238971 NR Description: putative protein; protein id: At5g11150.1, by cDNA: gi_20259406 [Arabidopsis thaliana]
  misc_feature (1)..(154): Homolog of NCBI NO: 34898442 NR Description: ESTs AU082579(S2069),D40238(S2069) correspond to
  misc_feature (1)..(153): Homolog of NCBI NO: 15242224 NR Description: synaptobrevin-like protein; protein id:
  misc_feature (1)..(153): Homolog of NCBI NO: 37531190 NR Description: putative synaptobrevin-like protein [Oryza sativa
  misc_feature (1)..(147): Homolog of NCBI NO: 28828593 NR Description: similar to Arabidopsis thaliana (Mouse-ear cress).
  misc_feature (1)..(154): Homolog of NCBI NO: 19921940 NR Description: CG1599-PA [Drosophila melanogaster]
  misc_feature (1)..(72): Homolog of NCBI NO: 16323190 NR Description: AT5g22360/MWD9_16 [Arabidopsis thaliana]
  misc_feature (1)..(154): Homolog of NCBI NO: 33468929 NR Description: synaptobrevin like 1 [Mus musculus]
MADEDAGRRIPFSFLEDIHQRFVRTYGRAIHSAQAYAMNDEFSRVLNQQIEYYSNDPNADTISRIKGEMNQVRDVMIENIDNILDRGERLELLVDKTANMQGNTFRFRKQTRRFNNTVWWRNCKLTLLLILVLLVIIYIGVAFACHGPTLPSCV

SEQ ID NO: 97368 - protein, 117 aa, Arabidopsis thaliana
  peptide (1)..(117): Ceres Seq. ID no. 12737113
  misc_feature (21)..(109): Pfam Name: Synaptobrevin Pfam Description: Synaptobrevin
  misc_feature (1)..(117): Homolog of NCBI NO: 15224711 NR Description: putative synaptobrevin; protein id: At2g25340.1
  misc_feature (1)..(117): Homolog of NCBI NO: 15236687 NR Description: synaptobrevin-like protein; protein id: supported by cDNA: 41543., supported by cDNA: gi_16612291
  misc_feature (1)..(116): Homolog of NCBI NO: 15238971 NR Description: putative protein; protein id: At5g11150.1, by cDNA: gi_20259406 [Arabidopsis thaliana]
  misc_feature (1)..(117): Homolog of NCBI NO: 34898442 NR Description: ESTs AU082579(S2069),D40238(S2069) correspond to
  misc_feature (1)..(116): Homolog of NCBI NO: 15242224 NR Description: synaptobrevin-like protein; protein id:
  misc_feature (1)..(116): Homolog of NCBI NO: 37531190 NR Description: putative synaptobrevin-like protein [Oryza sativa
  misc_feature (1)..(110): Homolog of NCBI NO: 28828593 NR Description: similar to Arabidopsis thaliana (Mouse-ear cress).
  misc_feature (1)..(117): Homolog of NCBI NO: 19921940 NR Description: CG1599-PA [Drosophila melanogaster]
  misc_feature (1)..(35): Homolog of NCBI NO: 16323190 NR Description: AT5g22360/MWD9_16 [Arabidopsis thaliana]
  misc_feature (1)..(117): Homolog of NCBI NO: 33468929 NR Description: synaptobrevin like 1 [Mus musculus]
MNDEFSRVLNQQIEYYSNDPNADTISRIKGEMNQVRDVMIENIDNILDRGERLELLVDKTANMQGNTFRFRKQTRRFNNTVWWRNCKLTLLLILVLLVIIYIGVAFACHGPTLPSCV

SEQ ID NO: 97369 - DNA, 576 bp, Arabidopsis thaliana
  misc_feature (1)..(576): Ceres Seq. ID no. 12737153
  misc_feature: MA Experiment ID: 20000179 Result: Up-regulated in Transcription
  misc_feature: MA Experiment 20000179 PARAMETER Experiment Name: At_Germinating_Seeds_P Parameter: Age (hr) Value: 6 vs. 0
  misc_feature: MA Experiment 20000179 PARAMETER Experiment Name: At_Germinating_Seeds_P Parameter: Tissue Value: Germinating Seeds
  misc_feature: MA Experiment ID: 20000180 Result: Up-regulated in Transcription
  misc_feature: MA Experiment 20000180 PARAMETER Experiment Name: At_Germinating_Seeds_P Parameter: Age (hr) Value: 24 vs. 0
  misc_feature: MA Experiment 20000180 PARAMETER Experiment Name: At_Germinating_Seeds_P Parameter: Tissue Value: Germinating Seeds
  misc_feature: MA Experiment ID: 20000227 Result: Down-regulated in Transcription
  misc_feature: MA Experiment 20000227 PARAMETER Experiment Name: At_Root-Tips-vs-Tops_P Parameter: Tissue Value: Root Tips vs. Root Tops
  misc_feature: MA Experiment ID: 20000439 Result: Down-regulated in Transcription
  misc_feature: MA Experiment 20000439 PARAMETER Experiment Name: At_Roots__P Parameter: Age (day) Value: 14 vs. 21
  misc_feature: MA Experiment 20000439 PARAMETER Experiment Name: At_Roots__P Parameter: Organism Value: A. thaliana
  misc_feature: MA Experiment 20000439 PARAMETER Experiment Name: At_Roots__P Parameter: Tissue Value: Roots vs. Whole Plant
  misc_feature: MA Experiment ID: 20000496 Result: Down-regulated in Transcription
  misc_feature: MA Experiment 20000496 PARAMETER Experiment Name: At_Guard_Cells_P Parameter: Harvest Date Value: 7/19/2002
  misc_feature: MA Experiment 20000496 PARAMETER Experiment Name: At_Guard_Cells_P Parameter: Organism Value: Canola
  misc_feature: MA Experiment 20000496 PARAMETER Experiment Name: At_Guard_Cells_P Parameter: Tissue Value: Guard Cells vs. Leaves
  misc_feature: MA Experiment ID: 20001248 Result: Down-regulated in Transcription
  misc_feature: MA Experiment 20001248 PARAMETER Experiment Name: At_Far-red-induction_P Parameter: Age (day) Value: 7
  misc_feature: MA Experiment 20001248 PARAMETER Experiment Name: At_Far-red-induction_P Parameter: Light Value: Far-red vs. White
  misc_feature: MA Experiment 20001248 PARAMETER Experiment Name: At_Far-red-induction_P Parameter: Organism Value: A. thaliana
  misc_feature: MA Experiment 20001248 PARAMETER Experiment Name: At_Far-red-induction_P Parameter: Plant Line Value: Columbia
  misc_feature: MA Experiment 20001248 PARAMETER Experiment Name: At_Far-red-induction_P Parameter: Timepoint (hr) Value: 4
  misc_feature: MA Experiment 20001248 PARAMETER Experiment Name: At_Far-red-induction_P Parameter: Tissue Value: Whole Plant
  misc_feature: MA Experiment ID: 20001557 Result: Down-regulated in Transcription
  misc_feature: MA Experiment 20001557 PARAMETER Experiment Name: At_Drought_Soil_Dry_P Parameter: Age (day) Value: 27
  misc_feature: MA Experiment 20001557 PARAMETER Experiment Name: At_Drought_Soil_Dry_P Parameter: Organism Value: A. thaliana
  misc_feature: MA Experiment 20001557 PARAMETER Experiment Name: At_Drought_Soil_Dry_P Parameter: Plant Line Value: WS
  misc_feature: MA Experiment 20001557 PARAMETER Experiment Name: At_Drought_Soil_Dry_P Parameter: Post Timepoint (hr) Value: 3
  misc_feature: MA Experiment 20001557 PARAMETER Experiment Name: At_Drought_Soil_Dry_P Parameter: Post-Treatment Value: Re-Water vs. No Drought
  misc_feature: MA Experiment 20001557 PARAMETER Experiment Name: At_Drought_Soil_Dry_P Parameter: Timepoint (day) Value: 13
  misc_feature: MA Experiment 20001557 PARAMETER Experiment Name: At_Drought_Soil_Dry_P Parameter: Treatment Value: Drought vs. No Drought
  misc_feature: MA Experiment ID: 20001558 Result: Down-regulated in Transcription
  misc_feature: MA Experiment 20001558 PARAMETER Experiment Name: At_Drought_Soil_Dry_P Parameter: Age (day) Value: 27
  misc_feature: MA Experiment 20001558 PARAMETER Experiment Name: At_Drought_Soil_Dry_P Parameter: Organism Value: A. thaliana
  misc_feature: MA Experiment 20001558 PARAMETER Experiment Name: At_Drought_Soil_Dry_P Parameter: Plant Line Value: WS
  misc_feature: MA Experiment 20001558 PARAMETER Experiment Name: At_Drought_Soil_Dry_P Parameter: Post Timepoint (hr) Value: 6
  misc_feature: MA Experiment 20001558 PARAMETER Experiment Name: At_Drought_Soil_Dry_P Parameter: Post-Treatment Value: Re-Water vs. No Drought
  misc_feature: MA Experiment 20001558 PARAMETER Experiment Name: At_Drought_Soil_Dry_P Parameter: Timepoint (day) Value: 13
  misc_feature: MA Experiment 20001558 PARAMETER Experiment Name: At_Drought_Soil_Dry_P Parameter: Treatment Value: Drought vs. No Drought
atgtcgtttgggtctctcgtgcttccatctccaccttcctccttgtctgcaaatgtcaagcatttcaatggctacggtaggcttaatcgtaatctcgtgcgagcttcttcgtccgatgttcccgatttcctctctgccgattggttggagagccgtaggaaacgaccttttggccccagacttgattttagtgcagaagacgctgttcgacatcagcttgatgcattgaagtataatgaccatcctcgtgatgattatggcattgaggtcatgtatcggtttgaaaggtttaggcgtatttttcatcactcgtcttaccgtgtgttgcttggtcacaaggatagaaaacttttaagcagtttgttcgtggaggagagctcccctcatgatatcctctttttcgatatgcagaatcgtttcaagcagaggatctggattcagggaaatcgacctgaagaggaagagatatttgaattcacaatgttccagcgaataggcggttcatgggatggatattggttgacagaaagcttgcttcatgacggagatgtgttttcaggagggatggcttactga

SEQ ID NO: 97370 - protein, 191 aa, Arabidopsis thaliana
  peptide (1)..(191): Ceres Seq. ID no. 12737154
  misc_feature (1)..(191): Homolog of NCBI NO: 30682820 NR Description: expressed protein [Arabidopsis thaliana]
MSFGSLVLPSPPSSLSANVKHFNGYGRLNRNLVRASSSDVPDFLSADWLESRRKRPFGPRLDFSAEDAVRHQLDALKYNDHPRDDYGIEVMYRFERFRRIFHHSSYRVLLGHKDRKLLSSLFVEESSPHDILFFDMQNRFKQRIWIQGNRPEEEEIFEFTMFQRIGGSWDGYWLTESLLHDGDVFSGGMAY

SEQ ID NO: 97371 - protein, 101 aa, Arabidopsis thaliana
  peptide (1)..(101): Ceres Seq. ID no. 12737155
  misc_feature (1)..(101): Homolog of NCBI NO: 30682820 NR Description: expressed protein [Arabidopsis thaliana]
MYRFERFRRIFHHSSYRVLLGHKDRKLLSSLFVEESSPHDILFFDMQNRFKQRIWIQGNRPEEEEIFEFTMFQRIGGSWDGYWLTESLLHDGDVFSGGMAY

SEQ ID NO: 97372 - DNA, 750 bp, Arabidopsis thaliana
  misc_feature (1)..(750): Ceres Seq. ID no. 12737181
  misc_feature: MA Experiment ID: 20000180 Result: Up-regulated in Transcription
  misc_feature: MA Experiment 20000180 PARAMETER Experiment Name: At_Germinating_Seeds_P Parameter: Age (hr) Value: 24 vs. 0
  misc_feature: MA Experiment 20000180 PARAMETER Experiment Name: At_Germinating_Seeds_P Parameter: Tissue Value: Germinating Seeds
  misc_feature: MA Experiment ID: 20000184 Result: Up-regulated in Transcription
  misc_feature: MA Experiment 20000184 PARAMETER Experiment Name: At_Shoots__P Parameter: Age (day) Value: 7
  misc_feature: MA Experiment 20000184 PARAMETER Experiment Name: At_Shoots__P Parameter: Tissue Value: Shoots vs. Whole Plant
  misc_feature: MA Experiment ID: 20000185 Result: Up-regulated in Transcription
  misc_feature: MA Experiment 20000185 PARAMETER Experiment Name: At_Roots__P Parameter: Age (day) Value: 7 vs. 21
  misc_feature: MA Experiment 20000185 PARAMETER Experiment Name: At_Roots__P Parameter: Organism Value: A. thaliana
  misc_feature: MA Experiment 20000185 PARAMETER Experiment Name: At_Roots__P Parameter: Tissue Value: Roots vs. Whole Plant
  misc_feature: MA Experiment ID: 20000439 Result: Up-regulated in Transcription
  misc_feature: MA Experiment 20000439 PARAMETER Experiment Name: At_Roots__P Parameter: Age (day) Value: 14 vs. 21
  misc_feature: MA Experiment 20000439 PARAMETER Experiment Name: At_Roots__P Parameter: Organism Value: A. thaliana
  misc_feature: MA Experiment 20000439 PARAMETER Experiment Name: At_Roots__P Parameter: Tissue Value: Roots vs. Whole Plant
atgaagaagatcgagttagggcaccatagcgaagcggctaaaccggactgcattaaagccctcattgtcgaattcatcactacctttctctttgtcttcgctggtgttggatctgccatggccactgacagtttagtcggaaacacattggtgggacttttcgcggtcgcggtggctcatgcattcgttgtggcggtaatgatatctgcgggccatatctccggtggccacctcaaccccgccgtcaccctcggtctactcttgggtggccacatcagcgtattccgtgcattcctttattggattgatcaattgttggcctcctccgcagcatgcttcctcctcagttacctcaccggaggaatgggaactccggttcacacattggcaagtggagtgagttacacgcaagggatcatatgggagatcatcttaacattttcacttctcttcactgtctacgccactattgtggatccgaagaaaggatcccttgatgggttcggcccacttctcacaggatttgtcgttggagccaacatccttgcaggaggtgccttttctggcgcctccatgaaccccgcccggtcttttggtcccgctttggtctctggaaactggactgaccattgggtatattgggttggaccgttgatcggtggtggactcgccggtttcatctacgagaatgtcctcattgaccgtccacatgtcccagtcgctgacgacgagcaaccattgttgaattaa

SEQ ID NO: 97373 - protein, 249 aa, Arabidopsis thaliana
  peptide (1)..(249): Ceres Seq. ID no. 12737182
  misc_feature (11)..(228): Pfam Name: Major intrinsic protein Pfam Description: Major intrinsic protein
  misc_feature (1)..(249): Homolog of NCBI NO: 15225195 NR Description: putative aquaporin (tonoplast intrinsic protein); id: At2g25810.1 [Arabidopsis thaliana] >gi|25324921|pir||A84653
  misc_feature (1)..(244): Homolog of NCBI NO: 4584429 NR Description: aquaglyceroporin; tonoplast intrinsic protein
  misc_feature (1)..(244): Homolog of NCBI NO: 13447835 NR Description: tonoplast membrane integral protein ZmTIP4-4 [Zea
  misc_feature (1)..(240): Homolog of NCBI NO: 34904332 NR Description: unnamed protein product [Oryza sativa (japonica group)] >gi|7340919|dbj|BAA92991.1| unnamed protein product
  misc_feature (2)..(244): Homolog of NCBI NO: 13447829 NR Description: tonoplast membrane integral protein ZmTIP4-1 [Zea
  misc_feature (1)..(229): Homolog of NCBI NO: 13447833 NR Description: tonoplast membrane integral protein ZmTIP4-3 [Zea
  misc_feature (1)..(242): Homolog of NCBI NO: 1729971 NR Description: TONOPLAST INTRINSIC PROTEIN, GAMMA (GAMMA TIP)
  misc_feature (1)..(243): Homolog of NCBI NO: 11276919 NR Description: water channel protein MipK [imported] - common plant >gi|4884868|gb|AAD31848.1|AF133532_1 water channel protein
  misc_feature (1)..(242): Homolog of NCBI NO: 21284370 NR Description: tonoplast intrinsic protein bobTIP26-1 [Brassica
  misc_feature (1)..(244): Homolog of NCBI NO: 126959 NR Description: Tonoplast intrinsic protein, root-specific RB7-5A
MKKIELGHHSEAAKPDCIKALIVEFITTFLFVFAGVGSAMATDSLVGNTLVGLFAVAVAHAFVVAVMISAGHISGGHLNPAVTLGLLLGGHISVFRAFLYWIDQLLASSAACFLLSYLTGGMGTPVHTLASGVSYTQGIIWEIILTFSLLFTVYATIVDPKKGSLDGFGPLLTGFVVGANILAGGAFSGASMNPARSFGPALVSGNWTDHWVYWVGPLIGGGLAGFIYENVLIDRPHVPVADDEQPLLN

SEQ ID NO: 97374 - protein, 210 aa, Arabidopsis thaliana
  peptide (1)..(210): Ceres Seq. ID no. 12737183
  misc_feature (1)..(189): Pfam Name: Major intrinsic protein Pfam Description: Major intrinsic protein
  misc_feature (1)..(210): Homolog of NCBI NO: 15225195 NR Description: putative aquaporin (tonoplast intrinsic protein); id: At2g25810.1 [Arabidopsis thaliana] >gi|25324921|pir||A84653
  misc_feature (1)..(205): Homolog of NCBI NO: 4584429 NR Description: aquaglyceroporin; tonoplast intrinsic protein
  misc_feature (1)..(205): Homolog of NCBI NO: 13447835 NR Description: tonoplast membrane integral protein ZmTIP4-4 [Zea
  misc_feature (1)..(201): Homolog of NCBI NO: 34904332 NR Description: unnamed protein product [Oryza sativa (japonica group)] >gi|7340919|dbj|BAA92991.1| unnamed protein product
  misc_feature (1)..(205): Homolog of NCBI NO: 13447829 NR Description: tonoplast membrane integral protein ZmTIP4-1 [Zea
  misc_feature (1)..(190): Homolog of NCBI NO: 13447833 NR Description: tonoplast membrane integral protein ZmTIP4-3 [Zea
  misc_feature (1)..(203): Homolog of NCBI NO: 1729971 NR Description: TONOPLAST INTRINSIC PROTEIN, GAMMA (GAMMA TIP)
  misc_feature (1)..(204): Homolog of NCBI NO: 11276919 NR Description: water channel protein MipK [imported] - common plant >gi|4884868|gb|AAD31848.1|AF133532_1 water channel protein
  misc_feature (1)..(203): Homolog of NCBI NO: 21284370 NR Description: tonoplast intrinsic protein bobTIP26-1 [Brassica
  misc_feature (1)..(205): Homolog of NCBI NO: 126959 NR Description: Tonoplast intrinsic protein, root-specific RB7-5A
MATDSLVGNTLVGLFAVAVAHAFVVAVMISAGHISGGHLNPAVTLGLLLGGHISVFRAFLYWIDQLLASSAACFLLSYLTGGMGTPVHTLASGVSYTQGIIWEIILTFSLLFTVYATIVDPKKGSLDGFGPLLTGFVVGANILAGGAFSGASMNPARSFGPALVSGNWTDHWVYWVGPLIGGGLAGFIYENVLIDRPHVPVADDEQPLLN

SEQ ID NO: 97375 - protein, 183 aa, Arabidopsis thaliana
  peptide (1)..(183): Ceres Seq. ID no. 12737184
  misc_feature (1)..(162): Pfam Name: Major intrinsic protein Pfam Description: Major intrinsic protein
  misc_feature (1)..(183): Homolog of NCBI NO: 15225195 NR Description: putative aquaporin (tonoplast intrinsic protein); id: At2g25810.1 [Arabidopsis thaliana] >gi|25324921|pir||A84653
  misc_feature (1)..(178): Homolog of NCBI NO: 4584429 NR Description: aquaglyceroporin; tonoplast intrinsic protein
  misc_feature (1)..(178): Homolog of NCBI NO: 13447835 NR Description: tonoplast membrane integral protein ZmTIP4-4 [Zea
  misc_feature (1)..(174): Homolog of NCBI NO: 34904332 NR Description: unnamed protein product [Oryza sativa (japonica group)] >gi|7340919|dbj|BAA92991.1| unnamed protein product
  misc_feature (1)..(178): Homolog of NCBI NO: 13447829 NR Description: tonoplast membrane integral protein ZmTIP4-1 [Zea
  misc_feature (1)..(163): Homolog of NCBI NO: 13447833 NR Description: tonoplast membrane integral protein ZmTIP4-3 [Zea
  misc_feature (1)..(176): Homolog of NCBI NO: 1729971 NR Description: TONOPLAST INTRINSIC PROTEIN, GAMMA (GAMMA TIP)
  misc_feature (1)..(177): Homolog of NCBI NO: 11276919 NR Description: water channel protein MipK [imported] - common plant >gi|4884868|gb|AAD31848.1|AF133532_1 water channel protein
  misc_feature (1)..(176): Homolog of NCBI NO: 21284370 NR Description: tonoplast intrinsic protein bobTIP26-1 [Brassica
  misc_feature (1)..(178): Homolog of NCBI NO: 126959 NR Description: Tonoplast intrinsic protein, root-specific RB7-5A
MISAGHISGGHLNPAVTLGLLLGGHISVFRAFLYWIDQLLASSAACFLLSYLTGGMGTPVHTLASGVSYTQGIIWEIILTFSLLFTVYATIVDPKKGSLDGFGPLLTGFVVGANILAGGAFSGASMNPARSFGPALVSGNWTDHWVYWVGPLIGGGLAGFIYENVLIDRPHVPVADDEQPLLN

SEQ ID NO: 97376 - DNA, 1616 bp, Arabidopsis thaliana
  misc_feature (1)..(1616): Ceres Seq. ID no. 12737192
  misc_feature: MA Experiment ID: 20000180 Result: Up-regulated in Transcription
  misc_feature: MA Experiment 20000180 PARAMETER Experiment Name: At_Germinating_Seeds_P Parameter: Age (hr) Value: 24 vs. 0
  misc_feature: MA Experiment 20000180 PARAMETER Experiment Name: At_Germinating_Seeds_P Parameter: Tissue Value: Germinating Seeds
  misc_feature: MA Experiment ID: 20000185 Result: Up-regulated in Transcription
  misc_feature: MA Experiment 20000185 PARAMETER Experiment Name: At_Roots__P Parameter: Age (day) Value: 7 vs. 21
  misc_feature: MA Experiment 20000185 PARAMETER Experiment Name: At_Roots__P Parameter: Organism Value: A. thaliana
  misc_feature: MA Experiment 20000185 PARAMETER Experiment Name: At_Roots__P Parameter: Tissue Value: Roots vs. Whole Plant
  misc_feature: MA Experiment ID: 20000436 Result: Up-regulated in Transcription
  misc_feature: MA Experiment 20000436 PARAMETER Experiment Name: At_Drought_P Parameter: Age (day) Value: 7
  misc_feature: MA Experiment 20000436 PARAMETER Experiment Name: At_Drought_P Parameter: Organism Value: A. thaliana
  misc_feature: MA Experiment 20000436 PARAMETER Experiment Name: At_Drought_P Parameter: Plant Line Value: WS
  misc_feature: MA Experiment 20000436 PARAMETER Experiment Name: At_Drought_P Parameter: Timepoint (hr) Value: 12
  misc_feature: MA Experiment 20000436 PARAMETER Experiment Name: At_Drought_P Parameter: Tissue Value: Whole Plant
  misc_feature: MA Experiment 20000436 PARAMETER Experiment Name: At_Drought_P Parameter: Treatment Value: Drought vs. No Drought
  misc_feature: MA Experiment ID: 20000439 Result: Up-regulated in Transcription
  misc_feature: MA Experiment 20000439 PARAMETER Experiment Name: At_Roots__P Parameter: Age (day) Value: 14 vs. 21
  misc_feature: MA Experiment 20000439 PARAMETER Experiment Name: At_Roots__P Parameter: Organism Value: A. thaliana
  misc_feature: MA Experiment 20000439 PARAMETER Experiment Name: At_Roots__P Parameter: Tissue Value: Roots vs. Whole Plant
  misc_feature: MA Experiment ID: 20000794 Result: Up-regulated in Transcription
  misc_feature: MA Experiment 20000794 PARAMETER Experiment Name: At_Petals_P Parameter: Age (day) Value: 23-25 days
  misc_feature: MA Experiment 20000794 PARAMETER Experiment Name: At_Petals_P Parameter: Plant Line Value: WS
  misc_feature: MA Experiment 20000794 PARAMETER Experiment Name: At_Petals_P Parameter: Tissue Value: Petals vs. Whole plant
  misc_feature: MA Experiment ID: 20001904 Result: Up-regulated in Transcription
  misc_feature: MA Experiment 20001904 PARAMETER Experiment Name: At_Drought_Reproduction_P Parameter: Age (day) Value: 37
  misc_feature: MA Experiment 20001904 PARAMETER Experiment Name: At_Drought_Reproduction_P Parameter: Organism Value: A. thaliana
  misc_feature: MA Experiment 20001904 PARAMETER Experiment Name: At_Drought_Reproduction_P Parameter: Plant Line Value: WS
  misc_feature: MA Experiment 20001904 PARAMETER Experiment Name: At_Drought_Reproduction_P Parameter: Timepoint (day) Value: 7
  misc_feature: MA Experiment 20001904 PARAMETER Experiment Name: At_Drought_Reproduction_P Parameter: Tissue Value: Rosettes
  misc_feature: MA Experiment 20001904 PARAMETER Experiment Name: At_Drought_Reproduction_P Parameter: Treatment Value: Drought vs. No Drought
  misc_feature: MA Experiment ID: 20001906 Result: Up-regulated in Transcription
  misc_feature: MA Experiment 20001906 PARAMETER Experiment Name: At_Drought_Reproduction_P Parameter: Age (day) Value: 35
  misc_feature: MA Experiment 20001906 PARAMETER Experiment Name: At_Drought_Reproduction_P Parameter: Organism Value: A. thaliana
  misc_feature: MA Experiment 20001906 PARAMETER Experiment Name: At_Drought_Reproduction_P Parameter: Plant Line Value: WS
  misc_feature: MA Experiment 20001906 PARAMETER Experiment Name: At_Drought_Reproduction_P Parameter: Timepoint (day) Value: 5
  misc_feature: MA Experiment 20001906 PARAMETER Experiment Name: At_Drought_Reproduction_P Parameter: Tissue Value: Siliques
  misc_feature: MA Experiment 20001906 PARAMETER Experiment Name: At_Drought_Reproduction_P Parameter: Treatment Value: Drought vs. No Drought
acctaacaatgaccaccgtcgtttcctttctcgccctcttcctctttctagtcgccgccgtttctggtgacgtcatcaaacttccttctctagcttctaagttcttccgcccaactgaaaacgacgatgattctactaagtgggctgttctcgtcgccggatccagcggatactggaattatcgtcatcaggcggatgtttgtcatgcttatcagcttttgaagaaaggtggagtgaaagaggagaatattgtggtgtttatgtatgatgacattgcgaagaacgaggagaatccaagacctggagttattatcaatagtcctaatggagaggatgtctataatggagttcccaaggattacactggagatgaagttaatgttgataacttattagctgtgattcttggaaacaaaacggctcttaaaggaggaagtgggaaagttgtagatagcggtccaaacgatcatatctttatatactatagtgatcacggtggtccgggagtgctcgggatgccaacttctccaaacctatatgcaaatgatctcaatgatgtcttgaagaaaaaatatgcttcaggaacatataagagcttggtgttttatttggaggcttgtgaatctggaagtatttttgaaggtcttttaccagagggtttaaatatttacgcgacaactgcatcgaatgcagaagaaagtagctggggtacttactgtcctggagaggatcctagtcctccttctgagtatgagacctgtttgggtgacttatacagtgttgcttggatagaagatagtgaaaaacacaatttacaaacagagactttgcacgagcaatatgaattggtgaaaaagagaactgcaggttctggtaagtcttatggttctcatgttatggaatttggagatataggactcagcaaggagaagcttgtcctttttatgggtacaaatccagcagatgaaaacttcacctttgtgaatgagaattcaataaggccgccttcaagagttacaaaccagcgtgatgcggatcttgtccatttctggcataagtatcaaaaggcaccggaagggtcagcaagaaaagttgaagctcagaagcaagtccttgaagcaatgtctcacagacttcatgttgataatagcattctgttgattgggattcttttgtttggtttggaaggtcatgcggtgttaaataaagtccggccttctggagaaccgcttgttgacgattgggactgccttaaatctctggtgagagctttcgagaggcactgtggatcgttgtctcagtacggaataaagcacatgaggtcgattgcaaacatgtgcaacgcagggattcagatgaggcaaatggaggaggcagcaatgcaggcttgtcccaccatccctaccagtccttggagctctcttgaccgtggattcagtgcttgatcttcgtctccgccctatattaatcgatgtccattaatatcttactaccaattatactccttcctatgtagacaagatgttgtaaatatgggatgcttaagttcttgatgtcacagacaaaagaaacagtgattgtaagtagttgtttcaaataatctttgttgttcaagt

SEQ ID NO: 97377 - protein, 480 aa, Arabidopsis thaliana
  peptide (1)..(480): Ceres Seq. ID no. 12737193
  misc_feature (7)..(362): Pfam Name: Peptidase C13 family Pfam Description: Peptidase C13 family
  misc_feature (3)..(480): Homolog of NCBI NO: 15225226 NR Description: putative vacuolar processing enzyme; protein id: supported by cDNA: gi_16604313, supported by cDNA: gi_19699181 thaliana] >gi|14917086|sp|P49047|VPEA_ARATH Vacuolar isozyme
  misc_feature (2)..(480): Homolog of NCBI NO: 15233996 NR Description: gamma-VPE (vacuolar processing enzyme); protein At4g32940.1, supported by cDNA: gi_13877794, supported by cDNA:
  misc_feature (3)..(480): Homolog of NCBI NO: 14916737 NR Description: Vacuolar processing enzyme, gamma-isozyme
  misc_feature (10)..(480): Homolog of NCBI NO: 27544008 NR Description: vacuolar processing enzyme-1b [Nicotiana tabacum]
  misc_feature (6)..(480): Homolog of NCBI NO: 4589396 NR Description: asparaginyl endopeptidase (VmPE-1) [Vigna mungo]
  misc_feature (10)..(480): Homolog of NCBI NO: 27544006 NR Description: vacuolar processing enzyme-1a [Nicotiana tabacum]
  misc_feature (20)..(480): Homolog of NCBI NO: 1351408 NR Description: Vacuolar processing enzyme precursor (VPE)
  misc_feature (7)..(480): Homolog of NCBI NO: 27544012 NR Description: vacuolar processing enzyme-3 [Nicotiana tabacum]
  misc_feature (1)..(480): Homolog of NCBI NO: 1351411 NR Description: Vacuolar processing enzyme precursor (VPE)
  misc_feature (4)..(480): Homolog of NCBI NO: 7739789 NR Description: cysteine protease [Ipomoea batatas]
LTMTTVVSFLALFLFLVAAVSGDVIKLPSLASKFFRPTENDDDSTKWAVLVAGSSGYWNYRHQADVCHAYQLLKKGGVKEENIVVFMYDDIAKNEENPRPGVIINSPNGEDVYNGVPKDYTGDEVNVDNLLAVILGNKTALKGGSGKVVDSGPNDHIFIYYSDHGGPGVLGMPTSPNLYANDLNDVLKKKYASGTYKSLVFYLEACESGSIFEGLLPEGLNIYATTASNAEESSWGTYCPGEDPSPPSEYETCLGDLYSVAWIEDSEKHNLQTETLHEQYELVKKRTAGSGKSYGSHVMEFGDIGLSKEKLVLFMGTNPADENFTFVNENSIRPPSRVTNQRDADLVHFWHKYQKAPEGSARKVEAQKQVLEAMSHRLHVDNSILLIGILLFGLEGHAVLNKVRPSGEPLVDDWDCLKSLVRAFERHCGSLSQYGIKHMRSIANMCNAGIQMRQMEEAAMQACPTIPTSPWSSLDRGFSA

SEQ ID NO: 97378 - protein, 478 aa, Arabidopsis thaliana
  peptide (1)..(478): Ceres Seq. ID no. 12737194
  misc_feature (5)..(360): Pfam Name: Peptidase C13 family Pfam Description: Peptidase C13 family
  misc_feature (1)..(478): Homolog of NCBI NO: 15225226 NR Description: putative vacuolar processing enzyme; protein id: supported by cDNA: gi_16604313, supported by cDNA: gi_19699181 thaliana] >gi|14917086|sp|P49047|VPEA_ARATH Vacuolar isozyme
  misc_feature (1)..(478): Homolog of NCBI NO: 15233996 NR Description: gamma-VPE (vacuolar processing enzyme); protein At4g32940.1, supported by cDNA: gi_13877794, supported by cDNA:
  misc_feature (1)..(478): Homolog of NCBI NO: 14916737 NR Description: Vacuolar processing enzyme, gamma-isozyme
  misc_feature (8)..(478): Homolog of NCBI NO: 27544008 NR Description: vacuolar processing enzyme-1b [Nicotiana tabacum]
  misc_feature (4)..(478): Homolog of NCBI NO: 4589396 NR Description: asparaginyl endopeptidase (VmPE-1) [Vigna mungo]
  misc_feature (8)..(478): Homolog of NCBI NO: 27544006 NR Description: vacuolar processing enzyme-1a [Nicotiana tabacum]
  misc_feature (18)..(478): Homolog of NCBI NO: 1351408 NR Description: Vacuolar processing enzyme precursor (VPE)
  misc_feature (5)..(478): Homolog of NCBI NO: 27544012 NR Description: vacuolar processing enzyme-3 [Nicotiana tabacum]
  misc_feature (1)..(478): Homolog of NCBI NO: 1351411 NR Description: Vacuolar processing enzyme precursor (VPE)
  misc_feature (2)..(478): Homolog of NCBI NO: 7739789 NR Description: cysteine protease [Ipomoea batatas]
MTTVVSFLALFLFLVAAVSGDVIKLPSLASKFFRPTENDDDSTKWAVLVAGSSGYWNYRHQADVCHAYQLLKKGGVKEENIVVFMYDDIAKNEENPRPGVIINSPNGEDVYNGVPKDYTGDEVNVDNLLAVILGNKTALKGGSGKVVDSGPNDHIFIYYSDHGGPGVLGMPTSPNLYANDLNDVLKKKYASGTYKSLVFYLEACESGSIFEGLLPEGLNIYATTASNAEESSWGTYCPGEDPSPPSEYETCLGDLYSVAWIEDSEKHNLQTETLHEQYELVKKRTAGSGKSYGSHVMEFGDIGLSKEKLVLFMGTNPADENFTFVNENSIRPPSRVTNQRDADLVHFWHKYQKAPEGSARKVEAQKQVLEAMSHRLHVDNSILLIGILLFGLEGHAVLNKVRPSGEPLVDDWDCLKSLVRAFERHCGSLSQYGIKHMRSIANMCNAGIQMRQMEEAAMQACPTIPTSPWSSLDRGFSA

SEQ ID NO: 97379 - protein, 394 aa, Arabidopsis thaliana
  peptide (1)..(394): Ceres Seq. ID no. 12737195
  misc_feature (1)..(276): Pfam Name: Peptidase C13 family Pfam Description: Peptidase C13 family
  misc_feature (1)..(394): Homolog of NCBI NO: 15225226 NR Description: putative vacuolar processing enzyme; protein id: supported by cDNA: gi_16604313, supported by cDNA: gi_19699181 thaliana] >gi|14917086|sp|P49047|VPEA_ARATH Vacuolar isozyme
  misc_feature (1)..(394): Homolog of NCBI NO: 15233996 NR Description: gamma-VPE (vacuolar processing enzyme); protein At4g32940.1, supported by cDNA: gi_13877794, supported by cDNA:
  misc_feature (1)..(394): Homolog of NCBI NO: 14916737 NR Description: Vacuolar processing enzyme, gamma-isozyme
  misc_feature (1)..(394): Homolog of NCBI NO: 27544008 NR Description: vacuolar processing enzyme-1b [Nicotiana tabacum]
  misc_feature (1)..(394): Homolog of NCBI NO: 4589396 NR Description: asparaginyl endopeptidase (VmPE-1) [Vigna mungo]
  misc_feature (1)..(394): Homolog of NCBI NO: 27544006 NR Description: vacuolar processing enzyme-1a [Nicotiana tabacum]
  misc_feature (1)..(394): Homolog of NCBI NO: 1351408 NR Description: Vacuolar processing enzyme precursor (VPE)
  misc_feature (1)..(394): Homolog of NCBI NO: 27544012 NR Description: vacuolar processing enzyme-3 [Nicotiana tabacum]
  misc_feature (1)..(394): Homolog of NCBI NO: 1351411 NR Description: Vacuolar processing enzyme precursor (VPE)
  misc_feature (1)..(394): Homolog of NCBI NO: 7739789 NR Description: cysteine protease [Ipomoea batatas]
MYDDIAKNEENPRPGVIINSPNGEDVYNGVPKDYTGDEVNVDNLLAVILGNKTALKGGSGKVVDSGPNDHIFIYYSDHGGPGVLGMPTSPNLYANDLNDVLKKKYASGTYKSLVFYLEACESGSIFEGLLPEGLNIYATTASNAEESSWGTYCPGEDPSPPSEYETCLGDLYSVAWIEDSEKHNLQTETLHEQYELVKKRTAGSGKSYGSHVMEFGDIGLSKEKLVLFMGTNPADENFTFVNENSIRPPSRVTNQRDADLVHFWHKYQKAPEGSARKVEAQKQVLEAMSHRLHVDNSILLIGILLFGLEGHAVLNKVRPSGEPLVDDWDCLKSLVRAFERHCGSLSQYGIKHMRSIANMCNAGIQMRQMEEAAMQACPTIPTSPWSSLDRGFSA

SEQ ID NO: 97380 - DNA, 1440 bp, Arabidopsis thaliana
  misc_feature (1)..(1440): Ceres Seq. ID no. 12737200
atgaactcggcaagcgtttccggtgaatcctctctctccgatatgattcagacagttcatttttcctctggaaaccctagaatcggcgagactcgcggtgtcatgcatctaatttccgacaatgctgtttcgtcatcttcttcttcctcctcctcgaatctccctattggaaggaaccctctcgtttgcgttcttggggtgcccaaccacatgacatatgcagatttttgccagttctgcggctccttcattcagcacatactggatatgcgaaccgtcaggaatgatgacattgaaaatagatacagcattttgataaggtttgatagtcaggaatctaccgatacattcttccagcatttcagagggaaacagttcaactctctggacgaagatgtctgtcgcctgctttttgctcttgatgttcagtttaccggttatagtggatccattgaccatacacagccttctgctgctggcccaatagagcaacctacttgcccagtgtgtcttgagagattggaccaagacacaggtggcattctcacaaccatgtgcaatcattccttccattgctcatgtatttctaattggccagattcttcttgcccagtttgtcgatattgccaacagcaacctgaaaattcagtatgttgtgtttgccaaacaacggagaatctctggatgtgtgttatctgtggggttgttggctgcggaaggtacaaggaaggacatgccagaaggcactgggaggagacagagcattgctattcacttgagcttgaaacacaacgtgtttgggattatgctggtgacaattatgttcaccggcttattcaatccaaaactgatggcaagctagtggagttgaattctcatggaagtctgagcaaggatggttgtggaagctgtgaatattctgacagtggaatgactgatgctctcctgaacagcaaagtggacatgatcattagtgagtacaacgaacttctccaggcacaactagagaatcaaaaacaatattttgaaaagttgctacaaaatgtcaaagaggaaacggaacagaaaatctcagaagctgcgagcaaggcaataagccagagactgcagaagctgcaaaccaggtttgacagatgtgtcaaagagaagcaatttcttgaagatttgaacgaaaatcttgtgaaaaataaggacgtatggagcaccaagattacagaaatgaaagaaagggagaagaaggcagttcgggcaaaggatgaaaagattcagggcttagaagaacagcttggaaacctaatggcccaaatggatggtgagagtgaagtctcagagacgaaagaggtccaggacgccactgtctcgaccaccaatacctcttcttctggggcagggaatgttatacatgcaaataaaaagaagagtaacagaagaaagggttag

SEQ ID NO: 97381 - protein, 479 aa, Arabidopsis thaliana
  peptide (1)..(479): Ceres Seq. ID no. 12737201
  misc_feature (218)..(289): Pfam Name: Zn-finger in ubiquitin-hydrolases and other protein Pfam Description: Zn-finger in ubiquitin-hydrolases and other
  misc_feature (1)..(479): Homolog of NCBI NO: 15225236 NR Description: hypothetical protein; protein id: At2g26000.1
  misc_feature (39)..(450): Homolog of NCBI NO: 38345493 NR Description: OSJNBa0010D21.6 [Oryza sativa (japonica
  misc_feature (1)..(478): Homolog of NCBI NO: 13492093 NR Description: BRAP2 variant 1 [Mus musculus]
  misc_feature (1)..(478): Homolog of NCBI NO: 13492095 NR Description: BRAP2 variant 2 [Mus musculus]
  misc_feature (27)..(453): Homolog of NCBI NO: 15227893 NR Description: hypothetical protein; protein id: At2g42160.1
  misc_feature (1)..(478): Homolog of NCBI NO: 10800417 NR Description: BRCA1 associated protein [Homo sapiens]
  misc_feature (9)..(477): Homolog of NCBI NO: 24637027 NR Description: BRAP2 [Squalus acanthias]
  misc_feature (35)..(478): Homolog of NCBI NO: 17998683 NR Description: BRCA1 associated protein; RIKEN cDNA 3010002G07 [Mus musculus] >gi|12851424|dbj|BAB29036.1| unnamed protein
  misc_feature (1)..(443): Homolog of NCBI NO: 3252872 NR Description: BRCA1-associated protein 2 [Homo sapiens]
  misc_feature (10)..(478): Homolog of NCBI NO: 21356581 NR Description: CG5555-PA [Drosophila melanogaster]
MNSASVSGESSLSDMIQTVHFSSGNPRIGETRGVMHLISDNAVSSSSSSSSSNLPIGRNPLVCVLGVPNHMTYADFCQFCGSFIQHILDMRTVRNDDIENRYSILIRFDSQESTDTFFQHFRGKQFNSLDEDVCRLLFALDVQFTGYSGSIDHTQPSAAGPIEQPTCPVCLERLDQDTGGILTTMCNHSFHCSCISNWPDSSCPVCRYCQQQPENSVCCVCQTTENLWMCVICGVVGCGRYKEGHARRHWEETEHCYSLELETQRVWDYAGDNYVHRLIQSKTDGKLVELNSHGSLSKDGCGSCEYSDSGMTDALLNSKVDMIISEYNELLQAQLENQKQYFEKLLQNVKEETEQKISEAASKAISQRLQKLQTRFDRCVKEKQFLEDLNENLVKNKDVWSTKITEMKEREKKAVRAKDEKIQGLEEQLGNLMAQMDGESEVSETKEVQDATVSTTNTSSSGAGNVIHANKKKSNRRKG

SEQ ID NO: 97382 - protein, 465 aa, Arabidopsis thaliana
  peptide (1)..(465): Ceres Seq. ID no. 12737202
  misc_feature (204)..(275): Pfam Name: Zn-finger in ubiquitin-hydrolases and other protein Pfam Description: Zn-finger in ubiquitin-hydrolases and other
  misc_feature (1)..(465): Homolog of NCBI NO: 15225236 NR Description: hypothetical protein; protein id: At2g26000.1
  misc_feature (25)..(436): Homolog of NCBI NO: 38345493 NR Description: OSJNBa0010D21.6 [Oryza sativa (japonica
  misc_feature (1)..(464): Homolog of NCBI NO: 13492093 NR Description: BRAP2 variant 1 [Mus musculus]
  misc_feature (1)..(464): Homolog of NCBI NO: 13492095 NR Description: BRAP2 variant 2 [Mus musculus]
  misc_feature (13)..(439): Homolog of NCBI NO: 15227893 NR Description: hypothetical protein; protein id: At2g42160.1
  misc_feature (1)..(464): Homolog of NCBI NO: 10800417 NR Description: BRCA1 associated protein [Homo sapiens]
  misc_feature (1)..(463): Homolog of NCBI NO: 24637027 NR Description: BRAP2 [Squalus acanthias]
  misc_feature (21)..(464): Homolog of NCBI NO: 17998683 NR Description: BRCA1 associated protein; RIKEN cDNA 3010002G07 [Mus musculus] >gi|12851424|dbj|BAB29036.1| unnamed protein
  misc_feature (1)..(429): Homolog of NCBI NO: 3252872 NR Description: BRCA1-associated protein 2 [Homo sapiens]
  misc_feature (1)..(464): Homolog of NCBI NO: 21356581 NR Description: CG5555-PA [Drosophila melanogaster]
MIQTVHFSSGNPRIGETRGVMHLISDNAVSSSSSSSSSNLPIGRNPLVCVLGVPNHMTYADFCQFCGSFIQHILDMRTVRNDDIENRYSILIRFDSQESTDTFFQHFRGKQFNSLDEDVCRLLFALDVQFTGYSGSIDHTQPSAAGPIEQPTCPVCLERLDQDTGGILTTMCNHSFHCSCISNWPDSSCPVCRYCQQQPENSVCCVCQTTENLWMCVICGVVGCGRYKEGHARRHWEETEHCYSLELETQRVWDYAGDNYVHRLIQSKTDGKLVELNSHGSLSKDGCGSCEYSDSGMTDALLNSKVDMIISEYNELLQAQLENQKQYFEKLLQNVKEETEQKISEAASKAISQRLQKLQTRFDRCVKEKQFLEDLNENLVKNKDVWSTKITEMKEREKKAVRAKDEKIQGLEEQLGNLMAQMDGESEVSETKEVQDATVSTTNTSSSGAGNVIHANKKKSNRRKG

SEQ ID NO: 97383 - protein, 445 aa, Arabidopsis thaliana
  peptide (1)..(445): Ceres Seq. ID no. 12737203
  misc_feature (184)..(255): Pfam Name: Zn-finger in ubiquitin-hydrolases and other protein Pfam Description: Zn-finger in ubiquitin-hydrolases and other
  misc_feature (1)..(445): Homolog of NCBI NO: 15225236 NR Description: hypothetical protein; protein id: At2g26000.1
  misc_feature (5)..(416): Homolog of NCBI NO: 38345493 NR Description: OSJNBa0010D21.6 [Oryza sativa (japonica
  misc_feature (1)..(444): Homolog of NCBI NO: 13492093 NR Description: BRAP2 variant 1 [Mus musculus]
  misc_feature (1)..(444): Homolog of NCBI NO: 13492095 NR Description: BRAP2 variant 2 [Mus musculus]
  misc_feature (1)..(419): Homolog of NCBI NO: 15227893 NR Description: hypothetical protein; protein id: At2g42160.1
  misc_feature (1)..(444): Homolog of NCBI NO: 10800417 NR Description: BRCA1 associated protein [Homo sapiens]
  misc_feature (1)..(443): Homolog of NCBI NO: 24637027 NR Description: BRAP2 [Squalus acanthias]
  misc_feature (1)..(444): Homolog of NCBI NO: 17998683 NR Description: BRCA1 associated protein; RIKEN cDNA 3010002G07 [Mus musculus] >gi|12851424|dbj|BAB29036.1| unnamed protein
  misc_feature (1)..(409): Homolog of NCBI NO: 3252872 NR Description: BRCA1-associated protein 2 [Homo sapiens]
  misc_feature (1)..(444): Homolog of NCBI NO: 21356581 NR Description: CG5555-PA [Drosophila melanogaster]
MHLISDNAVSSSSSSSSSNLPIGRNPLVCVLGVPNHMTYADFCQFCGSFIQHILDMRTVRNDDIENRYSILIRFDSQESTDTFFQHFRGKQFNSLDEDVCRLLFALDVQFTGYSGSIDHTQPSAAGPIEQPTCPVCLERLDQDTGGILTTMCNHSFHCSCISNWPDSSCPVCRYCQQQPENSVCCVCQTTENLWMCVICGVVGCGRYKEGHARRHWEETEHCYSLELETQRVWDYAGDNYVHRLIQSKTDGKLVELNSHGSLSKDGCGSCEYSDSGMTDALLNSKVDMIISEYNELLQAQLENQKQYFEKLLQNVKEETEQKISEAASKAISQRLQKLQTRFDRCVKEKQFLEDLNENLVKNKDVWSTKITEMKEREKKAVRAKDEKIQGLEEQLGNLMAQMDGESEVSETKEVQDATVSTTNTSSSGAGNVIHANKKKSNRRKG

SEQ ID NO: 97384 - DNA, 573 bp, Arabidopsis thaliana
  misc_feature (1)..(573): Ceres Seq. ID no. 12737215
  misc_feature: MA Experiment ID: 20000306 Result: Up-regulated in Transcription
  misc_feature: MA Experiment 20000306 PARAMETER Experiment Name: At_Germinating_Seeds_Sub_P Parameter: Age (hr) Value: 6 vs. 0
  misc_feature: MA Experiment 20000306 PARAMETER Experiment Name: At_Germinating_Seeds_Sub_P Parameter: Organism Value: A. thaliana
  misc_feature: MA Experiment 20000306 PARAMETER Experiment Name: At_Germinating_Seeds_Sub_P Parameter: Plant Line Value: WS
  misc_feature: MA Experiment 20000306 PARAMETER Experiment Name: At_Germinating_Seeds_Sub_P Parameter: Tissue Value: Germinating Seeds
  misc_feature: MA Experiment ID: 20000315 Result: Up-regulated in Transcription
  misc_feature: MA Experiment 20000315 PARAMETER Experiment Name: At_14day_Shoots-Roots_Sub_P Parameter: Age (day) Value: 14
  misc_feature: MA Experiment 20000315 PARAMETER Experiment Name: At_14day_Shoots-Roots_Sub_P Parameter: Organism Value: A. thaliana
  misc_feature: MA Experiment 20000315 PARAMETER Experiment Name: At_14day_Shoots-Roots_Sub_P Parameter: Plant Line Value: WS
  misc_feature: MA Experiment 20000315 PARAMETER Experiment Name: At_14day_Shoots-Roots_Sub_P Parameter: Tissue Value: Shoots vs. Whole Plant
  misc_feature: MA Experiment ID: 20000352 Result: Down-regulated in Transcription
  misc_feature: MA Experiment 20000352 PARAMETER Experiment Name: At_Drought_Sub_P Parameter: Age (day) Value: 7
  misc_feature: MA Experiment 20000352 PARAMETER Experiment Name: At_Drought_Sub_P Parameter: Organism Value: A. thaliana
  misc_feature: MA Experiment 20000352 PARAMETER Experiment Name: At_Drought_Sub_P Parameter: Plant Line Value: WS
  misc_feature: MA Experiment 20000352 PARAMETER Experiment Name: At_Drought_Sub_P Parameter: Timepoint (hr) Value: 6
  misc_feature: MA Experiment 20000352 PARAMETER Experiment Name: At_Drought_Sub_P Parameter: Tissue Value: Whole Plant
  misc_feature: MA Experiment 20000352 PARAMETER Experiment Name: At_Drought_Sub_P Parameter: Treatment Value: Drought vs. No Drought
  misc_feature: MA Experiment ID: 20000440 Result: Up-regulated in Transcription
  misc_feature: MA Experiment 20000440 PARAMETER Experiment Name: At_Closed-Flower__Sub_P Parameter: Tissue Value: Closed Flower vs. Whole Plant
atgagctcatccccggccgtgaaaggcctaaccgatgaagagcagaaaaccctcgaaccggttatcaaaacgtaccaccagttcgaaccagacccaaccacgtgcacttctctcataacccaacgcatccacgctccggcctccgtggtttggcctcttatccgccgcttcgacaaccccgaacgctacaaacactttgtaaaaaggtgccgtctcatctccggtgatggtgacgtcggaagcgtcagagaagtgaccgtaatctccggcctcccagcctcaaccagtaccgagcggcttgagttcgtcgatgacgaccaccgtgttctaagcttcagggtcgtcggcggagagcaccgactcaagaactacaaatcagtgacgtcggtcaatgagttcttgaatcaagattccggcaaggtttacacggtggttcttgaatcttacaccgttgatattcccgagggaaacacagaggaagacactaaaatgtttgtggacactgtcgtcaaactcaaccttcagaaactcggagttgccgccacatctgcacctatgcatgatgatgaataa

SEQ ID NO: 97385 - protein, 190 aa, Arabidopsis thaliana
  peptide (1)..(190): Ceres Seq. ID no. 12737216
  misc_feature (33)..(179): Pfam Name: Pathogenesis-related protein Bet v I family Pfam Description: Pathogenesis-related protein Bet v I family
  misc_feature (1)..(190): Homolog of NCBI NO: 15225245 NR Description: hypothetical protein; protein id: At2g26040.1
  misc_feature (2)..(185): Homolog of NCBI NO: 15219339 NR Description: hypothetical protein; protein id: At1g73000.1
  misc_feature (10)..(181): Homolog of NCBI NO: 15236689 NR Description: putative protein; protein id: At4g17870.1, by cDNA: gi_14596204, supported by cDNA: gi_20148394 [Arabidopsis
  misc_feature (10)..(177): Homolog of NCBI NO: 9758515 NR Description: gene_id:MZA15.21~pir||T05073~similar to unknown
  misc_feature (10)..(177): Homolog of NCBI NO: 22327625 NR Description: putative protein; protein id: At5g46790.1, by cDNA: gi_17380841 [Arabidopsis thaliana] unknown protein [Arabidopsis thaliana]
  misc_feature (5)..(177): Homolog of NCBI NO: 37537066 NR Description: unknown protein [Oryza sativa (japonica
  misc_feature (22)..(177): Homolog of NCBI NO: 34907924 NR Description: B1088C09.9 [Oryza sativa (japonica
  misc_feature (22)..(177): Homolog of NCBI NO: 15239114 NR Description: putative protein; protein id: At5g05440.1, by cDNA: 117347., supported by cDNA: gi_15529253, supported by gi_16974394 [Arabidopsis thaliana] >gi|10176756|dbj|BAB09987.1|
  misc_feature (25)..(184): Homolog of NCBI NO: 18404709 NR Description: expressed protein; protein id: At2g38310.1, by cDNA: 32244., supported by cDNA: gi_14517501, supported by gi_15809747 [Arabidopsis thaliana] >gi|7487162|pir||T02514
  misc_feature (22)..(181): Homolog of NCBI NO: 18405351 NR Description: expressed protein; protein id: At2g40330.1, by cDNA: 6787. [Arabidopsis thaliana] >gi|20198019|gb|AAD25668.2| protein [Arabidopsis thaliana] >gi|21594278|gb|AAM65989.1|
MSSSPAVKGLTDEEQKTLEPVIKTYHQFEPDPTTCTSLITQRIHAPASVVWPLIRRFDNPERYKHFVKRCRLISGDGDVGSVREVTVISGLPASTSTERLEFVDDDHRVLSFRVVGGEHRLKNYKSVTSVNEFLNQDSGKVYTVVLESYTVDIPEGNTEEDTKMFVDTVVKLNLQKLGVAATSAPMHDDE

SEQ ID NO: 97386 - DNA, 1275 bp, Arabidopsis thaliana
  misc_feature (1)..(1275): Ceres Seq. ID no. 12737233
  misc_feature: MA Experiment ID: 20000185 Result: Up-regulated in Transcription
  misc_feature: MA Experiment 20000185 PARAMETER Experiment Name: At_Roots__P Parameter: Age (day) Value: 7 vs. 21
  misc_feature: MA Experiment 20000185 PARAMETER Experiment Name: At_Roots__P Parameter: Organism Value: A. thaliana
  misc_feature: MA Experiment 20000185 PARAMETER Experiment Name: At_Roots__P Parameter: Tissue Value: Roots vs. Whole Plant
  misc_feature: MA Experiment ID: 20000439 Result: Up-regulated in Transcription
  misc_feature: MA Experiment 20000439 PARAMETER Experiment Name: At_Roots__P Parameter: Age (day) Value: 14 vs. 21
  misc_feature: MA Experiment 20000439 PARAMETER Experiment Name: At_Roots__P Parameter: Organism Value: A. thaliana
  misc_feature: MA Experiment 20000439 PARAMETER Experiment Name: At_Roots__P Parameter: Tissue Value: Roots vs. Whole Plant
  misc_feature: MA Experiment ID: 20000527 Result: Down-regulated in Transcription
  misc_feature: MA Experiment 20000527 PARAMETER Experiment Name: At_10percent_PEG_P Parameter: Age (day) Value: 20
  misc_feature: MA Experiment 20000527 PARAMETER Experiment Name: At_10percent_PEG_P Parameter: Organism Value: A. thaliana
  misc_feature: MA Experiment 20000527 PARAMETER Experiment Name: At_10percent_PEG_P Parameter: Plant Line Value: WS
  misc_feature: MA Experiment 20000527 PARAMETER Experiment Name: At_10percent_PEG_P Parameter: Timepoint (day) Value: 20
  misc_feature: MA Experiment 20000527 PARAMETER Experiment Name: At_10percent_PEG_P Parameter: Tissue Value: Whole Plant
  misc_feature: MA Experiment 20000527 PARAMETER Experiment Name: At_10percent_PEG_P Parameter: Treatment Value: 10percent PEG vs. No Treatment
  misc_feature: MA Experiment ID: 20001554 Result: Up-regulated in Transcription
  misc_feature: MA Experiment 20001554 PARAMETER Experiment Name: At_Drought_Soil_Dry_P Parameter: Age (day) Value: 21
  misc_feature: MA Experiment 20001554 PARAMETER Experiment Name: At_Drought_Soil_Dry_P Parameter: Organism Value: A. thaliana
  misc_feature: MA Experiment 20001554 PARAMETER Experiment Name: At_Drought_Soil_Dry_P Parameter: Plant Line Value: WS
  misc_feature: MA Experiment 20001554 PARAMETER Experiment Name: At_Drought_Soil_Dry_P Parameter: Post Timepoint (hr) Value: None
  misc_feature: MA Experiment 20001554 PARAMETER Experiment Name: At_Drought_Soil_Dry_P Parameter: Post-Treatment Value: None
  misc_feature: MA Experiment 20001554 PARAMETER Experiment Name: At_Drought_Soil_Dry_P Parameter: Timepoint (day) Value: 7
  misc_feature: MA Experiment 20001554 PARAMETER Experiment Name: At_Drought_Soil_Dry_P Parameter: Treatment Value: Drought vs. No Drought
atggcagtgttcaagaagaagaaaacatcattgacatctctgttcttggggtgttacaaggcaaagaacgcaagcaaatacgaaggaggggagaaggctgtaatgaaaataagaacttgtccagcgttcaagaggctgtctttatcggacataagcgatccaagctcgcccatgtcggttatggatgatctctctcactccttcacatcgcagaagcttcgtttgttcacgttgtctgagctgagagtgattacgcataatttctctagaagtaacatgttgggggaaggagggtttgggccggtttacaaagggtttattgatgataaggttaaaccgggtatcgaagcccaaccggttgctgtaaaggctcttgatcttcatggccatcaaggccatagagaatggctggcggagatattatttttgggacaactaagtaacaaacatcttgtgaagctgatagggttttgttgtgaagaagagcaaagagttcttgtttatgagtacatgcctcgaggtagcttggagaatcagctctttcgaagaaatagcttagcaatggcttggggaataaggatgaagatagctctcggagccgccaaaggtttagcttttctccatgaagcagagaaacctgtcatctacagagactttaaaacctctaacatattgttagactccgactataacgccaaattatctgacttcggtctagccaaagatggacctgaaggcgaacatacgcatgtaactacccgagtgatgggaacacaaggttatgctgcgcccgaatatatcatgactggtcatttgacgacgatgaatgatgtatacagttttggagtagttttgttagagctgataaccggaaaacggtcaatggacaatacccgaacacggagggaacaaagcctagtggaatgggcgcggcctatgttaagggaccaaagaaagttagagaggataattgacccgaggctcgcgaaccagcacaaaacagaagcggctcaggtagctgcttccctagcatacaagtgtctaagccaacatcctaagtatagacctacaatgtgtgaggtggttaaggtcttagagtctatccaagaagttgatattaggaagcatgatggcaataacaacaaagaaggaaagaagtttgttgatataaataagtttaggcatcaccgtaaaggcaaaagacgtgtgaacatcgcttattcagattctctcgtttacaaggaatccaaggcaaagcaaaacgatggcatttga

SEQ ID NO: 97387 - protein, 424 aa, Arabidopsis thaliana
  peptide (1)..(424): Ceres Seq. ID no. 12737234
  misc_feature (1)..(424): Homolog of NCBI NO: 15225277 NR Description: putative protein kinase; protein id: At2g26290.1
  misc_feature (1)..(424): Homolog of NCBI NO: 1066501 NR Description: serine/threonine protein kinase
  misc_feature (171)..(424): Homolog of NCBI NO: 38564320 NR Description: At2g26290 [Arabidopsis thaliana]
  misc_feature (8)..(370): Homolog of NCBI NO: 30013675 NR Description: Avr9/Cf-9 rapidly elicited protein 264 [Nicotiana
  misc_feature (1)..(370): Homolog of NCBI NO: 15225019 NR Description: putative protein kinase; protein id: At2g05940.1, by cDNA: gi_15810412, supported by cDNA: gi_21280976 [Arabidopsis >gi|25287639|pir||C84473 probable protein kinase putative protein
  misc_feature (1)..(370): Homolog of NCBI NO: 10176804 NR Description: serine/threonine protein kinase-like [Arabidopsis
  misc_feature (1)..(370): Homolog of NCBI NO: 15238553 NR Description: serine/threonine protein kinase-like; protein id:
  misc_feature (45)..(373): Homolog of NCBI NO: 14484938 NR Description: auxin-regulated dual specificity cytosolic kinase
  misc_feature (137)..(372): Homolog of NCBI NO: 27436752 NR Description: Putative serine/threonine protein kinase [Oryza
  misc_feature (8)..(137): Homolog of NCBI NO: 27436752 NR Description: Putative serine/threonine protein kinase [Oryza
MAVFKKKKTSLTSLFLGCYKAKNASKYEGGEKAVMKIRTCPAFKRLSLSDISDPSSPMSVMDDLSHSFTSQKLRLFTLSELRVITHNFSRSNMLGEGGFGPVYKGFIDDKVKPGIEAQPVAVKALDLHGHQGHREWLAEILFLGQLSNKHLVKLIGFCCEEEQRVLVYEYMPRGSLENQLFRRNSLAMAWGIRMKIALGAAKGLAFLHEAEKPVIYRDFKTSNILLDSDYNAKLSDFGLAKDGPEGEHTHVTTRVMGTQGYAAPEYIMTGHLTTMNDVYSFGVVLLELITGKRSMDNTRTRREQSLVEWARPMLRDQRKLERIIDPRLANQHKTEAAQVAASLAYKCLSQHPKYRPTMCEVVKVLESIQEVDIRKHDGNNNKEGKKFVDINKFRHHRKGKRRVNIAYSDSLVYKESKAKQNDGI

SEQ ID NO: 97388 - protein, 390 aa, Arabidopsis thaliana
  peptide (1)..(390): Ceres Seq. ID no. 12737235
  misc_feature (1)..(390): Homolog of NCBI NO: 15225277 NR Description: putative protein kinase; protein id: At2g26290.1
  misc_feature (1)..(390): Homolog of NCBI NO: 1066501 NR Description: serine/threonine protein kinase
  misc_feature (137)..(390): Homolog of NCBI NO: 38564320 NR Description: At2g26290 [Arabidopsis thaliana]
  misc_feature (1)..(336): Homolog of NCBI NO: 30013675 NR Description: Avr9/Cf-9 rapidly elicited protein 264 [Nicotiana
  misc_feature (1)..(336): Homolog of NCBI NO: 15225019 NR Description: putative protein kinase; protein id: At2g05940.1, by cDNA: gi_15810412, supported by cDNA: gi_21280976 [Arabidopsis >gi|25287639|pir||C84473 probable protein kinase putative protein
  misc_feature (1)..(336): Homolog of NCBI NO: 10176804 NR Description: serine/threonine protein kinase-like [Arabidopsis
  misc_feature (1)..(336): Homolog of NCBI NO: 15238553 NR Description: serine/threonine protein kinase-like; protein id:
  misc_feature (11)..(339): Homolog of NCBI NO: 14484938 NR Description: auxin-regulated dual specificity cytosolic kinase
  misc_feature (103)..(338): Homolog of NCBI NO: 27436752 NR Description: Putative serine/threonine protein kinase [Oryza
  misc_feature (1)..(103): Homolog of NCBI NO: 27436752 NR Description: Putative serine/threonine protein kinase [Oryza
MKIRTCPAFKRLSLSDISDPSSPMSVMDDLSHSFTSQKLRLFTLSELRVITHNFSRSNMLGEGGFGPVYKGFIDDKVKPGIEAQPVAVKALDLHGHQGHREWLAEILFLGQLSNKHLVKLIGFCCEEEQRVLVYEYMPRGSLENQLFRRNSLAMAWGIRMKIALGAAKGLAFLHEAEKPVIYRDFKTSNILLDSDYNAKLSDFGLAKDGPEGEHTHVTTRVMGTQGYAAPEYIMTGHLTTMNDVYSFGVVLLELITGKRSMDNTRTRREQSLVEWARPMLRDQRKLERIIDPRLANQHKTEAAQVAASLAYKCLSQHPKYRPTMCEVVKVLESIQEVDIRKHDGNNNKEGKKFVDINKFRHHRKGKRRVNIAYSDSLVYKESKAKQNDGI

SEQ ID NO: 97389 - protein, 367 aa, Arabidopsis thaliana
  peptide (1)..(367): Ceres Seq. ID no. 12737236
  misc_feature (1)..(367): Homolog of NCBI NO: 15225277 NR Description: putative protein kinase; protein id: At2g26290.1
  misc_feature (1)..(367): Homolog of NCBI NO: 1066501 NR Description: serine/threonine protein kinase
  misc_feature (114)..(367): Homolog of NCBI NO: 38564320 NR Description: At2g26290 [Arabidopsis thaliana]
  misc_feature (1)..(313): Homolog of NCBI NO: 30013675 NR Description: Avr9/Cf-9 rapidly elicited protein 264 [Nicotiana
  misc_feature (1)..(313): Homolog of NCBI NO: 15225019 NR Description: putative protein kinase; protein id: At2g05940.1, by cDNA: gi_15810412, supported by cDNA: gi_21280976 [Arabidopsis >gi|25287639|pir||C84473 probable protein kinase putative protein
  misc_feature (1)..(313): Homolog of NCBI NO: 10176804 NR Description: serine/threonine protein kinase-like [Arabidopsis
  misc_feature (1)..(313): Homolog of NCBI NO: 15238553 NR Description: serine/threonine protein kinase-like; protein id:
  misc_feature (1)..(316): Homolog of NCBI NO: 14484938 NR Description: auxin-regulated dual specificity cytosolic kinase
  misc_feature (80)..(315): Homolog of NCBI NO: 27436752 NR Description: Putative serine/threonine protein kinase [Oryza
  misc_feature (1)..(80): Homolog of NCBI NO: 27436752 NR Description: Putative serine/threonine protein kinase [Oryza
MSVMDDLSHSFTSQKLRLFTLSELRVITHNFSRSNMLGEGGFGPVYKGFIDDKVKPGIEAQPVAVKALDLHGHQGHREWLAEILFLGQLSNKHLVKLIGFCCEEEQRVLVYEYMPRGSLENQLFRRNSLAMAWGIRMKIALGAAKGLAFLHEAEKPVIYRDFKTSNILLDSDYNAKLSDFGLAKDGPEGEHTHVTTRVMGTQGYAAPEYIMTGHLTTMNDVYSFGVVLLELITGKRSMDNTRTRREQSLVEWARPMLRDQRKLERIIDPRLANQHKTEAAQVAASLAYKCLSQHPKYRPTMCEVVKVLESIQEVDIRKHDGNNNKEGKKFVDINKFRHHRKGKRRVNIAYSDSLVYKESKAKQNDGI

SEQ ID NO: 97390 - DNA, 990 bp, Arabidopsis thaliana
  misc_feature (1)..(990): Ceres Seq. ID no. 12737275
  misc_feature: MA Experiment ID: 20000307 Result: Up-regulated in Transcription
  misc_feature: MA Experiment 20000307 PARAMETER Experiment Name: At_Germinating_Seeds_Sub_P Parameter: Age (hr) Value: 24 vs. 0
  misc_feature: MA Experiment 20000307 PARAMETER Experiment Name: At_Germinating_Seeds_Sub_P Parameter: Organism Value: A. thaliana
  misc_feature: MA Experiment 20000307 PARAMETER Experiment Name: At_Germinating_Seeds_Sub_P Parameter: Plant Line Value: WS
  misc_feature: MA Experiment 20000307 PARAMETER Experiment Name: At_Germinating_Seeds_Sub_P Parameter: Tissue Value: Germinating Seeds
  misc_feature: MA Experiment ID: 20000315 Result: Up-regulated in Transcription
  misc_feature: MA Experiment 20000315 PARAMETER Experiment Name: At_14day_Shoots-Roots_Sub_P Parameter: Age (day) Value: 14
  misc_feature: MA Experiment 20000315 PARAMETER Experiment Name: At_14day_Shoots-Roots_Sub_P Parameter: Organism Value: A. thaliana
  misc_feature: MA Experiment 20000315 PARAMETER Experiment Name: At_14day_Shoots-Roots_Sub_P Parameter: Plant Line Value: WS
  misc_feature: MA Experiment 20000315 PARAMETER Experiment Name: At_14day_Shoots-Roots_Sub_P Parameter: Tissue Value: Shoots vs. Whole Plant
  misc_feature: MA Experiment ID: 20000355 Result: Up-regulated in Transcription
  misc_feature: MA Experiment 20000355 PARAMETER Experiment Name: At_Siliques_Sub_P Parameter: Age (day) Value: 21
  misc_feature: MA Experiment 20000355 PARAMETER Experiment Name: At_Siliques_Sub_P Parameter: Organism Value: A. thaliana
  misc_feature: MA Experiment 20000355 PARAMETER Experiment Name: At_Siliques_Sub_P Parameter: Plant Line Value: WS
  misc_feature: MA Experiment 20000355 PARAMETER Experiment Name: At_Siliques_Sub_P Parameter: Tissue Value: Less Than 5mm Siliques vs. Whole Plant
  misc_feature: MA Experiment ID: 20000440 Result: Up-regulated in Transcription
  misc_feature: MA Experiment 20000440 PARAMETER Experiment Name: At_Closed-Flower__Sub_P Parameter: Tissue Value: Closed Flower vs. Whole Plant
  misc_feature: MA Experiment ID: 20000634 Result: Up-regulated in Transcription
  misc_feature: MA Experiment 20000634 PARAMETER Experiment Name: At_10percent_PEG_Sub_P Parameter: Age (day) Value: 12
  misc_feature: MA Experiment 20000634 PARAMETER Experiment Name: At_10percent_PEG_Sub_P Parameter: Organism Value: A. thaliana
  misc_feature: MA Experiment 20000634 PARAMETER Experiment Name: At_10percent_PEG_Sub_P Parameter: Plant Line Value: WS
  misc_feature: MA Experiment 20000634 PARAMETER Experiment Name: At_10percent_PEG_Sub_P Parameter: Timepoint (day) Value: 12
  misc_feature: MA Experiment 20000634 PARAMETER Experiment Name: At_10percent_PEG_Sub_P Parameter: Tissue Value: Whole Plant
  misc_feature: MA Experiment 20000634 PARAMETER Experiment Name: At_10percent_PEG_Sub_P Parameter: Treatment Value: 10% PEG vs. No Treatment
atggcgttgcagtttttttcatgcaaaccaaaatatacattcctctcctctcttcttctacttttgcttctttcttcttcagtagctgagctctctttcaacttctacgccggttcttgtcctggagctgagttaatcgtcagaaacaccgttagatctgcttcttcctctgatccatcagtccttgggaagctcctacgtctcatcttccatgactgcttcgtccagggttgtgatggctcagtgttgattcgaggaaacggtacagagcgaagcgaccctgggaatgcgtctctaggaggattcgctgtgatagaaagcgtcaaaaatatcctcgaaatcttttgtcccggcacagtctcttgtgctgatatacttgttcttgccgcaagagatgcagtagaagctctcggaggaccggtagttccgataccgacagggaggagagacgggagagtctcaatggcagcaaatgtcagaccaaacatcatagataccgatttcacagttgataagatgatcaatatcttttcctctaaaggcttatctgttcatgatctagttgtcctctcaggagcgcacactattggagctgcgcattgtaacacgttcaacagcaggtttaagcttgatccaaaaggcaacttagaactaatagacgcgtctctcgataactcctatgcgcaaacacttgtaaacaagtgttcatcgtcactagatccaacgaccacggtggttgataacgatccagagacatcgtcgacgttcgataatcagtactacaagaatctgttggctcacaagggtttgtttcaaacggattcagctctcatggaagatgatcggacgaggaagattgttgagattcttgcgaatgatcaggagagttttttcgatagatggactgagtcttttttgaagatgagtttgatgggagtgagagttggtgaagaaggtgagattagacgttcttgttctgctgttaattaa

SEQ ID NO: 97391 - protein, 329 aa, Arabidopsis thaliana
  peptide (1)..(329): Ceres Seq. ID no. 12737276
  misc_feature (47)..(293): Pfam Name: Peroxidase Pfam Description: Peroxidase
  misc_feature (1)..(329): Homolog of NCBI NO: 15224621 NR Description: peroxidase, putative; protein id: At2g24800.1 thaliana] >gi|25453218|sp|Q9SK52|PE18_ARATH Peroxidase 18 (Atperox P18) >gi|25285617|pir||F84640 probable peroxidase
  misc_feature (13)..(329): Homolog of NCBI NO: 15236066 NR Description: peroxidase, putative; protein id: At4g31760.1 thaliana] >gi|26397591|sp|O81772|PE46_ARATH Peroxidase 46
  misc_feature (20)..(329): Homolog of NCBI NO: 7433090 NR Description: probable peroxidase (EC 1.11.1.7) (clone PC56) - (fragment) >gi|1781338|emb|CAA71496.1| peroxidase [Spinacia
  misc_feature (25)..(329): Homolog of NCBI NO: 38345019 NR Description: OSJNBa0029H02.3 [Oryza sativa (japonica
MALQFFSCKPKYTFLSSLLLLLLLSSSVAELSFNFYAGSCPGAELIVRNTVRSASSSDPSVLGKLLRLIFHDCFVQGCDGSVLIRGNGTERSDPGNASLGGFAVIESVKNILEIFCPGTVSCADILVLAARDAVEALGGPVVPIPTGRRDGRVSMAANVRPNIIDTDFTVDKMINIFSSKGLSVHDLVVLSGAHTIGAAHCNTFNSRFKLDPKGNLELIDASLDNSYAQTLVNKCSSSLDPTTTVVDNDPETSSTFDNQYYKNLLAHKGLFQTDSALMEDDRTRKIVEILANDQESFFDRWTESFLKMSLMGVRVGEEGEIRRSCSAVN

SEQ ID NO: 97392 - protein, 175 aa, Arabidopsis thaliana
  peptide (1)..(175): Ceres Seq. ID no. 12737277
  misc_feature (1)..(139): Pfam Name: Peroxidase Pfam Description: Peroxidase
  misc_feature (1)..(175): Homolog of NCBI NO: 15224621 NR Description: peroxidase, putative; protein id: At2g24800.1 thaliana] >gi|25453218|sp|Q9SK52|PE18_ARATH Peroxidase 18 (Atperox P18) >gi|25285617|pir||F84640 probable peroxidase
  misc_feature (1)..(175): Homolog of NCBI NO: 15236066 NR Description: peroxidase, putative; protein id: At4g31760.1 thaliana] >gi|26397591|sp|O81772|PE46_ARATH Peroxidase 46
  misc_feature (1)..(175): Homolog of NCBI NO: 7433090 NR Description: probable peroxidase (EC 1.11.1.7) (clone PC56) - (fragment) >gi|1781338|emb|CAA71496.1| peroxidase [Spinacia
  misc_feature (1)..(175): Homolog of NCBI NO: 38345019 NR Description: OSJNBa0029H02.3 [Oryza sativa (japonica
MAANVRPNIIDTDFTVDKMINIFSSKGLSVHDLVVLSGAHTIGAAHCNTFNSRFKLDPKGNLELIDASLDNSYAQTLVNKCSSSLDPTTTVVDNDPETSSTFDNQYYKNLLAHKGLFQTDSALMEDDRTRKIVEILANDQESFFDRWTESFLKMSLMGVRVGEEGEIRRSCSAVN

SEQ ID NO: 97393 - DNA, 1494 bp, Arabidopsis thaliana
  misc_feature (1)..(1494): Ceres Seq. ID no. 12737278
  misc_feature: MA Experiment ID: 20000184 Result: Down-regulated in Transcription
  misc_feature: MA Experiment 20000184 PARAMETER Experiment Name: At_Shoots__P Parameter: Age (day) Value: 7
  misc_feature: MA Experiment 20000184 PARAMETER Experiment Name: At_Shoots__P Parameter: Tissue Value: Shoots vs. Whole Plant
atggcgagcgaagaaaacaacgaccttgaaaatcttcttgacattcagctaattgaacaaaaagaatctctttcctccattgacgaagccctactctctgacccatctaatcccgaactcctctcggtccatgaagaacttctcagtgcaatcaaggaggtagaggaagggcttttgcatttaaaacgagctcggttattggaggaagctgatatagtgttgaatggtctaaatcatgatgctggagttaaacctgagcatctggagccagagaaaactgaagagaaaaaggatttggatggatcgaaatgtcggtttcgacatactgatggtcgttggtataatggtcgtattattggatttgaaggctctgattctgctaagatctctttccttacacccacatctgagagtatgatgatttgcaagttttttatgcagcagaggtgtcggtttggcagttcttgtcgttcatcacatggactagatgtgccgatatcttctctgaagaactatgaacagactgagtggaagcaattgatggtaggctctaagatttgggcggtttctggcagtaaatacgatatatggagaaaggctgaacttgaatcatgggatgatgagttacaagtaggcggagttgttttcagagatgataaaagctctgcaaagctaggatctgattctttggcattatcagagtacgctcagatgactgatgatgatggggaagaggaggaggaggaggatgaacaacagagtgcttcagattctgaagattctgtttcaagtgattatgatgaagggtctccacaaggcataggctttctagaaagcacaaatctaccaagaggtgtccaaactgacactgccttatttgctaaatgggagaatcatactagaggaatagcttcgaagatgatggcaagtatgggttaccgtgaagggatgggtcttggcgtctctggccaagggatattaaatccaatcttagtaaaagtacttccagcaaagcggtcactggattatgctcttgagcacattaggaatggagaatgtaaaagcgagaaacaaaagaagaaaaggagcagaggtgggaaaaggaagcgtgggaagaagtttgcagaagcagctaaagcagcgaaacaggaagaggaatcgaagccagatttgtttagcttaatcaatgaacaaatttttcctacccgccatgagaaagtacacagcgagtctgtaaaaaataggcaaaacaaaggtccagtagacaggaaagctttggttgaataccaagatgaagtcagagacttgaagttagaaatgttgaaactagaacagatggtgaacagaaacaagaaagatctagttgtttcagaggctgcgacgagaagattgaaagaagtccgaaaggcattggcaagtacattagcatgtcaagcagctgcctcaaatgctatagtaagcaaagagaatgagaagaaatggctcaagttttag

SEQ ID NO: 97394 - protein, 497 aa, Arabidopsis thaliana
  peptide (1)..(497): Ceres Seq. ID no. 12737279
  misc_feature (300)..(344): Pfam Name: G-patch domain Pfam Description: G-patch domain
  misc_feature (1)..(497): Homolog of NCBI NO: 15224627 NR Description: hypothetical protein; protein id: At2g24830.1
  misc_feature (128)..(497): Homolog of NCBI NO: 19921028 NR Description: CG4709-PA [Drosophila melanogaster]
  misc_feature (228)..(497): Homolog of NCBI NO: 32766555 NR Description: Unknown (protein for MGC:63730) [Danio rerio]
  misc_feature (17)..(265): Homolog of NCBI NO: 32766555 NR Description: Unknown (protein for MGC:63730) [Danio rerio]
  misc_feature (3)..(462): Homolog of NCBI NO: 14042873 NR Description: unnamed protein product [Homo sapiens]
  misc_feature (21)..(266): Homolog of NCBI NO: 26340492 NR Description: unnamed protein product [Mus musculus]
  misc_feature (258)..(462): Homolog of NCBI NO: 26340492 NR Description: unnamed protein product [Mus musculus]
  misc_feature (21)..(266): Homolog of NCBI NO: 21450275 NR Description: cDNA sequence BC021513; hypothetical protein [Mus musculus] >gi|18204508|gb|AAH21513.1| Similar to protein FLJ14972 [Mus musculus] >gi|20070886|gb|AAH27218.1|
  misc_feature (258)..(462): Homolog of NCBI NO: 21450275 NR Description: cDNA sequence BC021513; hypothetical protein [Mus musculus] >gi|18204508|gb|AAH21513.1| Similar to protein FLJ14972 [Mus musculus] >gi|20070886|gb|AAH27218.1|
  misc_feature (255)..(462): Homolog of NCBI NO: 34861052 NR Description: similar to cDNA sequence BC021513 [Rattus
MASEENNDLENLLDIQLIEQKESLSSIDEALLSDPSNPELLSVHEELLSAIKEVEEGLLHLKRARLLEEADIVLNGLNHDAGVKPEHLEPEKTEEKKDLDGSKCRFRHTDGRWYNGRIIGFEGSDSAKISFLTPTSESMMICKFFMQQRCRFGSSCRSSHGLDVPISSLKNYEQTEWKQLMVGSKIWAVSGSKYDIWRKAELESWDDELQVGGVVFRDDKSSAKLGSDSLALSEYAQMTDDDGEEEEEEDEQQSASDSEDSVSSDYDEGSPQGIGFLESTNLPRGVQTDTALFAKWENHTRGIASKMMASMGYREGMGLGVSGQGILNPILVKVLPAKRSLDYALEHIRNGECKSEKQKKKRSRGGKRKRGKKFAEAAKAAKQEEESKPDLFSLINEQIFPTRHEKVHSESVKNRQNKGPVDRKALVEYQDEVRDLKLEMLKLEQMVNRNKKDLVVSEAATRRLKEVRKALASTLACQAAASNAIVSKENEKKWLKF

SEQ ID NO: 97395 - protein, 359 aa, Arabidopsis thaliana
  peptide (1)..(359): Ceres Seq. ID no. 12737280
  misc_feature (162)..(206): Pfam Name: G-patch domain Pfam Description: G-patch domain
  misc_feature (1)..(359): Homolog of NCBI NO: 15224627 NR Description: hypothetical protein; protein id: At2g24830.1
  misc_feature (1)..(359): Homolog of NCBI NO: 19921028 NR Description: CG4709-PA [Drosophila melanogaster]
  misc_feature (90)..(359): Homolog of NCBI NO: 32766555 NR Description: Unknown (protein for MGC:63730) [Danio rerio]
  misc_feature (1)..(127): Homolog of NCBI NO: 32766555 NR Description: Unknown (protein for MGC:63730) [Danio rerio]
  misc_feature (1)..(324): Homolog of NCBI NO: 14042873 NR Description: unnamed protein product [Homo sapiens]
  misc_feature (1)..(128): Homolog of NCBI NO: 26340492 NR Description: unnamed protein product [Mus musculus]
  misc_feature (120)..(324): Homolog of NCBI NO: 26340492 NR Description: unnamed protein product [Mus musculus]
  misc_feature (1)..(128): Homolog of NCBI NO: 21450275 NR Description: cDNA sequence BC021513; hypothetical protein [Mus musculus] >gi|18204508|gb|AAH21513.1| Similar to protein FLJ14972 [Mus musculus] >gi|20070886|gb|AAH27218.1|
  misc_feature (120)..(324): Homolog of NCBI NO: 21450275 NR Description: cDNA sequence BC021513; hypothetical protein [Mus musculus] >gi|18204508|gb|AAH21513.1| Similar to protein FLJ14972 [Mus musculus] >gi|20070886|gb|AAH27218.1|
  misc_feature (117)..(324): Homolog of NCBI NO: 34861052 NR Description: similar to cDNA sequence BC021513 [Rattus
MMICKFFMQQRCRFGSSCRSSHGLDVPISSLKNYEQTEWKQLMVGSKIWAVSGSKYDIWRKAELESWDDELQVGGVVFRDDKSSAKLGSDSLALSEYAQMTDDDGEEEEEEDEQQSASDSEDSVSSDYDEGSPQGIGFLESTNLPRGVQTDTALFAKWENHTRGIASKMMASMGYREGMGLGVSGQGILNPILVKVLPAKRSLDYALEHIRNGECKSEKQKKKRSRGGKRKRGKKFAEAAKAAKQEEESKPDLFSLINEQIFPTRHEKVHSESVKNRQNKGPVDRKALVEYQDEVRDLKLEMLKLEQMVNRNKKDLVVSEAATRRLKEVRKALASTLACQAAASNAIVSKENEKKWLKF

SEQ ID NO: 97396 - protein, 358 aa, Arabidopsis thaliana
  peptide (1)..(358): Ceres Seq. ID no. 12737281
  misc_feature (161)..(205): Pfam Name: G-patch domain Pfam Description: G-patch domain
  misc_feature (1)..(358): Homolog of NCBI NO: 15224627 NR Description: hypothetical protein; protein id: At2g24830.1
  misc_feature (1)..(358): Homolog of NCBI NO: 19921028 NR Description: CG4709-PA [Drosophila melanogaster]
  misc_feature (89)..(358): Homolog of NCBI NO: 32766555 NR Description: Unknown (protein for MGC:63730) [Danio rerio]
  misc_feature (1)..(126): Homolog of NCBI NO: 32766555 NR Description: Unknown (protein for MGC:63730) [Danio rerio]
  misc_feature (1)..(323): Homolog of NCBI NO: 14042873 NR Description: unnamed protein product [Homo sapiens]
  misc_feature (1)..(127): Homolog of NCBI NO: 26340492 NR Description: unnamed protein product [Mus musculus]
  misc_feature (119)..(323): Homolog of NCBI NO: 26340492 NR Description: unnamed protein product [Mus musculus]
  misc_feature (1)..(127): Homolog of NCBI NO: 21450275 NR Description: cDNA sequence BC021513; hypothetical protein [Mus musculus] >gi|18204508|gb|AAH21513.1| Similar to protein FLJ14972 [Mus musculus] >gi|20070886|gb|AAH27218.1|
  misc_feature (119)..(323): Homolog of NCBI NO: 21450275 NR Description: cDNA sequence BC021513; hypothetical protein [Mus musculus] >gi|18204508|gb|AAH21513.1| Similar to protein FLJ14972 [Mus musculus] >gi|20070886|gb|AAH27218.1|
  misc_feature (116)..(323): Homolog of NCBI NO: 34861052 NR Description: similar to cDNA sequence BC021513 [Rattus
MICKFFMQQRCRFGSSCRSSHGLDVPISSLKNYEQTEWKQLMVGSKIWAVSGSKYDIWRKAELESWDDELQVGGVVFRDDKSSAKLGSDSLALSEYAQMTDDDGEEEEEEDEQQSASDSEDSVSSDYDEGSPQGIGFLESTNLPRGVQTDTALFAKWENHTRGIASKMMASMGYREGMGLGVSGQGILNPILVKVLPAKRSLDYALEHIRNGECKSEKQKKKRSRGGKRKRGKKFAEAAKAAKQEEESKPDLFSLINEQIFPTRHEKVHSESVKNRQNKGPVDRKALVEYQDEVRDLKLEMLKLEQMVNRNKKDLVVSEAATRRLKEVRKALASTLACQAAASNAIVSKENEKKWLKF

SEQ ID NO: 97397 - DNA, 935 bp, Arabidopsis thaliana
  misc_feature (1)..(935): Ceres Seq. ID no. 12737324
  misc_feature: MA Experiment ID: 20000451 Result: Up-regulated in Transcription
  misc_feature: MA Experiment 20000451 PARAMETER Experiment Name: At_CS6879_Shoots-Roots_P Parameter: Age (day) Value: 14
  misc_feature: MA Experiment 20000451 PARAMETER Experiment Name: At_CS6879_Shoots-Roots_P Parameter: Organism Value: A. thaliana
  misc_feature: MA Experiment 20000451 PARAMETER Experiment Name: At_CS6879_Shoots-Roots_P Parameter: Plant Line Value: CS6879 vs. WS
  misc_feature: MA Experiment 20000451 PARAMETER Experiment Name: At_CS6879_Shoots-Roots_P Parameter: Tissue Value: Roots
  misc_feature: MA Experiment ID: 20000495 Result: Up-regulated in Transcription
  misc_feature: MA Experiment 20000495 PARAMETER Experiment Name: At_Guard_Cells_P Parameter: Harvest Date Value: 8/2/2002
  misc_feature: MA Experiment 20000495 PARAMETER Experiment Name: At_Guard_Cells_P Parameter: Organism Value: A. thaliana
  misc_feature: MA Experiment 20000495 PARAMETER Experiment Name: At_Guard_Cells_P Parameter: Tissue Value: Guard Cells vs. Leaves
  misc_feature: MA Experiment ID: 20001248 Result: Down-regulated in Transcription
  misc_feature: MA Experiment 20001248 PARAMETER Experiment Name: At_Far-red-induction_P Parameter: Age (day) Value: 7
  misc_feature: MA Experiment 20001248 PARAMETER Experiment Name: At_Far-red-induction_P Parameter: Light Value: Far-red vs. White
  misc_feature: MA Experiment 20001248 PARAMETER Experiment Name: At_Far-red-induction_P Parameter: Organism Value: A. thaliana
  misc_feature: MA Experiment 20001248 PARAMETER Experiment Name: At_Far-red-induction_P Parameter: Plant Line Value: Columbia
  misc_feature: MA Experiment 20001248 PARAMETER Experiment Name: At_Far-red-induction_P Parameter: Timepoint (hr) Value: 4
  misc_feature: MA Experiment 20001248 PARAMETER Experiment Name: At_Far-red-induction_P Parameter: Tissue Value: Whole Plant
  misc_feature: MA Experiment ID: 20001757 Result: Down-regulated in Transcription
  misc_feature: MA Experiment 20001757 PARAMETER Experiment Name: At_50mM_NH4NO3_L-to-H_P Parameter: Timepoint (hr) Value: 6
  misc_feature: MA Experiment 20001757 PARAMETER Experiment Name: At_50mM_NH4NO3_L-to-H_P Parameter: Tissue Value: Leaf
  misc_feature: MA Experiment 20001757 PARAMETER Experiment Name: At_50mM_NH4NO3_L-to-H_P Parameter: Treatment Value: 50mM NH4NO3 vs 100mM Mannitol
  misc_feature: MA Experiment ID: 20001904 Result: Up-regulated in Transcription
  misc_feature: MA Experiment 20001904 PARAMETER Experiment Name: At_Drought_Reproduction_P Parameter: Age (day) Value: 37
  misc_feature: MA Experiment 20001904 PARAMETER Experiment Name: At_Drought_Reproduction_P Parameter: Organism Value: A. thaliana
  misc_feature: MA Experiment 20001904 PARAMETER Experiment Name: At_Drought_Reproduction_P Parameter: Plant Line Value: WS
  misc_feature: MA Experiment 20001904 PARAMETER Experiment Name: At_Drought_Reproduction_P Parameter: Timepoint (day) Value: 7
  misc_feature: MA Experiment 20001904 PARAMETER Experiment Name: At_Drought_Reproduction_P Parameter: Tissue Value: Rosettes
  misc_feature: MA Experiment 20001904 PARAMETER Experiment Name: At_Drought_Reproduction_P Parameter: Treatment Value: Drought vs. No Drought
aaccgcacaaacaaaatttcagctcctccatatccatcaagaaagatcaagaatcaagaactaatcaatatcgatcgatccgttaaaaaaaaatggatatgattccccaattgatggaaggctcttcagcttacggaggtgtcacaaacctcaacatcatctcaaacaactcctcctccgtcaccggagccaccggaggtgaagcaacgcaaccactgtcttcctcctcctcaccatcggcgaactcaagccgttacgagaaccagaagaggagagactggaacacgttcggacagtacttaaggaaccatcggccaccgctttcgctttcccgatgcagtggagctcacgtgctcgagttcctccgttacttggaccagttcggtaagacaaaagtccacacgaacatttgtcacttctatggccatcctaatcctccggcaccgtgtccgtgtcctctccgacaagcttggggaagtcttgacgctcttatcggtcgtcttcgagctgcctttgaggaaaacggaggcaagcctgagacgaatccttttggagctcgtgccgttaggctttatctaagggaagttagagatatgcagagtaaagctagaggtgttagctacgagaagaagaagcgaaagcgtcctcttccttcgtcgtcgacttcttcttcctccgccgtagctagccaccagcaatttcaaatgctaccgggtactagttctactactcaattaaagtttgagaagtaagtaattatataattaagagaaatggagtattttatgtaatctgaaatgtgatttggtctctttcttatatgttgattttaattttaggttatgtggttcagttttagttactagtgtatgctggggggaggaaggtagggttttcaattttatttatatctaataaaagagaaattcacatgt

SEQ ID NO: 97398 - protein, 219 aa, Arabidopsis thaliana
  peptide (1)..(219): Ceres Seq. ID no. 12737325
  misc_feature (36)..(168): Pfam Name: Protein of unknown function (DUF640) Pfam Description: Protein of unknown function (DUF640)
  misc_feature (1)..(219): Homolog of NCBI NO: 18402578 NR Description: expressed protein; protein id: At2g31160.1, by cDNA: gi_15912210, supported by cDNA: gi_19547988 [Arabidopsis >gi|25408134|pir||C84717 hypothetical protein At2g31160
  misc_feature (32)..(207): Homolog of NCBI NO: 37535384 NR Description: hypothetical protein [Oryza sativa (japonica group)] >gi|10140752|gb|AAG13584.1| hypothetical protein [Oryza >gi|31432676|gb|AAP54281.1| hypothetical protein [Oryza sativa
  misc_feature (20)..(201): Homolog of NCBI NO: 38344650 NR Description: OSJNBb0072M01.12 [Oryza sativa (japonica
  misc_feature (31)..(213): Homolog of NCBI NO: 34907938 NR Description: B1088C09.17 [Oryza sativa (japonica
  misc_feature (20)..(210): Homolog of NCBI NO: 15229310 NR Description: unknown protein; protein id: At3g04510.1 thaliana] >gi|7547110|gb|AAF63782.1| unknown protein [Arabidopsis
  misc_feature (41)..(210): Homolog of NCBI NO: 15241821 NR Description: putative protein; protein id: At5g28490.1
  misc_feature (36)..(201): Homolog of NCBI NO: 18390725 NR Description: expressed protein; protein id: At1g07090.1, by cDNA: 28780. [Arabidopsis thaliana] >gi|25341953|pir||G86205
  misc_feature (32)..(191): Homolog of NCBI NO: 15237680 NR Description: putative protein; protein id: At5g58500.1 thaliana] >gi|10177027|dbj|BAB10265.1|
  misc_feature (43)..(203): Homolog of NCBI NO: 18406012 NR Description: expressed protein; protein id: At2g42610.1, by cDNA: gi_6691164 [Arabidopsis thaliana]
  misc_feature (23)..(199): Homolog of NCBI NO: 18412120 NR Description: Expressed protein; protein id: At1g78815.1, by cDNA: 230925. [Arabidopsis thaliana] >gi|25341951|pir||D96817
MDMIPQLMEGSSAYGGVTNLNIISNNSSSVTGATGGEATQPLSSSSSPSANSSRYENQKRRDWNTFGQYLRNHRPPLSLSRCSGAHVLEFLRYLDQFGKTKVHTNICHFYGHPNPPAPCPCPLRQAWGSLDALIGRLRAAFEENGGKPETNPFGARAVRLYLREVRDMQSKARGVSYEKKKRKRPLPSSSTSSSSAVASHQQFQMLPGTSSTTQLKFEK

SEQ ID NO: 97399 - protein, 217 aa, Arabidopsis thaliana
  peptide (1)..(217): Ceres Seq. ID no. 12737326
  misc_feature (34)..(166): Pfam Name: Protein of unknown function (DUF640) Pfam Description: Protein of unknown function (DUF640)
  misc_feature (1)..(217): Homolog of NCBI NO: 18402578 NR Description: expressed protein; protein id: At2g31160.1, by cDNA: gi_15912210, supported by cDNA: gi_19547988 [Arabidopsis >gi|25408134|pir||C84717 hypothetical protein At2g31160
  misc_feature (30)..(205): Homolog of NCBI NO: 37535384 NR Description: hypothetical protein [Oryza sativa (japonica group)] >gi|10140752|gb|AAG13584.1| hypothetical protein [Oryza >gi|31432676|gb|AAP54281.1| hypothetical protein [Oryza sativa
  misc_feature (18)..(199): Homolog of NCBI NO: 38344650 NR Description: OSJNBb0072M01.12 [Oryza sativa (japonica
  misc_feature (29)..(211): Homolog of NCBI NO: 34907938 NR Description: B1088C09.17 [Oryza sativa (japonica
  misc_feature (18)..(208): Homolog of NCBI NO: 15229310 NR Description: unknown protein; protein id: At3g04510.1 thaliana] >gi|7547110|gb|AAF63782.1| unknown protein [Arabidopsis
  misc_feature (39)..(208): Homolog of NCBI NO: 15241821 NR Description: putative protein; protein id: At5g28490.1
  misc_feature (34)..(199): Homolog of NCBI NO: 18390725 NR Description: expressed protein; protein id: At1g07090.1, by cDNA: 28780. [Arabidopsis thaliana] >gi|25341953|pir||G86205
  misc_feature (30)..(189): Homolog of NCBI NO: 15237680 NR Description: putative protein; protein id: At5g58500.1 thaliana] >gi|10177027|dbj|BAB10265.1|
  misc_feature (41)..(201): Homolog of NCBI NO: 18406012 NR Description: expressed protein; protein id: At2g42610.1, by cDNA: gi_6691164 [Arabidopsis thaliana]
  misc_feature (21)..(197): Homolog of NCBI NO: 18412120 NR Description: Expressed protein; protein id: At1g78815.1, by cDNA: 230925. [Arabidopsis thaliana] >gi|25341951|pir||D96817
MIPQLMEGSSAYGGVTNLNIISNNSSSVTGATGGEATQPLSSSSSPSANSSRYENQKRRDWNTFGQYLRNHRPPLSLSRCSGAHVLEFLRYLDQFGKTKVHTNICHFYGHPNPPAPCPCPLRQAWGSLDALIGRLRAAFEENGGKPETNPFGARAVRLYLREVRDMQSKARGVSYEKKKRKRPLPSSSTSSSSAVASHQQFQMLPGTSSTTQLKFEK

SEQ ID NO: 97400 - protein, 212 aa, Arabidopsis thaliana
  peptide (1)..(212): Ceres Seq. ID no. 12737327
  misc_feature (29)..(161): Pfam Name: Protein of unknown function (DUF640) Pfam Description: Protein of unknown function (DUF640)
  misc_feature (1)..(212): Homolog of NCBI NO: 18402578 NR Description: expressed protein; protein id: At2g31160.1, by cDNA: gi_15912210, supported by cDNA: gi_19547988 [Arabidopsis >gi|25408134|pir||C84717 hypothetical protein At2g31160
  misc_feature (25)..(200): Homolog of NCBI NO: 37535384 NR Description: hypothetical protein [Oryza sativa (japonica group)] >gi|10140752|gb|AAG13584.1| hypothetical protein [Oryza >gi|31432676|gb|AAP54281.1| hypothetical protein [Oryza sativa
  misc_feature (13)..(194): Homolog of NCBI NO: 38344650 NR Description: OSJNBb0072M01.12 [Oryza sativa (japonica
  misc_feature (24)..(206): Homolog of NCBI NO: 34907938 NR Description: B1088C09.17 [Oryza sativa (japonica
  misc_feature (13)..(203): Homolog of NCBI NO: 15229310 NR Description: unknown protein; protein id: At3g04510.1 thaliana] >gi|7547110|gb|AAF63782.1| unknown protein [Arabidopsis
  misc_feature (34)..(203): Homolog of NCBI NO: 15241821 NR Description: putative protein; protein id: At5g28490.1
  misc_feature (29)..(194): Homolog of NCBI NO: 18390725 NR Description: expressed protein; protein id: At1g07090.1, by cDNA: 28780. [Arabidopsis thaliana] >gi|25341953|pir||G86205
  misc_feature (25)..(184): Homolog of NCBI NO: 15237680 NR Description: putative protein; protein id: At5g58500.1 thaliana] >gi|10177027|dbj|BAB10265.1|
  misc_feature (36)..(196): Homolog of NCBI NO: 18406012 NR Description: expressed protein; protein id: At2g42610.1, by cDNA: gi_6691164 [Arabidopsis thaliana]
  misc_feature (16)..(192): Homolog of NCBI NO: 18412120 NR Description: Expressed protein; protein id: At1g78815.1, by cDNA: 230925. [Arabidopsis thaliana] >gi|25341951|pir||D96817
MEGSSAYGGVTNLNIISNNSSSVTGATGGEATQPLSSSSSPSANSSRYENQKRRDWNTFGQYLRNHRPPLSLSRCSGAHVLEFLRYLDQFGKTKVHTNICHFYGHPNPPAPCPCPLRQAWGSLDALIGRLRAAFEENGGKPETNPFGARAVRLYLREVRDMQSKARGVSYEKKKRKRPLPSSSTSSSSAVASHQQFQMLPGTSSTTQLKFEK

SEQ ID NO: 97401 - DNA, 2048 bp, Arabidopsis thaliana
  misc_feature (1)..(2048): Ceres Seq. ID no. 12737346
  misc_feature: MA Experiment ID: 20000180 Result: Down-regulated in Transcription
  misc_feature: MA Experiment 20000180 PARAMETER Experiment Name: At_Germinating_Seeds_P Parameter: Age (hr) Value: 24 vs. 0
  misc_feature: MA Experiment 20000180 PARAMETER Experiment Name: At_Germinating_Seeds_P Parameter: Tissue Value: Germinating Seeds
  misc_feature: MA Experiment ID: 20000184 Result: Down-regulated in Transcription
  misc_feature: MA Experiment 20000184 PARAMETER Experiment Name: At_Shoots__P Parameter: Age (day) Value: 7
  misc_feature: MA Experiment 20000184 PARAMETER Experiment Name: At_Shoots__P Parameter: Tissue Value: Shoots vs. Whole Plant
  misc_feature: MA Experiment ID: 20001451 Result: Down-regulated in Transcription
  misc_feature: MA Experiment 20001451 PARAMETER Experiment Name: At_Far-red-induction_P Parameter: Age (day) Value: 7
  misc_feature: MA Experiment 20001451 PARAMETER Experiment Name: At_Far-red-induction_P Parameter: Light Value: Far-red vs. White
  misc_feature: MA Experiment 20001451 PARAMETER Experiment Name: At_Far-red-induction_P Parameter: Organism Value: A. thaliana
  misc_feature: MA Experiment 20001451 PARAMETER Experiment Name: At_Far-red-induction_P Parameter: Plant Line Value: Columbia
  misc_feature: MA Experiment 20001451 PARAMETER Experiment Name: At_Far-red-induction_P Parameter: Timepoint (hr) Value: 24
  misc_feature: MA Experiment 20001451 PARAMETER Experiment Name: At_Far-red-induction_P Parameter: Tissue Value: Whole Plant
atttttgttagcgagaggattttctcgacgcgagctccggcaatgaaaagtttatcgatttctctaatccgtcggcttcatttccacaaaatcagaccaatcccactttcaatccaccttaatgctgcttcttcatcgtcttcgtcctcttctctgatctcgccagcacgcgaaatctccactagctgcagaagaaccaatgatctgatcaagcgtcagttctgggtcaatccatatcggaatttgaatacccatgtcgaggaacctccggagatttcgtcatctgataaagaaaaaatcgatctcgaagaagcgttcgagtcagcgaacaccactgatgaaatggtacgtttgttcaaggagatggagttatcattcgaagggaacgaattaggtttatctgctttgaaattagggctccatctcgatcgtgaaggtgaagatcctgaaaaggttctgtcttacgctgataaagctcttaaatcattcgatggagatggtaataaacctaatcttctcgttgctatggcgtcgcaattaatgggttctgctaattacggtttgaaacgttttagtgatagtttaggttacttgaatagagctaataggattcttgtgaagttagaggcggatggtgattgtgttgtggaagacgttaggcctgttttacacgctgtgcagcttgagcttgctaatgttaagaatgctatgggaaggagagaggaagctattgagaatttgaagaagagtttggagataaaggagatgacttttgatgaagatagtaaagagatgggtgttgcgaatcggagtcttgctgatgcttatgttgcggttttgaattttaatgaggctttgccttatgcgttgaaggcgttggagattcataagaaggagttggggaataattcagctgaggttgcgcaggatcggaggctactcggtgtgatttatagtggtttggagcaacatgacaaggcgttggagcagaaccgattgtctcagagagtgttaaagaattgggggatgaagttggagctgattcgtgcggagattgatgctgctaacatgaaggttgctttgggtaaatacgaggaagcgattgatatattgaagagcgttgttcaacaaactgacaaggacagtgagatgagagctatggtgtttatatcaatgtcgaaagctttggtaaaccaacagaagtttgctgaatcaaagagatgtttggagtttgcttgtgaaatcctcgagaaaaaagaaacagctttgccagttgaagtcgctgaagcatactctgaggtagcaatgcagtacgagtcaatgaacgaatttgaaaccgccatctctttattgcagaaaactttaggtatactagagaagcttcctcaagaacagcactcagaaggaagtgtttctgctaggataggttggttgcttctattctcaggccgagtctcacaagcggttccttacttggaaagtgcagccgagaggttaaaagaaagctttggtgctaaacattttggagttggatatgtatataacaatctcggtgctgcttatttagaactcggaagacctcaatccgctgctcaaatgtttgcagttgctaaagacattatggatgtttcacttggtccaaaccatgtggattccatcgatgcttgccagaatctttctaaagcttacgctggaatgggaaattatagcctcgcagtggaatttcaacagcgagtaatcaatgcttgggataatcatggagatagcgcgaaagacgaaatgaaagaagcgaaaagacttcttgaggatttgcgattgaaggctcgaggaggtgtatcaacgaataagcttctgaataaggctttacctttgcccaagccaagccattcatcttagtgagctttgtgaagtctcagccccaaagaacaatgaaaagaatagtgagatttaatgttttttcttttcaaatgatcgtcgtatactaaactcttgttttgccactgaattatgaagttattctcgaaataatttgtttagctacttcgatc

SEQ ID NO: 97402 - protein, 631 aa, Arabidopsis thaliana
  peptide (1)..(631): Ceres Seq. ID no. 12737347
  misc_feature (553)..(586): Pfam Name: TPR Domain Pfam Description: TPR Domain
  misc_feature (122)..(631): Homolog of NCBI NO: 25408142 NR Description: probable kinesin light chain [imported] - thaliana >gi|4432819|gb|AAD20669.1| putative kinesin light chain
  misc_feature (135)..(610): Homolog of NCBI NO: 27261475 NR Description: Hypothetical protein [Oryza sativa (japonica
  misc_feature (125)..(627): Homolog of NCBI NO: 15236944 NR Description: putative protein; protein id: At4g10840.1, by cDNA: 2538., supported by cDNA: gi_18176147, supported by
  misc_feature (125)..(627): Homolog of NCBI NO: 21554384 NR Description: putative kinesin light chain [Arabidopsis
  misc_feature (127)..(618): Homolog of NCBI NO: 15232873 NR Description: hypothetical protein; protein id: At3g27960.1 thaliana] >gi|9294312|dbj|BAB01483.1| contains similarity to
  misc_feature (127)..(618): Homolog of NCBI NO: 33589662 NR Description: At3g27960 [Arabidopsis thaliana]
  misc_feature (123)..(622): Homolog of NCBI NO: 20152971 NR Description: similar to A. thaliana protein BAB01483 similar
  misc_feature (84)..(622): Homolog of NCBI NO: 19387245 NR Description: putative kinesin light chain gene [Oryza sativa
  misc_feature (123)..(616): Homolog of NCBI NO: 15223528 NR Description: hypothetical protein; protein id: At1g27500.1
  misc_feature (123)..(616): Homolog of NCBI NO: 26450936 NR Description: unknown protein [Arabidopsis thaliana]
IFVSERIFSTRAPAMKSLSISLIRRLHFHKIRPIPLSIHLNAASSSSSSSSLISPAREISTSCRRTNDLIKRQFWVNPYRNLNTHVEEPPEISSSDKEKIDLEEAFESANTTDEMVRLFKEMELSFEGNELGLSALKLGLHLDREGEDPEKVLSYADKALKSFDGDGNKPNLLVAMASQLMGSANYGLKRFSDSLGYLNRANRILVKLEADGDCVVEDVRPVLHAVQLELANVKNAMGRREEAIENLKKSLEIKEMTFDEDSKEMGVANRSLADAYVAVLNFNEALPYALKALEIHKKELGNNSAEVAQDRRLLGVIYSGLEQHDKALEQNRLSQRVLKNWGMKLELIRAEIDAANMKVALGKYEEAIDILKSVVQQTDKDSEMRAMVFISMSKALVNQQKFAESKRCLEFACEILEKKETALPVEVAEAYSEVAMQYESMNEFETAISLLQKTLGILEKLPQEQHSEGSVSARIGWLLLFSGRVSQAVPYLESAAERLKESFGAKHFGVGYVYNNLGAAYLELGRPQSAAQMFAVAKDIMDVSLGPNHVDSIDACQNLSKAYAGMGNYSLAVEFQQRVINAWDNHGDSAKDEMKEAKRLLEDLRLKARGGVSTNKLLNKALPLPKPSHSS

SEQ ID NO: 97403 - protein, 617 aa, Arabidopsis thaliana
  peptide (1)..(617): Ceres Seq. ID no. 12737348
  misc_feature (539)..(572): Pfam Name: TPR Domain Pfam Description: TPR Domain
  misc_feature (108)..(617): Homolog of NCBI NO: 25408142 NR Description: probable kinesin light chain [imported] - thaliana >gi|4432819|gb|AAD20669.1| putative kinesin light chain
  misc_feature (121)..(596): Homolog of NCBI NO: 27261475 NR Description: Hypothetical protein [Oryza sativa (japonica
  misc_feature (111)..(613): Homolog of NCBI NO: 15236944 NR Description: putative protein; protein id: At4g10840.1, by cDNA: 2538., supported by cDNA: gi_18176147, supported by
  misc_feature (111)..(613): Homolog of NCBI NO: 21554384 NR Description: putative kinesin light chain [Arabidopsis
  misc_feature (113)..(604): Homolog of NCBI NO: 15232873 NR Description: hypothetical protein; protein id: At3g27960.1 thaliana] >gi|9294312|dbj|BAB01483.1| contains similarity to
  misc_feature (113)..(604): Homolog of NCBI NO: 33589662 NR Description: At3g27960 [Arabidopsis thaliana]
  misc_feature (109)..(608): Homolog of NCBI NO: 20152971 NR Description: similar to A. thaliana protein BAB01483 similar
  misc_feature (70)..(608): Homolog of NCBI NO: 19387245 NR Description: putative kinesin light chain gene [Oryza sativa
  misc_feature (109)..(602): Homolog of NCBI NO: 15223528 NR Description: hypothetical protein; protein id: At1g27500.1
  misc_feature (109)..(602): Homolog of NCBI NO: 26450936 NR Description: unknown protein [Arabidopsis thaliana]
MKSLSISLIRRLHFHKIRPIPLSIHLNAASSSSSSSSLISPAREISTSCRRTNDLIKRQFWVNPYRNLNTHVEEPPEISSSDKEKIDLEEAFESANTTDEMVRLFKEMELSFEGNELGLSALKLGLHLDREGEDPEKVLSYADKALKSFDGDGNKPNLLVAMASQLMGSANYGLKRFSDSLGYLNRANRILVKLEADGDCVVEDVRPVLHAVQLELANVKNAMGRREEAIENLKKSLEIKEMTFDEDSKEMGVANRSLADAYVAVLNFNEALPYALKALEIHKKELGNNSAEVAQDRRLLGVIYSGLEQHDKALEQNRLSQRVLKNWGMKLELIRAEIDAANMKVALGKYEEAIDILKSVVQQTDKDSEMRAMVFISMSKALVNQQKFAESKRCLEFACEILEKKETALPVEVAEAYSEVAMQYESMNEFETAISLLQKTLGILEKLPQEQHSEGSVSARIGWLLLFSGRVSQAVPYLESAAERLKESFGAKHFGVGYVYNNLGAAYLELGRPQSAAQMFAVAKDIMDVSLGPNHVDSIDACQNLSKAYAGMGNYSLAVEFQQRVINAWDNHGDSAKDEMKEAKRLLEDLRLKARGGVSTNKLLNKALPLPKPSHSS

SEQ ID NO: 97404 - protein, 517 aa, Arabidopsis thaliana
  peptide (1)..(517): Ceres Seq. ID no. 12737349
  misc_feature (439)..(472): Pfam Name: TPR Domain Pfam Description: TPR Domain
  misc_feature (8)..(517): Homolog of NCBI NO: 25408142 NR Description: probable kinesin light chain [imported] - thaliana >gi|4432819|gb|AAD20669.1| putative kinesin light chain
  misc_feature (21)..(496): Homolog of NCBI NO: 27261475 NR Description: Hypothetical protein [Oryza sativa (japonica
  misc_feature (11)..(513): Homolog of NCBI NO: 15236944 NR Description: putative protein; protein id: At4g10840.1, by cDNA: 2538., supported by cDNA: gi_18176147, supported by
  misc_feature (11)..(513): Homolog of NCBI NO: 21554384 NR Description: putative kinesin light chain [Arabidopsis
  misc_feature (13)..(504): Homolog of NCBI NO: 15232873 NR Description: hypothetical protein; protein id: At3g27960.1 thaliana] >gi|9294312|dbj|BAB01483.1| contains similarity to
  misc_feature (13)..(504): Homolog of NCBI NO: 33589662 NR Description: At3g27960 [Arabidopsis thaliana]
  misc_feature (9)..(508): Homolog of NCBI NO: 20152971 NR Description: similar to A. thaliana protein BAB01483 similar
  misc_feature (1)..(508): Homolog of NCBI NO: 19387245 NR Description: putative kinesin light chain gene [Oryza sativa
  misc_feature (9)..(502): Homolog of NCBI NO: 15223528 NR Description: hypothetical protein; protein id: At1g27500.1
  misc_feature (9)..(502): Homolog of NCBI NO: 26450936 NR Description: unknown protein [Arabidopsis thaliana]
MVRLFKEMELSFEGNELGLSALKLGLHLDREGEDPEKVLSYADKALKSFDGDGNKPNLLVAMASQLMGSANYGLKRFSDSLGYLNRANRILVKLEADGDCVVEDVRPVLHAVQLELANVKNAMGRREEAIENLKKSLEIKEMTFDEDSKEMGVANRSLADAYVAVLNFNEALPYALKALEIHKKELGNNSAEVAQDRRLLGVIYSGLEQHDKALEQNRLSQRVLKNWGMKLELIRAEIDAANMKVALGKYEEAIDILKSVVQQTDKDSEMRAMVFISMSKALVNQQKFAESKRCLEFACEILEKKETALPVEVAEAYSEVAMQYESMNEFETAISLLQKTLGILEKLPQEQHSEGSVSARIGWLLLFSGRVSQAVPYLESAAERLKESFGAKHFGVGYVYNNLGAAYLELGRPQSAAQMFAVAKDIMDVSLGPNHVDSIDACQNLSKAYAGMGNYSLAVEFQQRVINAWDNHGDSAKDEMKEAKRLLEDLRLKARGGVSTNKLLNKALPLPKPSHSS

SEQ ID NO: 97405 - DNA, 660 bp, Arabidopsis thaliana
  misc_feature (1)..(660): Ceres Seq. ID no. 12737376
  misc_feature: MA Experiment ID: 20000355 Result: Up-regulated in Transcription
  misc_feature: MA Experiment 20000355 PARAMETER Experiment Name: At_Siliques_Sub_P Parameter: Age (day) Value: 21
  misc_feature: MA Experiment 20000355 PARAMETER Experiment Name: At_Siliques_Sub_P Parameter: Organism Value: A. thaliana
  misc_feature: MA Experiment 20000355 PARAMETER Experiment Name: At_Siliques_Sub_P Parameter: Plant Line Value: WS
  misc_feature: MA Experiment 20000355 PARAMETER Experiment Name: At_Siliques_Sub_P Parameter: Tissue Value: Less Than 5mm Siliques vs. Whole Plant
atgttcaagagttacattgctcgtctcaaaggtatcgtgggagacaagaaagcgatggagatcataaacaatgctttcgtggttgtgagtgcagggcctaatgatttcattttgaactattacgatattccctcaaggcgtctcgagtatcctttcatttctggttaccaagattttattcttaagaggcttgaaaatttcgtgcgggagctttacagtttaggtgtccggaatgttttggttggaggtttaccgccaatggggtgtttaccgatccatatgactgctaaattccgcaacatttttagattctgcttggaacaccataacaaagactctgttttgtacaatgagaaacttcagaagctcttgccccaaatcgaagcatctcttccaggaagcaaattcctttacgccgatgtctataatcctatgatggagatgatccaaaaccctagcaaatacgggttcaaagagacgaagagaggatgttgtggaacagggttcttggagacgagcttcatgtgtaatgtcttttctcctgtgtgtcaaaatcggtcggagtttatgttctttgactcgattcatccatcggaagctacctataatgtcataggcaatcgtctggatcctctgattcgtgggaagtttcaggcttaa

SEQ ID NO: 97406 - protein, 219 aa, Arabidopsis thaliana; identical to SEQ ID NO: 78385
  peptide (1)..(219): Ceres Seq. ID no. 12737377
  misc_feature (1)..(209): Pfam Name: GDSL-like Lipase/Acylhydrolase Pfam Description: GDSL-like Lipase/Acylhydrolase
  misc_feature (1)..(219): Homolog of NCBI NO: 18402700 NR Description: putative GDSL-motif lipase/hydrolase; protein id:
  misc_feature (1)..(219): Homolog of NCBI NO: 21537117 NR Description: putative GDSL-motif lipase/hydrolase [Arabidopsis
  misc_feature (1)..(219): Homolog of NCBI NO: 15225096 NR Description: putative GDSL-motif lipase/hydrolase; protein id:
  misc_feature (11)..(219): Homolog of NCBI NO: 25336273 NR Description: probable GDSL-motif lipase/hydrolase [imported] -
  misc_feature (1)..(219): Homolog of NCBI NO: 15217963 NR Description: proline-rich protein, putative; protein id:
  misc_feature (1)..(219): Homolog of NCBI NO: 25336283 NR Description: hypothetical protein RXF26 [imported] -
  misc_feature (1)..(219): Homolog of NCBI NO: 21592974 NR Description: proline-rich protein, putative [Arabidopsis
  misc_feature (1)..(219): Homolog of NCBI NO: 15227734 NR Description: putative GDSL-motif lipase/hydrolase; protein id:
  misc_feature (1)..(214): Homolog of NCBI NO: 15227723 NR Description: putative GDSL-motif lipase hydrolase; protein id:
  misc_feature (1)..(160): Homolog of NCBI NO: 15224162 NR Description: putative GDSL-motif lipase/hydrolase; protein id:

SEQ ID NO: 97407 - protein, 201 aa, Arabidopsis thaliana
  peptide (1)..(201): Ceres Seq. ID no. 12737378
  misc_feature (1)..(191): Pfam Name: GDSL-like Lipase/Acylhydrolase Pfam Description: GDSL-like Lipase/Acylhydrolase
  misc_feature (1)..(201): Homolog of NCBI NO: 18402700 NR Description: putative GDSL-motif lipase/hydrolase; protein id:
  misc_feature (1)..(201): Homolog of NCBI NO: 21537117 NR Description: putative GDSL-motif lipase/hydrolase [Arabidopsis
  misc_feature (1)..(201): Homolog of NCBI NO: 15225096 NR Description: putative GDSL-motif lipase/hydrolase; protein id:
  misc_feature (1)..(201): Homolog of NCBI NO: 25336273 NR Description: probable GDSL-motif lipase/hydrolase [imported] -
  misc_feature (1)..(201): Homolog of NCBI NO: 15217963 NR Description: proline-rich protein, putative; protein id:
  misc_feature (1)..(201): Homolog of NCBI NO: 25336283 NR Description: hypothetical protein RXF26 [imported] -
  misc_feature (1)..(201): Homolog of NCBI NO: 21592974 NR Description: proline-rich protein, putative [Arabidopsis
  misc_feature (1)..(201): Homolog of NCBI NO: 15227734 NR Description: putative GDSL-motif lipase/hydrolase; protein id:
  misc_feature (1)..(196): Homolog of NCBI NO: 15227723 NR Description: putative GDSL-motif lipase hydrolase; protein id:
  misc_feature (1)..(142): Homolog of NCBI NO: 15224162 NR Description: putative GDSL-motif lipase/hydrolase; protein id:
MEIINNAFVVVSAGPNDFILNYYDIPSRRLEYPFISGYQDFILKRLENFVRELYSLGVRNVLVGGLPPMGCLPIHMTAKFRNIFRFCLEHHNKDSVLYNEKLQKLLPQIEASLPGSKFLYADVYNPMMEMIQNPSKYGFKETKRGCCGTGFLETSFMCNVFSPVCQNRSEFMFFDSIHPSEATYNVIGNRLDPLIRGKFQA

SEQ ID NO: 97408 - protein, 133 aa, Arabidopsis thaliana
  peptide (1)..(133): Ceres Seq. ID no. 12737379
  misc_feature (1)..(123): Pfam Name: GDSL-like Lipase/Acylhydrolase Pfam Description: GDSL-like Lipase/Acylhydrolase
  misc_feature (1)..(133): Homolog of NCBI NO: 18402700 NR Description: putative GDSL-motif lipase/hydrolase; protein id:
  misc_feature (1)..(133): Homolog of NCBI NO: 21537117 NR Description: putative GDSL-motif lipase/hydrolase [Arabidopsis
  misc_feature (1)..(133): Homolog of NCBI NO: 15225096 NR Description: putative GDSL-motif lipase/hydrolase; protein id:
  misc_feature (1)..(133): Homolog of NCBI NO: 25336273 NR Description: probable GDSL-motif lipase/hydrolase [imported] -
  misc_feature (1)..(133): Homolog of NCBI NO: 15217963 NR Description: proline-rich protein, putative; protein id:
  misc_feature (1)..(133): Homolog of NCBI NO: 25336283 NR Description: hypothetical protein RXF26 [imported] -
  misc_feature (1)..(133): Homolog of NCBI NO: 21592974 NR Description: proline-rich protein, putative [Arabidopsis
  misc_feature (1)..(133): Homolog of NCBI NO: 15227734 NR Description: putative GDSL-motif lipase/hydrolase; protein id:
  misc_feature (1)..(128): Homolog of NCBI NO: 15227723 NR Description: putative GDSL-motif lipase hydrolase; protein id:
  misc_feature (1)..(74): Homolog of NCBI NO: 15224162 NR Description: putative GDSL-motif lipase/hydrolase; protein id:
MGCLPIHMTAKFRNIFRFCLEHHNKDSVLYNEKLQKLLPQIEASLPGSKFLYADVYNPMMEMIQNPSKYGFKETKRGCCGTGFLETSFMCNVFSPVCQNRSEFMFFDSIHPSEATYNVIGNRLDPLIRGKFQA

SEQ ID NO: 97409 - DNA, 768 bp, Arabidopsis thaliana
  misc_feature (1)..(768): Ceres Seq. ID no. 12737380
  misc_feature: MA Experiment ID: 20000327 Result: Up-regulated in Transcription
  misc_feature: MA Experiment 20000327 PARAMETER Experiment Name: At_42deg_Heat_Sub_P Parameter: Age (day) Value: 14
  misc_feature: MA Experiment 20000327 PARAMETER Experiment Name: At_42deg_Heat_Sub_P Parameter: Organism Value: A. thaliana
  misc_feature: MA Experiment 20000327 PARAMETER Experiment Name: At_42deg_Heat_Sub_P Parameter: Plant Line Value: WS
  misc_feature: MA Experiment 20000327 PARAMETER Experiment Name: At_42deg_Heat_Sub_P Parameter: Temperature (deg C) Value: 42 vs. 22
  misc_feature: MA Experiment 20000327 PARAMETER Experiment Name: At_42deg_Heat_Sub_P Parameter: Timepoint (hr) Value: 1
  misc_feature: MA Experiment 20000327 PARAMETER Experiment Name: At_42deg_Heat_Sub_P Parameter: Tissue Value: Aerial
  misc_feature: MA Experiment ID: 20000328 Result: Up-regulated in Transcription
  misc_feature: MA Experiment 20000328 PARAMETER Experiment Name: At_42deg_Heat_Sub_P Parameter: Age (day) Value: 14
  misc_feature: MA Experiment 20000328 PARAMETER Experiment Name: At_42deg_Heat_Sub_P Parameter: Organism Value: A. thaliana
  misc_feature: MA Experiment 20000328 PARAMETER Experiment Name: At_42deg_Heat_Sub_P Parameter: Plant Line Value: WS
  misc_feature: MA Experiment 20000328 PARAMETER Experiment Name: At_42deg_Heat_Sub_P Parameter: Temperature (deg C) Value: 42 vs. 22
  misc_feature: MA Experiment 20000328 PARAMETER Experiment Name: At_42deg_Heat_Sub_P Parameter: Timepoint (hr) Value: 6
  misc_feature: MA Experiment 20000328 PARAMETER Experiment Name: At_42deg_Heat_Sub_P Parameter: Tissue Value: Aerial
atgttttcttcctctgtatccatctctatcttggtcgtggtggccatgcaattctcttttatccacaatgttttgtccctaaatcagaccaattcgtatctgcaacacatatgcatcaacagtgaaggaaaatacaaggcaaagaattcatacgagagcagactcaaagatcatctcgacagtatgtctaacattctagactacggtttcatccacggtgttggtggtgcggattctagtacctactacatcaaggcccaatgtcggggagatgcctccgaatccaagtgccgctcttgcctctttaccgccttctctgggattcttaggagatgtccgaacaacagagggagaataatatggtacgacaactgttttctctacatttccgagatatatacctacgagaagattgatttcaagcactatttgtatttgcacaatgccaaagatgtgagcggcaataaaaagttgttcaacaagaacacaaaggctctcctagataagctcaaggagaaagcaattcgtaaagaacaagagccttacacaagagactacatgtatgcagcgggggaggaaagtctcgggacgacgaaattgtatgggatgatgcagtgtacacaagacttatcagttaaaaattgcagtgtgtgtttggattcgattattgcaaagcttcccagatgctgcaacggtaaacaaggaggaagagttttgaatccgagttgtacttttaggtacgagctctatccttttgtaaaaccgtaa

SEQ ID NO: 97410 - protein, 255 aa, Arabidopsis thaliana
  peptide (1)..(255): Ceres Seq. ID no. 12737381
  misc_feature (82)..(136): Pfam Name: Domain of unknown function DUF26 Pfam Description: Domain of unknown function DUF26
  misc_feature (1)..(255): Homolog of NCBI NO: 15225108 NR Description: receptor kinase, putative; protein id: [Arabidopsis thaliana] >gi|25408171|pir||A84723 hypothetical
  misc_feature (6)..(254): Homolog of NCBI NO: 15233214 NR Description: hypothetical protein; protein id: At3g21960.1 thaliana] >gi|9279750|dbj|BAB01376.1| contains similarity to
  misc_feature (23)..(253): Homolog of NCBI NO: 9279746 NR Description: contains similarity to receptor protein
  misc_feature (141)..(254): Homolog of NCBI NO: 9279752 NR Description: gb|AAD24839.1~gene_id:MZN24.13~similar to unknown
  misc_feature (6)..(106): Homolog of NCBI NO: 9279752 NR Description: gb|AAD24839.1~gene_id:MZN24.13~similar to unknown
  misc_feature (7)..(254): Homolog of NCBI NO: 15233211 NR Description: hypothetical protein; protein id: At3g21940.1 thaliana] >gi|9279747|dbj|BAB01373.1| contains similarity to
  misc_feature (4)..(254): Homolog of NCBI NO: 15233235 NR Description: receptor kinase common family, putative; protein At3g21990.1 [Arabidopsis thaliana] >gi|9279756|dbj|BAB01382.1| similarity to receptor kinase~gene_id:MZN24.17 [Arabidopsis
  misc_feature (1)..(254): Homolog of NCBI NO: 9279748 NR Description: gb|AAD24839.1~gene_id:MZN24.9~similar to unknown
  misc_feature (4)..(254): Homolog of NCBI NO: 15233366 NR Description: pollen coat receptor kinase, putative; protein At4g20670.1 [Arabidopsis thaliana] >gi|7485931|pir||T10609
  misc_feature (11)..(253): Homolog of NCBI NO: 15231012 NR Description: putative protein; protein id: At3g58310.1
MFSSSVSISILVVVAMQFSFIHNVLSLNQTNSYLQHICINSEGKYKAKNSYESRLKDHLDSMSNILDYGFIHGVGGADSSTYYIKAQCRGDASESKCRSCLFTAFSGILRRCPNNRGRIIWYDNCFLYISEIYTYEKIDFKHYLYLHNAKDVSGNKKLFNKNTKALLDKLKEKAIRKEQEPYTRDYMYAAGEESLGTTKLYGMMQCTQDLSVKNCSVCLDSIIAKLPRCCNGKQGGRVLNPSCTFRYELYPFVKP

SEQ ID NO: 97411 - protein, 240 aa, Arabidopsis thaliana
  peptide (1)..(240): Ceres Seq. ID no. 12737382
  misc_feature (67)..(121): Pfam Name: Domain of unknown function DUF26 Pfam Description: Domain of unknown function DUF26
  misc_feature (1)..(240): Homolog of NCBI NO: 15225108 NR Description: receptor kinase, putative; protein id: [Arabidopsis thaliana] >gi|25408171|pir||A84723 hypothetical
  misc_feature (1)..(239): Homolog of NCBI NO: 15233214 NR Description: hypothetical protein; protein id: At3g21960.1 thaliana] >gi|9279750|dbj|BAB01376.1| contains similarity to
  misc_feature (8)..(238): Homolog of NCBI NO: 9279746 NR Description: contains similarity to receptor protein
  misc_feature (126)..(239): Homolog of NCBI NO: 9279752 NR Description: gb|AAD24839.1~gene_id:MZN24.13~similar to unknown
  misc_feature (1)..(91): Homolog of NCBI NO: 9279752 NR Description: gb|AAD24839.1~gene_id:MZN24.13~similar to unknown
  misc_feature (1)..(239): Homolog of NCBI NO: 15233211 NR Description: hypothetical protein; protein id: At3g21940.1 thaliana] >gi|9279747|dbj|BAB01373.1| contains similarity to
  misc_feature (1)..(239): Homolog of NCBI NO: 15233235 NR Description: receptor kinase common family, putative; protein At3g21990.1 [Arabidopsis thaliana] >gi|9279756|dbj|BAB01382.1| similarity to receptor kinase~gene_id:MZN24.17 [Arabidopsis
  misc_feature (1)..(239): Homolog of NCBI NO: 9279748 NR Description: gb|AAD24839.1~gene_id:MZN24.9~similar to unknown
  misc_feature (1)..(239): Homolog of NCBI NO: 15233366 NR Description: pollen coat receptor kinase, putative; protein At4g20670.1 [Arabidopsis thaliana] >gi|7485931|pir||T10609
  misc_feature (1)..(238): Homolog of NCBI NO: 15231012 NR Description: putative protein; protein id: At3g58310.1
MQFSFIHNVLSLNQTNSYLQHICINSEGKYKAKNSYESRLKDHLDSMSNILDYGFIHGVGGADSSTYYIKAQCRGDASESKCRSCLFTAFSGILRRCPNNRGRIIWYDNCFLYISEIYTYEKIDFKHYLYLHNAKDVSGNKKLFNKNTKALLDKLKEKAIRKEQEPYTRDYMYAAGEESLGTTKLYGMMQCTQDLSVKNCSVCLDSIIAKLPRCCNGKQGGRVLNPSCTFRYELYPFVKP

SEQ ID NO: 97412 - protein, 194 aa, Arabidopsis thaliana
  peptide (1)..(194): Ceres Seq. ID no. 12737383
  misc_feature (21)..(75): Pfam Name: Domain of unknown function DUF26 Pfam Description: Domain of unknown function DUF26
  misc_feature (1)..(194): Homolog of NCBI NO: 15225108 NR Description: receptor kinase, putative; protein id: [Arabidopsis thaliana] >gi|25408171|pir||A84723 hypothetical
  misc_feature (1)..(193): Homolog of NCBI NO: 15233214 NR Description: hypothetical protein; protein id: At3g21960.1 thaliana] >gi|9279750|dbj|BAB01376.1| contains similarity to
  misc_feature (1)..(192): Homolog of NCBI NO: 9279746 NR Description: contains similarity to receptor protein
  misc_feature (80)..(193): Homolog of NCBI NO: 9279752 NR Description: gb|AAD24839.1~gene_id:MZN24.13~similar to unknown
  misc_feature (1)..(45): Homolog of NCBI NO: 9279752 NR Description: gb|AAD24839.1~gene_id:MZN24.13~similar to unknown
  misc_feature (1)..(193): Homolog of NCBI NO: 15233211 NR Description: hypothetical protein; protein id: At3g21940.1 thaliana] >gi|9279747|dbj|BAB01373.1| contains similarity to
  misc_feature (1)..(193): Homolog of NCBI NO: 15233235 NR Description: receptor kinase common family, putative; protein At3g21990.1 [Arabidopsis thaliana] >gi|9279756|dbj|BAB01382.1| similarity to receptor kinase~gene_id:MZN24.17 [Arabidopsis
  misc_feature (1)..(193): Homolog of NCBI NO: 9279748 NR Description: gb|AAD24839.1~gene_id:MZN24.9~similar to unknown
  misc_feature (1)..(193): Homolog of NCBI NO: 15233366 NR Description: pollen coat receptor kinase, putative; protein At4g20670.1 [Arabidopsis thaliana] >gi|7485931|pir||T10609
  misc_feature (1)..(192): Homolog of NCBI NO: 15231012 NR Description: putative protein; protein id: At3g58310.1
MSNILDYGFIHGVGGADSSTYYIKAQCRGDASESKCRSCLFTAFSGILRRCPNNRGRIIWYDNCFLYISEIYTYEKIDFKHYLYLHNAKDVSGNKKLFNKNTKALLDKLKEKAIRKEQEPYTRDYMYAAGEESLGTTKLYGMMQCTQDLSVKNCSVCLDSIIAKLPRCCNGKQGGRVLNPSCTFRYELYPFVKP

SEQ ID NO: 97413 - DNA, 2077 bp, Arabidopsis thaliana
  misc_feature (1)..(2077): Ceres Seq. ID no. 12737426
  misc_feature: MA Experiment ID: 20000171 Result: Down-regulated in Transcription
  misc_feature: MA Experiment 20000171 PARAMETER Experiment Name: At_42deg_Heat_P Parameter: Age (day) Value: 14
  misc_feature: MA Experiment 20000171 PARAMETER Experiment Name: At_42deg_Heat_P Parameter: Organism Value: A. thaliana
  misc_feature: MA Experiment 20000171 PARAMETER Experiment Name: At_42deg_Heat_P Parameter: Plant Line Value: WS
  misc_feature: MA Experiment 20000171 PARAMETER Experiment Name: At_42deg_Heat_P Parameter: Temperature (deg C) Value: 42 vs. 22
  misc_feature: MA Experiment 20000171 PARAMETER Experiment Name: At_42deg_Heat_P Parameter: Timepoint (hr) Value: 1
  misc_feature: MA Experiment 20000171 PARAMETER Experiment Name: At_42deg_Heat_P Parameter: Tissue Value: Aerial
  misc_feature: MA Experiment ID: 20000173 Result: Down-regulated in Transcription
  misc_feature: MA Experiment 20000173 PARAMETER Experiment Name: At_42deg_Heat_P Parameter: Age (day) Value: 14
  misc_feature: MA Experiment 20000173 PARAMETER Experiment Name: At_42deg_Heat_P Parameter: Organism Value: A. thaliana
  misc_feature: MA Experiment 20000173 PARAMETER Experiment Name: At_42deg_Heat_P Parameter: Plant Line Value: WS
  misc_feature: MA Experiment 20000173 PARAMETER Experiment Name: At_42deg_Heat_P Parameter: Temperature (deg C) Value: 42 vs. 22
  misc_feature: MA Experiment 20000173 PARAMETER Experiment Name: At_42deg_Heat_P Parameter: Timepoint (hr) Value: 6
  misc_feature: MA Experiment 20000173 PARAMETER Experiment Name: At_42deg_Heat_P Parameter: Tissue Value: Aerial
  misc_feature: MA Experiment ID: 20000182 Result: Up-regulated in Transcription
  misc_feature: MA Experiment 20000182 PARAMETER Experiment Name: At_2mM_SA_P Parameter: Age (day) Value: 14
  misc_feature: MA Experiment 20000182 PARAMETER Experiment Name: At_2mM_SA_P Parameter: Organism Value: A. thaliana
  misc_feature: MA Experiment 20000182 PARAMETER Experiment Name: At_2mM_SA_P Parameter: Plant Line Value: WS
  misc_feature: MA Experiment 20000182 PARAMETER Experiment Name: At_2mM_SA_P Parameter: Timepoint (hr) Value: 6
  misc_feature: MA Experiment 20000182 PARAMETER Experiment Name: At_2mM_SA_P Parameter: Tissue Value: Aerial
  misc_feature: MA Experiment 20000182 PARAMETER Experiment Name: At_2mM_SA_P Parameter: Treatment Value: 2mM SA vs. No Treatment
  misc_feature: MA Experiment ID: 20000184 Result: Down-regulated in Transcription
  misc_feature: MA Experiment 20000184 PARAMETER Experiment Name: At_Shoots__P Parameter: Age (day) Value: 7
  misc_feature: MA Experiment 20000184 PARAMETER Experiment Name: At_Shoots__P Parameter: Tissue Value: Shoots vs. Whole Plant
  misc_feature: MA Experiment ID: 20000185 Result: Down-regulated in Transcription
  misc_feature: MA Experiment 20000185 PARAMETER Experiment Name: At_Roots__P Parameter: Age (day) Value: 7 vs. 21
  misc_feature: MA Experiment 20000185 PARAMETER Experiment Name: At_Roots__P Parameter: Organism Value: A. thaliana
  misc_feature: MA Experiment 20000185 PARAMETER Experiment Name: At_Roots__P Parameter: Tissue Value: Roots vs. Whole Plant
  misc_feature: MA Experiment ID: 20000227 Result: Down-regulated in Transcription
  misc_feature: MA Experiment 20000227 PARAMETER Experiment Name: At_Root-Tips-vs-Tops_P Parameter: Tissue Value: Root Tips vs. Root Tops
  misc_feature: MA Experiment ID: 20000234 Result: Down-regulated in Transcription
  misc_feature: MA Experiment 20000234 PARAMETER Experiment Name: At_Siliques_P Parameter: Age (day) Value: 21
  misc_feature: MA Experiment 20000234 PARAMETER Experiment Name: At_Siliques_P Parameter: Organism Value: A. thaliana
  misc_feature: MA Experiment 20000234 PARAMETER Experiment Name: At_Siliques_P Parameter: Plant Line Value: WS
  misc_feature: MA Experiment 20000234 PARAMETER Experiment Name: At_Siliques_P Parameter: Tissue Value: Less Than 5mm Siliques vs. Whole Plant
  misc_feature: MA Experiment ID: 20000264 Result: Down-regulated in Transcription
  misc_feature: MA Experiment 20000264 PARAMETER Experiment Name: At_Open_Flower_P Parameter: Age (day) Value: 21
  misc_feature: MA Experiment 20000264 PARAMETER Experiment Name: At_Open_Flower_P Parameter: Plant Line Value: WS
  misc_feature: MA Experiment 20000264 PARAMETER Experiment Name: At_Open_Flower_P Parameter: Tissue Value: Open Flower vs. Whole Plant
  misc_feature: MA Experiment ID: 20000265 Result: Down-regulated in Transcription
  misc_feature: MA Experiment 20000265 PARAMETER Experiment Name: At_Open_Flower_P Parameter: Age (day) Value: 21
  misc_feature: MA Experiment 20000265 PARAMETER Experiment Name: At_Open_Flower_P Parameter: Plant Line Value: WS
  misc_feature: MA Experiment 20000265 PARAMETER Experiment Name: At_Open_Flower_P Parameter: Tissue Value: Closed Flower vs. Whole Plant
  misc_feature: MA Experiment ID: 20000286 Result: Down-regulated in Transcription
  misc_feature: MA Experiment 20000286 PARAMETER Experiment Name: At_Open_Flower_P Parameter: Age (day) Value: 21
  misc_feature: MA Experiment 20000286 PARAMETER Experiment Name: At_Open_Flower_P Parameter: Plant Line Value: WS
  misc_feature: MA Experiment 20000286 PARAMETER Experiment Name: At_Open_Flower_P Parameter: Tissue Value: Half Open vs. Whole Plant
  misc_feature: MA Experiment ID: 20000438 Result: Down-regulated in Transcription
  misc_feature: MA Experiment 20000438 PARAMETER Experiment Name: At_Shoots__P Parameter: Age (day) Value: 14
  misc_feature: MA Experiment 20000438 PARAMETER Experiment Name: At_Shoots__P Parameter: Tissue Value: Shoots vs. Whole Plant
  misc_feature: MA Experiment ID: 20000439 Result: Down-regulated in Transcription
  misc_feature: MA Experiment 20000439 PARAMETER Experiment Name: At_Roots__P Parameter: Age (day) Value: 14 vs. 21
  misc_feature: MA Experiment 20000439 PARAMETER Experiment Name: At_Roots__P Parameter: Organism Value: A. thaliana
  misc_feature: MA Experiment 20000439 PARAMETER Experiment Name: At_Roots__P Parameter: Tissue Value: Roots vs. Whole Plant
  misc_feature: MA Experiment ID: 20000441 Result: Up-regulated in Transcription
  misc_feature: MA Experiment 20000441 PARAMETER Experiment Name: At_1uM_BR-BRZ__P Parameter: Tissue Value: Shoot Apices
  misc_feature: MA Experiment 20000441 PARAMETER Experiment Name: At_1uM_BR-BRZ__P Parameter: Treatment Value: 1uM BR vs. No Treatment
  misc_feature: MA Experiment ID: 20000443 Result: Up-regulated in Transcription
  misc_feature: MA Experiment 20000443 PARAMETER Experiment Name: At_1uM_BR-BRZ__P Parameter: Tissue Value: Shoot Apices
  misc_feature: MA Experiment 20000443 PARAMETER Experiment Name: At_1uM_BR-BRZ__P Parameter: Treatment Value: 1uM BRZ vs. No Treatment
  misc_feature: MA Experiment ID: 20000445 Result: Up-regulated in Transcription
  misc_feature: MA Experiment 20000445 PARAMETER Experiment Name: At_100uM_NAA__P Parameter: Age (day) Value: 14
  misc_feature: MA Experiment 20000445 PARAMETER Experiment Name: At_100uM_NAA__P Parameter: Organism Value: A. thaliana
  misc_feature: MA Experiment 20000445 PARAMETER Experiment Name: At_100uM_NAA__P Parameter: Plant Line Value: WS
  misc_feature: MA Experiment 20000445 PARAMETER Experiment Name: At_100uM_NAA__P Parameter: Timepoint (hr) Value: 6
  misc_feature: MA Experiment 20000445 PARAMETER Experiment Name: At_100uM_NAA__P Parameter: Tissue Value: Aerial
  misc_feature: MA Experiment 20000445 PARAMETER Experiment Name: At_100uM_NAA__P Parameter: Treatment Value: 100uM NAA vs. No Treatment
  misc_feature: MA Experiment ID: 20000460 Result: Up-regulated in Transcription
  misc_feature: MA Experiment 20000460 PARAMETER Experiment Name: At_10percent_PEG_P Parameter: Age (day) Value: 12
  misc_feature: MA Experiment 20000460 PARAMETER Experiment Name: At_10percent_PEG_P Parameter: Organism Value: A. thaliana
  misc_feature: MA Experiment 20000460 PARAMETER Experiment Name: At_10percent_PEG_P Parameter: Plant Line Value: WS
  misc_feature: MA Experiment 20000460 PARAMETER Experiment Name: At_10percent_PEG_P Parameter: Timepoint (day) Value: 12
  misc_feature: MA Experiment 20000460 PARAMETER Experiment Name: At_10percent_PEG_P Parameter: Tissue Value: Whole Plant
  misc_feature: MA Experiment 20000460 PARAMETER Experiment Name: At_10percent_PEG_P Parameter: Treatment Value: 10percent PEG vs. No Treatment
  misc_feature: MA Experiment ID: 20000495 Result: Down-regulated in Transcription
  misc_feature: MA Experiment 20000495 PARAMETER Experiment Name: At_Guard_Cells_P Parameter: Harvest Date Value: 8/2/2002
  misc_feature: MA Experiment 20000495 PARAMETER Experiment Name: At_Guard_Cells_P Parameter: Organism Value: A. thaliana
  misc_feature: MA Experiment 20000495 PARAMETER Experiment Name: At_Guard_Cells_P Parameter: Tissue Value: Guard Cells vs. Leaves
  misc_feature: MA Experiment ID: 20000709 Result: Down-regulated in Transcription
  misc_feature: MA Experiment 20000709 PARAMETER Experiment Name: At_15mM_NH4NO3_L-to-H_P Parameter: Age (hr) Value: 14
  misc_feature: MA Experiment 20000709 PARAMETER Experiment Name: At_15mM_NH4NO3_L-to-H_P Parameter: Organism Value: A. thaliana
  misc_feature: MA Experiment 20000709 PARAMETER Experiment Name: At_15mM_NH4NO3_L-to-H_P Parameter: Plant Line Value: WS
  misc_feature: MA Experiment 20000709 PARAMETER Experiment Name: At_15mM_NH4NO3_L-to-H_P Parameter: Timepoint (hr) Value: 4
  misc_feature: MA Experiment 20000709 PARAMETER Experiment Name: At_15mM_NH4NO3_L-to-H_P Parameter: Tissue Value: Aerial
  misc_feature: MA Experiment 20000709 PARAMETER Experiment Name: At_15mM_NH4NO3_L-to-H_P Parameter: Treatment Value: 15mM NH4NO3 vs. 30mM Mannitol
  misc_feature: MA Experiment ID: 20000794 Result: Down-regulated in Transcription
  misc_feature: MA Experiment 20000794 PARAMETER Experiment Name: At_Petals_P Parameter: Age (day) Value: 23-25 days
  misc_feature: MA Experiment 20000794 PARAMETER Experiment Name: At_Petals_P Parameter: Plant Line Value: WS
  misc_feature: MA Experiment 20000794 PARAMETER Experiment Name: At_Petals_P Parameter: Tissue Value: Petals vs. Whole plant
  misc_feature: MA Experiment ID: 20001247 Result: Up-regulated in Transcription
  misc_feature: MA Experiment 20001247 PARAMETER Experiment Name: At_Far-red-induction_P Parameter: Age (day) Value: 7
  misc_feature: MA Experiment 20001247 PARAMETER Experiment Name: At_Far-red-induction_P Parameter: Light Value: Far-red vs. White
  misc_feature: MA Experiment 20001247 PARAMETER Experiment Name: At_Far-red-induction_P Parameter: Organism Value: A. thaliana
  misc_feature: MA Experiment 20001247 PARAMETER Experiment Name: At_Far-red-induction_P Parameter: Plant Line Value: Columbia
  misc_feature: MA Experiment 20001247 PARAMETER Experiment Name: At_Far-red-induction_P Parameter: Timepoint (hr) Value: 1
  misc_feature: MA Experiment 20001247 PARAMETER Experiment Name: At_Far-red-induction_P Parameter: Tissue Value: Whole Plant
  misc_feature: MA Experiment ID: 20001554 Result: Down-regulated in Transcription
  misc_feature: MA Experiment 20001554 PARAMETER Experiment Name: At_Drought_Soil_Dry_P Parameter: Age (day) Value: 21
  misc_feature: MA Experiment 20001554 PARAMETER Experiment Name: At_Drought_Soil_Dry_P Parameter: Organism Value: A. thaliana
  misc_feature: MA Experiment 20001554 PARAMETER Experiment Name: At_Drought_Soil_Dry_P Parameter: Plant Line Value: WS
  misc_feature: MA Experiment 20001554 PARAMETER Experiment Name: At_Drought_Soil_Dry_P Parameter: Post Timepoint (hr) Value: None
  misc_feature: MA Experiment 20001554 PARAMETER Experiment Name: At_Drought_Soil_Dry_P Parameter: Post-Treatment Value: None
  misc_feature: MA Experiment 20001554 PARAMETER Experiment Name: At_Drought_Soil_Dry_P Parameter: Timepoint (day) Value: 7
  misc_feature: MA Experiment 20001554 PARAMETER Experiment Name: At_Drought_Soil_Dry_P Parameter: Treatment Value: Drought vs. No Drought
  misc_feature: MA Experiment ID: 20001555 Result: Down-regulated in Transcription
  misc_feature: MA Experiment 20001555 PARAMETER Experiment Name: At_Drought_Soil_Dry_P Parameter: Age (day) Value: 24
  misc_feature: MA Experiment 20001555 PARAMETER Experiment Name: At_Drought_Soil_Dry_P Parameter: Organism Value: A. thaliana
  misc_feature: MA Experiment 20001555 PARAMETER Experiment Name: At_Drought_Soil_Dry_P Parameter: Plant Line Value: WS
  misc_feature: MA Experiment 20001555 PARAMETER Experiment Name: At_Drought_Soil_Dry_P Parameter: Post Timepoint (hr) Value: None
  misc_feature: MA Experiment 20001555 PARAMETER Experiment Name: At_Drought_Soil_Dry_P Parameter: Post-Treatment Value: None
  misc_feature: MA Experiment 20001555 PARAMETER Experiment Name: At_Drought_Soil_Dry_P Parameter: Timepoint (day) Value: 10
  misc_feature: MA Experiment 20001555 PARAMETER Experiment Name: At_Drought_Soil_Dry_P Parameter: Treatment Value: Drought vs. No Drought
  misc_feature: MA Experiment ID: 20001556 Result: Down-regulated in Transcription
  misc_feature: MA Experiment 20001556 PARAMETER Experiment Name: At_Drought_Soil_Dry_P Parameter: Age (day) Value: 26
  misc_feature: MA Experiment 20001556 PARAMETER Experiment Name: At_Drought_Soil_Dry_P Parameter: Organism Value: A. thaliana
  misc_feature: MA Experiment 20001556 PARAMETER Experiment Name: At_Drought_Soil_Dry_P Parameter: Plant Line Value: WS
  misc_feature: MA Experiment 20001556 PARAMETER Experiment Name: At_Drought_Soil_Dry_P Parameter: Post Timepoint (hr) Value: None
  misc_feature: MA Experiment 20001556 PARAMETER Experiment Name: At_Drought_Soil_Dry_P Parameter: Post-Treatment Value: None
  misc_feature: MA Experiment 20001556 PARAMETER Experiment Name: At_Drought_Soil_Dry_P Parameter: Timepoint (day) Value: 12
  misc_feature: MA Experiment 20001556 PARAMETER Experiment Name: At_Drought_Soil_Dry_P Parameter: Treatment Value: Drought vs. No Drought
  misc_feature: MA Experiment ID: 20001557 Result: Down-regulated in Transcription
  misc_feature: MA Experiment 20001557 PARAMETER Experiment Name: At_Drought_Soil_Dry_P Parameter: Age (day) Value: 27
  misc_feature: MA Experiment 20001557 PARAMETER Experiment Name: At_Drought_Soil_Dry_P Parameter: Organism Value: A. thaliana
  misc_feature: MA Experiment 20001557 PARAMETER Experiment Name: At_Drought_Soil_Dry_P Parameter: Plant Line Value: WS
  misc_feature: MA Experiment 20001557 PARAMETER Experiment Name: At_Drought_Soil_Dry_P Parameter: Post Timepoint (hr) Value: 3
  misc_feature: MA Experiment 20001557 PARAMETER Experiment Name: At_Drought_Soil_Dry_P Parameter: Post-Treatment Value: Re-Water vs. No Drought
  misc_feature: MA Experiment 20001557 PARAMETER Experiment Name: At_Drought_Soil_Dry_P Parameter: Timepoint (day) Value: 13
  misc_feature: MA Experiment 20001557 PARAMETER Experiment Name: At_Drought_Soil_Dry_P Parameter: Treatment Value: Drought vs. No Drought
  misc_feature: MA Experiment ID: 20001558 Result: Down-regulated in Transcription
  misc_feature: MA Experiment 20001558 PARAMETER Experiment Name: At_Drought_Soil_Dry_P Parameter: Age (day) Value: 27
  misc_feature: MA Experiment 20001558 PARAMETER Experiment Name: At_Drought_Soil_Dry_P Parameter: Organism Value: A. thaliana
  misc_feature: MA Experiment 20001558 PARAMETER Experiment Name: At_Drought_Soil_Dry_P Parameter: Plant Line Value: WS
  misc_feature: MA Experiment 20001558 PARAMETER Experiment Name: At_Drought_Soil_Dry_P Parameter: Post Timepoint (hr) Value: 6
  misc_feature: MA Experiment 20001558 PARAMETER Experiment Name: At_Drought_Soil_Dry_P Parameter: Post-Treatment Value: Re-Water vs. No Drought
  misc_feature: MA Experiment 20001558 PARAMETER Experiment Name: At_Drought_Soil_Dry_P Parameter: Timepoint (day) Value: 13
  misc_feature: MA Experiment 20001558 PARAMETER Experiment Name: At_Drought_Soil_Dry_P Parameter: Treatment Value: Drought vs. No Drought
  misc_feature: MA Experiment ID: 20001559 Result: Down-regulated in Transcription
  misc_feature: MA Experiment 20001559 PARAMETER Experiment Name: At_Drought_Soil_Dry_P Parameter: Age (day) Value: 28
  misc_feature: MA Experiment 20001559 PARAMETER Experiment Name: At_Drought_Soil_Dry_P Parameter: Organism Value: A. thaliana
  misc_feature: MA Experiment 20001559 PARAMETER Experiment Name: At_Drought_Soil_Dry_P Parameter: Plant Line Value: WS
  misc_feature: MA Experiment 20001559 PARAMETER Experiment Name: At_Drought_Soil_Dry_P Parameter: Post Timepoint (hr) Value: 29
  misc_feature: MA Experiment 20001559 PARAMETER Experiment Name: At_Drought_Soil_Dry_P Parameter: Post-Treatment Value: Re-Water vs. No Drought
  misc_feature: MA Experiment 20001559 PARAMETER Experiment Name: At_Drought_Soil_Dry_P Parameter: Timepoint (day) Value: 14
  misc_feature: MA Experiment 20001559 PARAMETER Experiment Name: At_Drought_Soil_Dry_P Parameter: Treatment Value: Drought vs. No Drought
  misc_feature: MA Experiment ID: 20001560 Result: Down-regulated in Transcription
  misc_feature: MA Experiment 20001560 PARAMETER Experiment Name: At_Drought_Soil_Dry_P Parameter: Age (day) Value: 28
  misc_feature: MA Experiment 20001560 PARAMETER Experiment Name: At_Drought_Soil_Dry_P Parameter: Organism Value: A. thaliana
  misc_feature: MA Experiment 20001560 PARAMETER Experiment Name: At_Drought_Soil_Dry_P Parameter: Plant Line Value: WS
  misc_feature: MA Experiment 20001560 PARAMETER Experiment Name: At_Drought_Soil_Dry_P Parameter: Post Timepoint (hr) Value: None
  misc_feature: MA Experiment 20001560 PARAMETER Experiment Name: At_Drought_Soil_Dry_P Parameter: Post-Treatment Value: None
  misc_feature: MA Experiment 20001560 PARAMETER Experiment Name: At_Drought_Soil_Dry_P Parameter: Timepoint (day) Value: 14
  misc_feature: MA Experiment 20001560 PARAMETER Experiment Name: At_Drought_Soil_Dry_P Parameter: Treatment Value: Drought vs. No Drought
  misc_feature: MA Experiment ID: 20001904 Result: Down-regulated in Transcription
  misc_feature: MA Experiment 20001904 PARAMETER Experiment Name: At_Drought_Reproduction_P Parameter: Age (day) Value: 37
  misc_feature: MA Experiment 20001904 PARAMETER Experiment Name: At_Drought_Reproduction_P Parameter: Organism Value: A. thaliana
  misc_feature: MA Experiment 20001904 PARAMETER Experiment Name: At_Drought_Reproduction_P Parameter: Plant Line Value: WS
  misc_feature: MA Experiment 20001904 PARAMETER Experiment Name: At_Drought_Reproduction_P Parameter: Timepoint (day) Value: 7
  misc_feature: MA Experiment 20001904 PARAMETER Experiment Name: At_Drought_Reproduction_P Parameter: Tissue Value: Rosettes
  misc_feature: MA Experiment 20001904 PARAMETER Experiment Name: At_Drought_Reproduction_P Parameter: Treatment Value: Drought vs. No Drought
  misc_feature: MA Experiment ID: 20001906 Result: Down-regulated in Transcription
  misc_feature: MA Experiment 20001906 PARAMETER Experiment Name: At_Drought_Reproduction_P Parameter: Age (day) Value: 35
  misc_feature: MA Experiment 20001906 PARAMETER Experiment Name: At_Drought_Reproduction_P Parameter: Organism Value: A. thaliana
  misc_feature: MA Experiment 20001906 PARAMETER Experiment Name: At_Drought_Reproduction_P Parameter: Plant Line Value: WS
  misc_feature: MA Experiment 20001906 PARAMETER Experiment Name: At_Drought_Reproduction_P Parameter: Timepoint (day) Value: 5
  misc_feature: MA Experiment 20001906 PARAMETER Experiment Name: At_Drought_Reproduction_P Parameter: Tissue Value: Siliques
  misc_feature: MA Experiment 20001906 PARAMETER Experiment Name: At_Drought_Reproduction_P Parameter: Treatment Value: Drought vs. No Drought
  misc_feature: MA Experiment ID: 20001907 Result: Down-regulated in Transcription
  misc_feature: MA Experiment 20001907 PARAMETER Experiment Name: At_Drought_Reproduction_P Parameter: Age (day) Value: 37
  misc_feature: MA Experiment 20001907 PARAMETER Experiment Name: At_Drought_Reproduction_P Parameter: Organism Value: A. thaliana
  misc_feature: MA Experiment 20001907 PARAMETER Experiment Name: At_Drought_Reproduction_P Parameter: Plant Line Value: WS
  misc_feature: MA Experiment 20001907 PARAMETER Experiment Name: At_Drought_Reproduction_P Parameter: Timepoint (day) Value: 7
  misc_feature: MA Experiment 20001907 PARAMETER Experiment Name: At_Drought_Reproduction_P Parameter: Tissue Value: Siliques
  misc_feature: MA Experiment 20001907 PARAMETER Experiment Name: At_Drought_Reproduction_P Parameter: Treatment Value: Drought vs. No Drought
  misc_feature: MA Experiment ID: 20001910 Result: Down-regulated in Transcription
  misc_feature: MA Experiment 20001910 PARAMETER Experiment Name: At_Drought_Reproduction_P Parameter: Age (day) Value: 37
  misc_feature: MA Experiment 20001910 PARAMETER Experiment Name: At_Drought_Reproduction_P Parameter: Organism Value: A. thaliana
  misc_feature: MA Experiment 20001910 PARAMETER Experiment Name: At_Drought_Reproduction_P Parameter: Plant Line Value: WS
  misc_feature: MA Experiment 20001910 PARAMETER Experiment Name: At_Drought_Reproduction_P Parameter: Timepoint (day) Value: 7
  misc_feature: MA Experiment 20001910 PARAMETER Experiment Name: At_Drought_Reproduction_P Parameter: Tissue Value: Flowers
  misc_feature: MA Experiment 20001910 PARAMETER Experiment Name: At_Drought_Reproduction_P Parameter: Treatment Value: Drought vs. No Drought
aagaagaaactttctctaattaaaatggctgttcccacgggaagcgccaatctctttctccggcctctcatcctcgccgttctctcctttcttcttctctcttcattcgtctcctctgttgagtggctcgatatcgattcctcagatctcaaagctcttcaggtcatcgaaacagagctcggagtcaacagtcaacgttcttcggccagtgatgtcaacccttgcggtcgccgaggagttttctgcgagagacggcactctgccaccaccggagaatacgttctccgtgtcacgaggctcgtctaccgatccaggagcttgacggggactatctctccggtcatcggaatgttgtcggagctcaaggaacttactttgtctaataaccagttggtcaacgctgttccggtggatatcttaagctgtaagcaacttgaagttcttgatcttcggaaaaatagattttccggtcagattccgggaaacttttctagtttgagccgtcttcgaatccttgatctctcttcgaacaagttatccgggaacttgaatttcttgaagaatctacgcaatctggagaatctctctgttgcaaacaatctcttctcaggcaaaatcccggaacaaattgtgtcgttccacaatctccggttctttgatttctccggaaaccggtatttggaaggtccggctccggttatgagcagtatcaagcttcagacatctccacatcaaacaagacacattcttgctgaaactccaacttcaagtcccacgaacaaacccaacaacagcactacatcaaaagctccaaagggagctccaaaaccagggaagttgaagaagaagaagaagaagagcaagaagaagaaagtagcggcatggatcttagggtttgtcgttggagccataggaggaacaatctctgggtttgtcttctcggtgttgttcaaattgattattcaagcaataagaggatcagaaaaaccaccaggtccttccatattcagcccattgatcaagaaagctgaagatttagctttcttggagaatgaagaagcgttagcttctctggagatcataggaagaggaggttgtggagaagttttcaaagctgaactaccaggaagcaatgggaagatcatagctgtgaagaaagtgatccaaccgcctaaagacgccgatgaactaacagatgaagattccaagtttctgaacaagaaaatgaggcaaattagatccgagatcaacacagtcggccatatccggcaccggaatcttctcccattgttagcacacgtgtcaagacccgagtgccactacctcgtttacgagtacatggaaaaggggagtttgcaagatatattgactgacgtacaagctggaaatcaagaactaatgtggccagcgaggcacaagattgctttaggtatagctgcagggcttgagtaccttcacatggatcataacccacgaatcattcacagagacttaaagccagccaatgttcttcttgatgatgacatggaagccagaatttcagatttcggactggcaaaggcaatgccagatgcagtcacacatattacaacctcgcatgttgcaggtactgtgggatacatagcaccagagttttatcaaacccacaagttcacagataaatgtgatatctatagttttggagtgattcttgggattctggtgattgggaagcttccttcagatgagttttttcagcatactgacgagatgagtctgataaagtggatgaggaacataataacatcggaaaatcctagccttgcgattgatccgaagttgatggatcaaggattcgatgaacagatgcttctggttctgaagatcgcctgttactgtactttggatgatccaaaacagaggccgaacagtaaagatgtcaggaccatgttgtcccagatcaagcactagtgtttcaatatgtattgtttgcttctatctatatttcctagattcctgttgcatacgaaataactatgaacacaatcttggcagaaatttgtaatggcgactgtaaaatttaaatggatttcaatta

SEQ ID NO: 97414 - protein, 649 aa, Arabidopsis thaliana
  peptide (1)..(649): Ceres Seq. ID no. 12737427
  misc_feature (43)..(649): Homolog of NCBI NO: 24421095 NR Description: receptor-like protein kinase [Nicotiana tabacum]
  misc_feature (349)..(647): Homolog of NCBI NO: 34907356 NR Description: putative receptor protein kinase [Oryza sativa
  misc_feature (28)..(254): Homolog of NCBI NO: 34907356 NR Description: putative receptor protein kinase [Oryza sativa
  misc_feature (100)..(648): Homolog of NCBI NO: 34904492 NR Description: putative receptor protein kinase [Oryza sativa
  misc_feature (96)..(647): Homolog of NCBI NO: 15235312 NR Description: leucine-rich repeat transmembrane protein kinase, protein id: At4g28490.1, supported by cDNA: gi_166849
  misc_feature (87)..(647): Homolog of NCBI NO: 15218660 NR Description: leucine-rich repeat transmembrane protein kinase, protein id: At1g28440.1, supported by cDNA: gi_20260671
  misc_feature (336)..(648): Homolog of NCBI NO: 15222751 NR Description: receptor kinase, putative; protein id: At1g55610.1
  misc_feature (8)..(251): Homolog of NCBI NO: 15222751 NR Description: receptor kinase, putative; protein id: At1g55610.1
  misc_feature (360)..(648): Homolog of NCBI NO: 38423526 NR Description: putative brassinosteroid-insensitive protein 1
  misc_feature (87)..(232): Homolog of NCBI NO: 38423526 NR Description: putative brassinosteroid-insensitive protein 1
KKKLSLIKMAVPTGSANLFLRPLILAVLSFLLLSSFVSSVEWLDIDSSDLKALQVIETELGVNSQRSSASDVNPCGRRGVFCERRHSATTGEYVLRVTRLVYRSRSLTGTISPVIGMLSELKELTLSNNQLVNAVPVDILSCKQLEVLDLRKNRFSGQIPGNFSSLSRLRILDLSSNKLSGNLNFLKNLRNLENLSVANNLFSGKIPEQIVSFHNLRFFDFSGNRYLEGPAPVMSSIKLQTSPHQTRHILAETPTSSPTNKPNNSTTSKAPKGAPKPGKLKKKKKKSKKKKVAAWILGFVVGAIGGTISGFVFSVLFKLIIQAIRGSEKPPGPSIFSPLIKKAEDLAFLENEEALASLEIIGRGGCGEVFKAELPGSNGKIIAVKKVIQPPKDADELTDEDSKFLNKKMRQIRSEINTVGHIRHRNLLPLLAHVSRPECHYLVYEYMEKGSLQDILTDVQAGNQELMWPARHKIALGIAAGLEYLHMDHNPRIIHRDLKPANVLLDDDMEARISDFGLAKAMPDAVTHITTSHVAGTVGYIAPEFYQTHKFTDKCDIYSFGVILGILVIGKLPSDEFFQHTDEMSLIKWMRNIITSENPSLAIDPKLMDQGFDEQMLLVLKIACYCTLDDPKQRPNSKDVRTMLSQIKH

SEQ ID NO: 97415 - protein, 641 aa, Arabidopsis thaliana
  peptide (1)..(641): Ceres Seq. ID no. 12737428
  misc_feature (35)..(641): Homolog of NCBI NO: 24421095 NR Description: receptor-like protein kinase [Nicotiana tabacum]
  misc_feature (341)..(639): Homolog of NCBI NO: 34907356 NR Description: putative receptor protein kinase [Oryza sativa
  misc_feature (20)..(246): Homolog of NCBI NO: 34907356 NR Description: putative receptor protein kinase [Oryza sativa
  misc_feature (92)..(640): Homolog of NCBI NO: 34904492 NR Description: putative receptor protein kinase [Oryza sativa
  misc_feature (88)..(639): Homolog of NCBI NO: 15235312 NR Description: leucine-rich repeat transmembrane protein kinase, protein id: At4g28490.1, supported by cDNA: gi_166849
  misc_feature (79)..(639): Homolog of NCBI NO: 15218660 NR Description: leucine-rich repeat transmembrane protein kinase, protein id: At1g28440.1, supported by cDNA: gi_20260671
  misc_feature (328)..(640): Homolog of NCBI NO: 15222751 NR Description: receptor kinase, putative; protein id: At1g55610.1
  misc_feature (1)..(243): Homolog of NCBI NO: 15222751 NR Description: receptor kinase, putative; protein id: At1g55610.1
  misc_feature (352)..(640): Homolog of NCBI NO: 38423526 NR Description: putative brassinosteroid-insensitive protein 1
  misc_feature (79)..(224): Homolog of NCBI NO: 38423526 NR Description: putative brassinosteroid-insensitive protein 1
MAVPTGSANLFLRPLILAVLSFLLLSSFVSSVEWLDIDSSDLKALQVIETELGVNSQRSSASDVNPCGRRGVFCERRHSATTGEYVLRVTRLVYRSRSLTGTISPVIGMLSELKELTLSNNQLVNAVPVDILSCKQLEVLDLRKNRFSGQIPGNFSSLSRLRILDLSSNKLSGNLNFLKNLRNLENLSVANNLFSGKIPEQIVSFHNLRFFDFSGNRYLEGPAPVMSSIKLQTSPHQTRHILAETPTSSPTNKPNNSTTSKAPKGAPKPGKLKKKKKKSKKKKVAAWILGFVVGAIGGTISGFVFSVLFKLIIQAIRGSEKPPGPSIFSPLIKKAEDLAFLENEEALASLEIIGRGGCGEVFKAELPGSNGKIIAVKKVIQPPKDADELTDEDSKFLNKKMRQIRSEINTVGHIRHRNLLPLLAHVSRPECHYLVYEYMEKGSLQDILTDVQAGNQELMWPARHKIALGIAAGLEYLHMDHNPRIIHRDLKPANVLLDDDMEARISDFGLAKAMPDAVTHITTSHVAGTVGYIAPEFYQTHKFTDKCDIYSFGVILGILVIGKLPSDEFFQHTDEMSLIKWMRNIITSENPSLAIDPKLMDQGFDEQMLLVLKIACYCTLDDPKQRPNSKDVRTMLSQIKH

SEQ ID NO: 97416 - protein, 533 aa, Arabidopsis thaliana
  peptide (1)..(533): Ceres Seq. ID no. 12737429
  misc_feature (1)..(533): Homolog of NCBI NO: 24421095 NR Description: receptor-like protein kinase [Nicotiana tabacum]
  misc_feature (233)..(531): Homolog of NCBI NO: 34907356 NR Description: putative receptor protein kinase [Oryza sativa
  misc_feature (1)..(138): Homolog of NCBI NO: 34907356 NR Description: putative receptor protein kinase [Oryza sativa
  misc_feature (1)..(532): Homolog of NCBI NO: 34904492 NR Description: putative receptor protein kinase [Oryza sativa
  misc_feature (1)..(531): Homolog of NCBI NO: 15235312 NR Description: leucine-rich repeat transmembrane protein kinase, protein id: At4g28490.1, supported by cDNA: gi_166849
  misc_feature (1)..(531): Homolog of NCBI NO: 15218660 NR Description: leucine-rich repeat transmembrane protein kinase, protein id: At1g28440.1, supported by cDNA: gi_20260671
  misc_feature (220)..(532): Homolog of NCBI NO: 15222751 NR Description: receptor kinase, putative; protein id: At1g55610.1
  misc_feature (1)..(135): Homolog of NCBI NO: 15222751 NR Description: receptor kinase, putative; protein id: At1g55610.1
  misc_feature (244)..(532): Homolog of NCBI NO: 38423526 NR Description: putative brassinosteroid-insensitive protein 1
  misc_feature (1)..(116): Homolog of NCBI NO: 38423526 NR Description: putative brassinosteroid-insensitive protein 1
MLSELKELTLSNNQLVNAVPVDILSCKQLEVLDLRKNRFSGQIPGNFSSLSRLRILDLSSNKLSGNLNFLKNLRNLENLSVANNLFSGKIPEQIVSFHNLRFFDFSGNRYLEGPAPVMSSIKLQTSPHQTRHILAETPTSSPTNKPNNSTTSKAPKGAPKPGKLKKKKKKSKKKKVAAWILGFVVGAIGGTISGFVFSVLFKLIIQAIRGSEKPPGPSIFSPLIKKAEDLAFLENEEALASLEIIGRGGCGEVFKAELPGSNGKIIAVKKVIQPPKDADELTDEDSKFLNKKMRQIRSEINTVGHIRHRNLLPLLAHVSRPECHYLVYEYMEKGSLQDILTDVQAGNQELMWPARHKIALGIAAGLEYLHMDHNPRIIHRDLKPANVLLDDDMEARISDFGLAKAMPDAVTHITTSHVAGTVGYIAPEFYQTHKFTDKCDIYSFGVILGILVIGKLPSDEFFQHTDEMSLIKWMRNIITSENPSLAIDPKLMDQGFDEQMLLVLKIACYCTLDDPKQRPNSKDVRTMLSQIKH

SEQ ID NO: 97417 - DNA, 1464 bp, Arabidopsis thaliana
  misc_feature (1)..(1464): Ceres Seq. ID no. 12737438
  misc_feature: MA Experiment ID: 20000234 Result: Down-regulated in Transcription
  misc_feature: MA Experiment 20000234 PARAMETER Experiment Name: At_Siliques_P Parameter: Age (day) Value: 21
  misc_feature: MA Experiment 20000234 PARAMETER Experiment Name: At_Siliques_P Parameter: Organism Value: A. thaliana
  misc_feature: MA Experiment 20000234 PARAMETER Experiment Name: At_Siliques_P Parameter: Plant Line Value: WS
  misc_feature: MA Experiment 20000234 PARAMETER Experiment Name: At_Siliques_P Parameter: Tissue Value: Less Than 5mm Siliques vs. Whole Plant
  misc_feature: MA Experiment ID: 20000235 Result: Down-regulated in Transcription
  misc_feature: MA Experiment 20000235 PARAMETER Experiment Name: At_Siliques_P Parameter: Age (day) Value: 21
  misc_feature: MA Experiment 20000235 PARAMETER Experiment Name: At_Siliques_P Parameter: Organism Value: A. thaliana
  misc_feature: MA Experiment 20000235 PARAMETER Experiment Name: At_Siliques_P Parameter: Plant Line Value: WS
  misc_feature: MA Experiment 20000235 PARAMETER Experiment Name: At_Siliques_P Parameter: Tissue Value: 5-10mm Siliques vs. Whole Plant
  misc_feature: MA Experiment ID: 20000264 Result: Down-regulated in Transcription
  misc_feature: MA Experiment 20000264 PARAMETER Experiment Name: At_Open_Flower_P Parameter: Age (day) Value: 21
  misc_feature: MA Experiment 20000264 PARAMETER Experiment Name: At_Open_Flower_P Parameter: Plant Line Value: WS
  misc_feature: MA Experiment 20000264 PARAMETER Experiment Name: At_Open_Flower_P Parameter: Tissue Value: Open Flower vs. Whole Plant
  misc_feature: MA Experiment ID: 20000265 Result: Down-regulated in Transcription
  misc_feature: MA Experiment 20000265 PARAMETER Experiment Name: At_Open_Flower_P Parameter: Age (day) Value: 21
  misc_feature: MA Experiment 20000265 PARAMETER Experiment Name: At_Open_Flower_P Parameter: Plant Line Value: WS
  misc_feature: MA Experiment 20000265 PARAMETER Experiment Name: At_Open_Flower_P Parameter: Tissue Value: Closed Flower vs. Whole Plant
  misc_feature: MA Experiment ID: 20000438 Result: Down-regulated in Transcription
  misc_feature: MA Experiment 20000438 PARAMETER Experiment Name: At_Shoots__P Parameter: Age (day) Value: 14
  misc_feature: MA Experiment 20000438 PARAMETER Experiment Name: At_Shoots__P Parameter: Tissue Value: Shoots vs. Whole Plant
  misc_feature: MA Experiment ID: 20000496 Result: Down-regulated in Transcription
  misc_feature: MA Experiment 20000496 PARAMETER Experiment Name: At_Guard_Cells_P Parameter: Harvest Date Value: 7/19/2002
  misc_feature: MA Experiment 20000496 PARAMETER Experiment Name: At_Guard_Cells_P Parameter: Organism Value: Canola
  misc_feature: MA Experiment 20000496 PARAMETER Experiment Name: At_Guard_Cells_P Parameter: Tissue Value: Guard Cells vs. Leaves
  misc_feature: MA Experiment ID: 20001451 Result: Up-regulated in Transcription
  misc_feature: MA Experiment 20001451 PARAMETER Experiment Name: At_Far-red-induction_P Parameter: Age (day) Value: 7
  misc_feature: MA Experiment 20001451 PARAMETER Experiment Name: At_Far-red-induction_P Parameter: Light Value: Far-red vs. White
  misc_feature: MA Experiment 20001451 PARAMETER Experiment Name: At_Far-red-induction_P Parameter: Organism Value: A. thaliana
  misc_feature: MA Experiment 20001451 PARAMETER Experiment Name: At_Far-red-induction_P Parameter: Plant Line Value: Columbia
  misc_feature: MA Experiment 20001451 PARAMETER Experiment Name: At_Far-red-induction_P Parameter: Timepoint (hr) Value: 24
  misc_feature: MA Experiment 20001451 PARAMETER Experiment Name: At_Far-red-induction_P Parameter: Tissue Value: Whole Plant
  misc_feature: MA Experiment ID: 20001757 Result: Down-regulated in Transcription
  misc_feature: MA Experiment 20001757 PARAMETER Experiment Name: At_50mM_NH4NO3_L-to-H_P Parameter: Timepoint (hr) Value: 6
  misc_feature: MA Experiment 20001757 PARAMETER Experiment Name: At_50mM_NH4NO3_L-to-H_P Parameter: Tissue Value: Leaf
  misc_feature: MA Experiment 20001757 PARAMETER Experiment Name: At_50mM_NH4NO3_L-to-H_P Parameter: Treatment Value: 50mM NH4NO3 vs 100mM Mannitol
  misc_feature: MA Experiment ID: 20001904 Result: Up-regulated in Transcription
  misc_feature: MA Experiment 20001904 PARAMETER Experiment Name: At_Drought_Reproduction_P Parameter: Age (day) Value: 37
  misc_feature: MA Experiment 20001904 PARAMETER Experiment Name: At_Drought_Reproduction_P Parameter: Organism Value: A. thaliana
  misc_feature: MA Experiment 20001904 PARAMETER Experiment Name: At_Drought_Reproduction_P Parameter: Plant Line Value: WS
  misc_feature: MA Experiment 20001904 PARAMETER Experiment Name: At_Drought_Reproduction_P Parameter: Timepoint (day) Value: 7
  misc_feature: MA Experiment 20001904 PARAMETER Experiment Name: At_Drought_Reproduction_P Parameter: Tissue Value: Rosettes
  misc_feature: MA Experiment 20001904 PARAMETER Experiment Name: At_Drought_Reproduction_P Parameter: Treatment Value: Drought vs. No Drought
  misc_feature: MA Experiment ID: 20001905 Result: Up-regulated in Transcription
  misc_feature: MA Experiment 20001905 PARAMETER Experiment Name: At_Drought_Reproduction_P Parameter: Age (day) Value: 40
  misc_feature: MA Experiment 20001905 PARAMETER Experiment Name: At_Drought_Reproduction_P Parameter: Organism Value: A. thaliana
  misc_feature: MA Experiment 20001905 PARAMETER Experiment Name: At_Drought_Reproduction_P Parameter: Plant Line Value: WS
  misc_feature: MA Experiment 20001905 PARAMETER Experiment Name: At_Drought_Reproduction_P Parameter: Timepoint (day) Value: 10
  misc_feature: MA Experiment 20001905 PARAMETER Experiment Name: At_Drought_Reproduction_P Parameter: Tissue Value: Rosettes
  misc_feature: MA Experiment 20001905 PARAMETER Experiment Name: At_Drought_Reproduction_P Parameter: Treatment Value: Drought vs. No Drought
atggatcatcaaatcaagaacaccatgaagaacaacaacagttcatcagtttcaatcgagaatcatccatggaagaaaaaaccaaccactcttttacttttcctttctcttctctccatctctctgcttctccttcgtctctcccaagacaaaatcatactcatcaccaccaccaaaaccacagccaccactggaaccgatcatcaacgcagtcacaaatcttctgaggacgatacgtgtctcggacgctacatatatatccacaatctaccttctcgattcaatcttgaaatcatcaaagattgtaagtctattacaagaccaaaggacaaaatcagtatgtgtaagtatctcgacaactccggattcggacctttgatcggcggtaaaagttctgactactctccgagctggtacgctactaatcagttcatgctcgaagtgatttttcacgagaaaatgaagagttacgagtgcttgacgagaaattcttcactggcttcagctatttacgtaccttattatgctggcctcgatttccggcgacatttacggcggcgtaacgttgctgcgagagacgccgccgggaaggaacttgttaaatggctcaagaagcaacctcagtggaaagatatgtcaggtaaaaaccatttccttgtaaccggtcggatttcacgagatttccggcgaaactccggcagtaggtcagcatggggaaccaacttcatgctcttatctgagtcgctaaacctcactttcctcagcattgaacgaagtctaacgagccacaacgagttcgcaattccttatcctacttactttcaccctacgtcaacccccgagatccttcagtggcaagaaaagatcaggcttacaaaccggacggtcctcttctcatttgccggagctcaaagaccaagcagaaaccagaacggtgtggttcgcactgaagttataaaacaatgcaagagttcatctaaaacgtgtaggtttcttgactgtgacgtcaatgcaaatagctgtgatgatccgatcagtctgatgaaacttttcgagagttcgactttctgcttacaaccgccgggtgattcgttgaccagaaaatcggtatttgattcaatcttggctggttgtataccggttttctttaaccaaggaagtgcatacaagcaatatttatggcacatacctaagaatagtagcaaatattctgtttatataacggttaaggagctgagaaccggtggaaagaacaaaatcgaagagattttgcgtggaataccaaatgagagagtggttggtatgagagaaaacgtaataagattgattccgaagattgtgtatgctaaaccaaaccggaacaaaccggatggagagattcttgaagattcttttgatgttgctgtgaagggagtgctagagagaatagaagggataaggagaaacgaattcaaaactgattag

SEQ ID NO: 97418 - protein, 487 aa, Arabidopsis thaliana
  peptide (1)..(487): Ceres Seq. ID no. 12737439
  misc_feature (85)..(439): Pfam Name: Exostosin family Pfam Description: Exostosin family
  misc_feature (1)..(487): Homolog of NCBI NO: 15225165 NR Description: Exostosin family; protein id: At2g31990.1
  misc_feature (11)..(480): Homolog of NCBI NO: 29824391 NR Description: unknown protein [Arabidopsis thaliana]
  misc_feature (48)..(481): Homolog of NCBI NO: 15227020 NR Description: hypothetical protein; protein id: At2g29040.1
  misc_feature (28)..(476): Homolog of NCBI NO: 15225734 NR Description: Exostosin family; protein id: At2g32740.1
  misc_feature (48)..(481): Homolog of NCBI NO: 15225735 NR Description: hypothetical protein; protein id: At2g32750.1
  misc_feature (69)..(482): Homolog of NCBI NO: 27497206 NR Description: Unknown protein [Oryza sativa (japonica
  misc_feature (75)..(482): Homolog of NCBI NO: 25411977 NR Description: hypothetical protein At2g20370 [imported] - thaliana >gi|4512698|gb|AAD21751.1| unknown protein [Arabidopsis
  misc_feature (75)..(482): Homolog of NCBI NO: 30680972 NR Description: expressed protein [Arabidopsis thaliana]
  misc_feature (72)..(476): Homolog of NCBI NO: 27497203 NR Description: Hypothetical protein [Oryza sativa (japonica
  misc_feature (78)..(482): Homolog of NCBI NO: 37535064 NR Description: putative exostosin family protein [Oryza sativa
MDHQIKNTMKNNNSSSVSIENHPWKKKPTTLLLFLSLLSISLLLLRLSQDKIILITTTKTTATTGTDHQRSHKSSEDDTCLGRYIYIHNLPSRFNLEIIKDCKSITRPKDKISMCKYLDNSGFGPLIGGKSSDYSPSWYATNQFMLEVIFHEKMKSYECLTRNSSLASAIYVPYYAGLDFRRHLRRRNVAARDAAGKELVKWLKKQPQWKDMSGKNHFLVTGRISRDFRRNSGSRSAWGTNFMLLSESLNLTFLSIERSLTSHNEFAIPYPTYFHPTSTPEILQWQEKIRLTNRTVLFSFAGAQRPSRNQNGVVRTEVIKQCKSSSKTCRFLDCDVNANSCDDPISLMKLFESSTFCLQPPGDSLTRKSVFDSILAGCIPVFFNQGSAYKQYLWHIPKNSSKYSVYITVKELRTGGKNKIEEILRGIPNERVVGMRENVIRLIPKIVYAKPNRNKPDGEILEDSFDVAVKGVLERIEGIRRNEFKTD

SEQ ID NO: 97419 - protein, 479 aa, Arabidopsis thaliana
  peptide (1)..(479): Ceres Seq. ID no. 12737440
  misc_feature (77)..(431): Pfam Name: Exostosin family Pfam Description: Exostosin family
  misc_feature (1)..(479): Homolog of NCBI NO: 15225165 NR Description: Exostosin family; protein id: At2g31990.1
  misc_feature (3)..(472): Homolog of NCBI NO: 29824391 NR Description: unknown protein [Arabidopsis thaliana]
  misc_feature (40)..(473): Homolog of NCBI NO: 15227020 NR Description: hypothetical protein; protein id: At2g29040.1
  misc_feature (20)..(468): Homolog of NCBI NO: 15225734 NR Description: Exostosin family; protein id: At2g32740.1
  misc_feature (40)..(473): Homolog of NCBI NO: 15225735 NR Description: hypothetical protein; protein id: At2g32750.1
  misc_feature (61)..(474): Homolog of NCBI NO: 27497206 NR Description: Unknown protein [Oryza sativa (japonica
  misc_feature (67)..(474): Homolog of NCBI NO: 25411977 NR Description: hypothetical protein At2g20370 [imported] - thaliana >gi|4512698|gb|AAD21751.1| unknown protein [Arabidopsis
  misc_feature (67)..(474): Homolog of NCBI NO: 30680972 NR Description: expressed protein [Arabidopsis thaliana]
  misc_feature (64)..(468): Homolog of NCBI NO: 27497203 NR Description: Hypothetical protein [Oryza sativa (japonica
  misc_feature (70)..(474): Homolog of NCBI NO: 37535064 NR Description: putative exostosin family protein [Oryza sativa
MKNNNSSSVSIENHPWKKKPTTLLLFLSLLSISLLLLRLSQDKIILITTTKTTATTGTDHQRSHKSSEDDTCLGRYIYIHNLPSRFNLEIIKDCKSITRPKDKISMCKYLDNSGFGPLIGGKSSDYSPSWYATNQFMLEVIFHEKMKSYECLTRNSSLASAIYVPYYAGLDFRRHLRRRNVAARDAAGKELVKWLKKQPQWKDMSGKNHFLVTGRISRDFRRNSGSRSAWGTNFMLLSESLNLTFLSIERSLTSHNEFAIPYPTYFHPTSTPEILQWQEKIRLTNRTVLFSFAGAQRPSRNQNGVVRTEVIKQCKSSSKTCRFLDCDVNANSCDDPISLMKLFESSTFCLQPPGDSLTRKSVFDSILAGCIPVFFNQGSAYKQYLWHIPKNSSKYSVYITVKELRTGGKNKIEEILRGIPNERVVGMRENVIRLIPKIVYAKPNRNKPDGEILEDSFDVAVKGVLERIEGIRRNEFKTD

SEQ ID NO: 97420 - protein, 374 aa, Arabidopsis thaliana
  peptide (1)..(374): Ceres Seq. ID no. 12737441
  misc_feature (1)..(326): Pfam Name: Exostosin family Pfam Description: Exostosin family
  misc_feature (1)..(374): Homolog of NCBI NO: 15225165 NR Description: Exostosin family; protein id: At2g31990.1
  misc_feature (1)..(367): Homolog of NCBI NO: 29824391 NR Description: unknown protein [Arabidopsis thaliana]
  misc_feature (1)..(368): Homolog of NCBI NO: 15227020 NR Description: hypothetical protein; protein id: At2g29040.1
  misc_feature (1)..(363): Homolog of NCBI NO: 15225734 NR Description: Exostosin family; protein id: At2g32740.1
  misc_feature (1)..(368): Homolog of NCBI NO: 15225735 NR Description: hypothetical protein; protein id: At2g32750.1
  misc_feature (1)..(369): Homolog of NCBI NO: 27497206 NR Description: Unknown protein [Oryza sativa (japonica
  misc_feature (1)..(369): Homolog of NCBI NO: 25411977 NR Description: hypothetical protein At2g20370 [imported] - thaliana >gi|4512698|gb|AAD21751.1| unknown protein [Arabidopsis
  misc_feature (1)..(369): Homolog of NCBI NO: 30680972 NR Description: expressed protein [Arabidopsis thaliana]
  misc_feature (1)..(363): Homolog of NCBI NO: 27497203 NR Description: Hypothetical protein [Oryza sativa (japonica
  misc_feature (1)..(369): Homolog of NCBI NO: 37535064 NR Description: putative exostosin family protein [Oryza sativa
MCKYLDNSGFGPLIGGKSSDYSPSWYATNQFMLEVIFHEKMKSYECLTRNSSLASAIYVPYYAGLDFRRHLRRRNVAARDAAGKELVKWLKKQPQWKDMSGKNHFLVTGRISRDFRRNSGSRSAWGTNFMLLSESLNLTFLSIERSLTSHNEFAIPYPTYFHPTSTPEILQWQEKIRLTNRTVLFSFAGAQRPSRNQNGVVRTEVIKQCKSSSKTCRFLDCDVNANSCDDPISLMKLFESSTFCLQPPGDSLTRKSVFDSILAGCIPVFFNQGSAYKQYLWHIPKNSSKYSVYITVKELRTGGKNKIEEILRGIPNERVVGMRENVIRLIPKIVYAKPNRNKPDGEILEDSFDVAVKGVLERIEGIRRNEFKTD

SEQ ID NO: 97421 - DNA, 771 bp, Arabidopsis thaliana
  misc_feature (1)..(771): Ceres Seq. ID no. 12737442
  misc_feature: MA Experiment ID: 20000307 Result: Down-regulated in Transcription
  misc_feature: MA Experiment 20000307 PARAMETER Experiment Name: At_Germinating_Seeds_Sub_P Parameter: Age (hr) Value: 24 vs. 0
  misc_feature: MA Experiment 20000307 PARAMETER Experiment Name: At_Germinating_Seeds_Sub_P Parameter: Organism Value: A. thaliana
  misc_feature: MA Experiment 20000307 PARAMETER Experiment Name: At_Germinating_Seeds_Sub_P Parameter: Plant Line Value: WS
  misc_feature: MA Experiment 20000307 PARAMETER Experiment Name: At_Germinating_Seeds_Sub_P Parameter: Tissue Value: Germinating Seeds
  misc_feature: MA Experiment ID: 20000440 Result: Up-regulated in Transcription
  misc_feature: MA Experiment 20000440 PARAMETER Experiment Name: At_Closed-Flower__Sub_P Parameter: Tissue Value: Closed Flower vs. Whole Plant
atggagaaagcagttcactcgtcgaccacgtctggaccggcggttccaggggagacaacaaagaccggaacctccataattgacactgcagcctccgctgttcaaagttttgcaccggttaaccaaatccaccaacatctctgcgcgttccatttctatgctgacgacatggcacgacaagtagaggctcaccatttctgcagtcacgtgaacgaagagatgcgtcagtgtttgatctacgacggtccggatgcaaacgctcgtctaattggattggagtacatagtgtcagagaagctgttcatgactttgcctgacgaagagaagaagctttggcactcgcacgagtgggaagtgaaaggagggttcttgttcatgcctggtgttccaggtgccattcagcgtaaagatcttgataaagtcgctaagacttatgggaaagttttccatttttggcaagttgatttgggccatgagcttcccattggtttacctaatgtcatgatggctgttacacgcgatggccagcttttccacgagatgattcaggagacagataagcggtttagggtatcaatagagaaacaacctagaccggcagagaagcggtttggggtatcggtagagggggagagggactcacgggcgtatatgtctggacctgagctcgggatccatccattggcgaatggaggaggcaaagggatgaaactagagctacgagaggtcgatatcaagccggttgagtctgtcggcagcgtctttgtctga

SEQ ID NO: 97422 - protein, 256 aa, Arabidopsis thaliana
  peptide (1)..(256): Ceres Seq. ID no. 12737443
  misc_feature (1)..(256): Homolog of NCBI NO: 30685146 NR Description: expressed protein [Arabidopsis thaliana] unknown protein [Arabidopsis thaliana]
  misc_feature (1)..(256): Homolog of NCBI NO: 26451037 NR Description: unknown protein [Arabidopsis thaliana]
  misc_feature (1)..(256): Homolog of NCBI NO: 15220526 NR Description: hypothetical protein; protein id: At1g05510.1, by cDNA: gi_17979350, supported by cDNA: gi_20466016 [Arabidopsis >gi|8778719|gb|AAF79727.1|AC005106_8 T25N20.16 [Arabidopsis
  misc_feature (15)..(255): Homolog of NCBI NO: 4105683 NR Description: unknown [Oryza sativa] >gi|4105692|gb|AAD02496.1|
  misc_feature (13)..(239): Homolog of NCBI NO: 40740423 NR Description: hypothetical protein AN7959.2 [Aspergillus
  misc_feature (7)..(194): Homolog of NCBI NO: 16760314 NR Description: putative secreted protein [Salmonella enterica enterica serovar Typhi] >gi|29141921|ref|NP_805263.1| putative protein [Salmonella enterica subsp. enterica serovar Typhi Ty2]
  misc_feature (7)..(194): Homolog of NCBI NO: 16764905 NR Description: putative outer membrane or secreted lipoprotein typhimurium LT2] >gi|16420083|gb|AAL20479.1| putative outer
  misc_feature (11)..(189): Homolog of NCBI NO: 32413853 NR Description: hypothetical protein [Neurospora crassa]
  misc_feature (10)..(246): Homolog of NCBI NO: 34910820 NR Description: P0456A01.15 [Oryza sativa (japonica
  misc_feature (10)..(192): Homolog of NCBI NO: 34909516 NR Description: P0481E12.28 [Oryza sativa (japonica
MEKAVHSSTTSGPAVPGETTKTGTSIIDTAASAVQSFAPVNQIHQHLCAFHFYADDMARQVEAHHFCSHVNEEMRQCLIYDGPDANARLIGLEYIVSEKLFMTLPDEEKKLWHSHEWEVKGGFLFMPGVPGAIQRKDLDKVAKTYGKVFHFWQVDLGHELPIGLPNVMMAVTRDGQLFHEMIQETDKRFRVSIEKQPRPAEKRFGVSVEGERDSRAYMSGPELGIHPLANGGGKGMKLELREVDIKPVESVGSVFV

SEQ ID NO: 97423 - protein, 200 aa, Arabidopsis thaliana
  peptide (1)..(200): Ceres Seq. ID no. 12737444
  misc_feature (1)..(200): Homolog of NCBI NO: 30685146 NR Description: expressed protein [Arabidopsis thaliana] unknown protein [Arabidopsis thaliana]
  misc_feature (1)..(200): Homolog of NCBI NO: 26451037 NR Description: unknown protein [Arabidopsis thaliana]
  misc_feature (1)..(200): Homolog of NCBI NO: 15220526 NR Description: hypothetical protein; protein id: At1g05510.1, by cDNA: gi_17979350, supported by cDNA: gi_20466016 [Arabidopsis >gi|8778719|gb|AAF79727.1|AC005106_8 T25N20.16 [Arabidopsis
  misc_feature (1)..(199): Homolog of NCBI NO: 4105683 NR Description: unknown [Oryza sativa] >gi|4105692|gb|AAD02496.1|
  misc_feature (1)..(183): Homolog of NCBI NO: 40740423 NR Description: hypothetical protein AN7959.2 [Aspergillus
  misc_feature (1)..(138): Homolog of NCBI NO: 16760314 NR Description: putative secreted protein [Salmonella enterica enterica serovar Typhi] >gi|29141921|ref|NP_805263.1| putative protein [Salmonella enterica subsp. enterica serovar Typhi Ty2]
  misc_feature (1)..(138): Homolog of NCBI NO: 16764905 NR Description: putative outer membrane or secreted lipoprotein typhimurium LT2] >gi|16420083|gb|AAL20479.1| putative outer
  misc_feature (1)..(133): Homolog of NCBI NO: 32413853 NR Description: hypothetical protein [Neurospora crassa]
  misc_feature (1)..(190): Homolog of NCBI NO: 34910820 NR Description: P0456A01.15 [Oryza sativa (japonica
  misc_feature (1)..(136): Homolog of NCBI NO: 34909516 NR Description: P0481E12.28 [Oryza sativa (japonica
MARQVEAHHFCSHVNEEMRQCLIYDGPDANARLIGLEYIVSEKLFMTLPDEEKKLWHSHEWEVKGGFLFMPGVPGAIQRKDLDKVAKTYGKVFHFWQVDLGHELPIGLPNVMMAVTRDGQLFHEMIQETDKRFRVSIEKQPRPAEKRFGVSVEGERDSRAYMSGPELGIHPLANGGGKGMKLELREVDIKPVESVGSVFV

SEQ ID NO: 97424 - protein, 183 aa, Arabidopsis thaliana
  peptide (1)..(183): Ceres Seq. ID no. 12737445
  misc_feature (1)..(183): Homolog of NCBI NO: 30685146 NR Description: expressed protein [Arabidopsis thaliana] unknown protein [Arabidopsis thaliana]
  misc_feature (1)..(183): Homolog of NCBI NO: 26451037 NR Description: unknown protein [Arabidopsis thaliana]
  misc_feature (1)..(183): Homolog of NCBI NO: 15220526 NR Description: hypothetical protein; protein id: At1g05510.1, by cDNA: gi_17979350, supported by cDNA: gi_20466016 [Arabidopsis >gi|8778719|gb|AAF79727.1|AC005106_8 T25N20.16 [Arabidopsis
  misc_feature (1)..(182): Homolog of NCBI NO: 4105683 NR Description: unknown [Oryza sativa] >gi|4105692|gb|AAD02496.1|
  misc_feature (1)..(166): Homolog of NCBI NO: 40740423 NR Description: hypothetical protein AN7959.2 [Aspergillus
  misc_feature (1)..(121): Homolog of NCBI NO: 16760314 NR Description: putative secreted protein [Salmonella enterica enterica serovar Typhi] >gi|29141921|ref|NP_805263.1| putative protein [Salmonella enterica subsp. enterica serovar Typhi Ty2]
  misc_feature (1)..(121): Homolog of NCBI NO: 16764905 NR Description: putative outer membrane or secreted lipoprotein typhimurium LT2] >gi|16420083|gb|AAL20479.1| putative outer
  misc_feature (1)..(116): Homolog of NCBI NO: 32413853 NR Description: hypothetical protein [Neurospora crassa]
  misc_feature (1)..(173): Homolog of NCBI NO: 34910820 NR Description: P0456A01.15 [Oryza sativa (japonica
  misc_feature (1)..(119): Homolog of NCBI NO: 34909516 NR Description: P0481E12.28 [Oryza sativa (japonica
MRQCLIYDGPDANARLIGLEYIVSEKLFMTLPDEEKKLWHSHEWEVKGGFLFMPGVPGAIQRKDLDKVAKTYGKVFHFWQVDLGHELPIGLPNVMMAVTRDGQLFHEMIQETDKRFRVSIEKQPRPAEKRFGVSVEGERDSRAYMSGPELGIHPLANGGGKGMKLELREVDIKPVESVGSVFV

SEQ ID NO: 97425 - DNA, 1713 bp, Arabidopsis thaliana
  misc_feature (1)..(1713): Ceres Seq. ID no. 12737465
  misc_feature: MA Experiment ID: 20000184 Result: Down-regulated in Transcription
  misc_feature: MA Experiment 20000184 PARAMETER Experiment Name: At_Shoots__P Parameter: Age (day) Value: 7
  misc_feature: MA Experiment 20000184 PARAMETER Experiment Name: At_Shoots__P Parameter: Tissue Value: Shoots vs. Whole Plant
  misc_feature: MA Experiment ID: 20000286 Result: Down-regulated in Transcription
  misc_feature: MA Experiment 20000286 PARAMETER Experiment Name: At_Open_Flower_P Parameter: Age (day) Value: 21
  misc_feature: MA Experiment 20000286 PARAMETER Experiment Name: At_Open_Flower_P Parameter: Plant Line Value: WS
  misc_feature: MA Experiment 20000286 PARAMETER Experiment Name: At_Open_Flower_P Parameter: Tissue Value: Half Open vs. Whole Plant
aaaaccgaagagccaccaccatggtttcgccgtcagagatgacggagacggcaccggcaattatgacaacggaaagcgaaaggatagagagttcgagggaactcgtggataatgaagaggaggagaaaatacgccgtcagaagaagctcgaagaagctctcgaagccaaatctcttcgccgcattatcagtgcttacctcaattacccagaggcttcggaagaggatttgaaaagatgggaaagatcatatcggaagctgtctcctgcacacaaggcattggtaccccattaccctatgaagtttcagagattaagaaggtgtatatcggcgaattcatatttcatatttaatatgcttcaggcttttgagcctcctatagacttgagtcaggaacttgatggttgtgaagactcaaatcttgactgcgctccacatgagagatacactctagatgaaaggcacgactcttcttgtcagccggccttgaccaatagttgtacatataaggaagaaagcaaacacattcgtgacccaataacaggagtgtctatcgaggagcttcagaggaaagaagctcatgatcattctcccaaggatgactctgcagacacaagaatcaacgataagacatgtgattgtcatgaaggccagttaaatcatgaccatggcagtgtatcattttcatcccatgattggttggattcatcgttacagacacatgttcctctggttgatgtagataaggttcgttgtattataaggaatattgttcgagactgggcagcagagggtcagagagaacgagatcaatgctacaagcctatccttgaagagcttgattccttgtttcctgaccgtttgaaggagagcacccctcctgcctgtttagtccctggtgctggacttggacgtctggcccttgaaatttcttgtctaggtttcataagccaaggaaatgaattttcatactacatgatgatatgctcaagttttattctgaattatacacaagtccctggtgagtggacaatatacccctggatacacagcaactgcaattcgctctcggacaatgatcagctacgccctattgcgattcctgatattcatcctgcaagtgcaggaataacagaaggtttctctatgtgtggtggtgattttgttgaagtatacaatgaatcaagtcatgcaggaatgtgggatgcagttgttacttgctttttcatcgacactgctcataatgtcatcgagtacattcaaaccatatccaagatcctaaaagatggaggagtttggataaatttaggacctctgttgtatcattttgcggacacatatggccatgaaaatgaaatgtctatcgagctaagtttggaggatgtaaagagggttgcttcacattttgggtttgtgatcgagaaagaaagaacaattgaaacaacttacactacaaatccccgggctatgatgcagaaccgatactatactgccttctggacaatgaggaagaaatgtgctataacaacaacttaagcaaattactcctggactctttatttgtgtctggatttcttttgtttttctttgatgaataaattatgatcttataacagaagcgtcgaaactattaaactagttgcttccatatcaaaacaacgtattcatgacttcgttttattatggaaaaataagaaacagaacaagtatttct

SEQ ID NO: 97426 - protein, 510 aa, Arabidopsis thaliana
  peptide (1)..(510): Ceres Seq. ID no. 12737466
  misc_feature (7)..(510): Homolog of NCBI NO: 30685202 NR Description: expressed protein [Arabidopsis thaliana] unknown protein [Arabidopsis thaliana]
  misc_feature (172)..(510): Homolog of NCBI NO: 30685200 NR Description: expressed protein [Arabidopsis thaliana]
  misc_feature (7)..(175): Homolog of NCBI NO: 30685200 NR Description: expressed protein [Arabidopsis thaliana]
  misc_feature (225)..(510): Homolog of NCBI NO: 25349707 NR Description: hypothetical protein At2g32160 [imported] - thaliana >gi|4263703|gb|AAD15389.1| hypothetical protein
  misc_feature (172)..(476): Homolog of NCBI NO: 30685195 NR Description: expressed protein [Arabidopsis thaliana]
  misc_feature (346)..(510): Homolog of NCBI NO: 25408215 NR Description: hypothetical protein At2g32170 [imported] - thaliana >gi|4263702|gb|AAD15388.1| hypothetical protein
  misc_feature (245)..(503): Homolog of NCBI NO: 20886869 NR Description: RIKEN cDNA 2410127L17 [Mus musculus] similar to data source:SPTR, source key:O46078, to EG:39E1.1 PROTEIN (CG11596 PROTEIN) [Mus musculus]
  misc_feature (245)..(503): Homolog of NCBI NO: 21758737 NR Description: unnamed protein product [Homo sapiens]
  misc_feature (245)..(503): Homolog of NCBI NO: 22748889 NR Description: hypothetical protein FLJ25795 [Homo sapiens]
  misc_feature (264)..(406): Homolog of NCBI NO: 25408215 NR Description: hypothetical protein At2g32170 [imported] - thaliana >gi|4263702|gb|AAD15388.1| hypothetical protein
NRRATTMVSPSEMTETAPAIMTTESERIESSRELVDNEEEEKIRRQKKLEEALEAKSLRRIISAYLNYPEASEEDLKRWERSYRKLSPAHKALVPHYPMKFQRLRRCISANSYFIFNMLQAFEPPIDLSQELDGCEDSNLDCAPHERYTLDERHDSSCQPALTNSCTYKEESKHIRDPITGVSIEELQRKEAHDHSPKDDSADTRINDKTCDCHEGQLNHDHGSVSFSSHDWLDSSLQTHVPLVDVDKVRCIIRNIVRDWAAEGQRERDQCYKPILEELDSLFPDRLKESTPPACLVPGAGLGRLALEISCLGFISQGNEFSYYMMICSSFILNYTQVPGEWTIYPWIHSNCNSLSDNDQLRPIAIPDIHPASAGITEGFSMCGGDFVEVYNESSHAGMWDAVVTCFFIDTAHNVIEYIQTISKILKDGGVWINLGPLLYHFADTYGHENEMSIELSLEDVKRVASHFGFVIEKERTIETTYTTNPRAMMQNRYYTAFWTMRKKCAITTT

SEQ ID NO: 97427 - protein, 504 aa, Arabidopsis thaliana
  peptide (1)..(504): Ceres Seq. ID no. 12737467
  misc_feature (1)..(504): Homolog of NCBI NO: 30685202 NR Description: expressed protein [Arabidopsis thaliana] unknown protein [Arabidopsis thaliana]
  misc_feature (166)..(504): Homolog of NCBI NO: 30685200 NR Description: expressed protein [Arabidopsis thaliana]
  misc_feature (1)..(169): Homolog of NCBI NO: 30685200 NR Description: expressed protein [Arabidopsis thaliana]
  misc_feature (219)..(504): Homolog of NCBI NO: 25349707 NR Description: hypothetical protein At2g32160 [imported] - thaliana >gi|4263703|gb|AAD15389.1| hypothetical protein
  misc_feature (166)..(470): Homolog of NCBI NO: 30685195 NR Description: expressed protein [Arabidopsis thaliana]
  misc_feature (340)..(504): Homolog of NCBI NO: 25408215 NR Description: hypothetical protein At2g32170 [imported] - thaliana >gi|4263702|gb|AAD15388.1| hypothetical protein
  misc_feature (239)..(497): Homolog of NCBI NO: 20886869 NR Description: RIKEN cDNA 2410127L17 [Mus musculus] similar to data source:SPTR, source key:O46078, to EG:39E1.1 PROTEIN (CG11596 PROTEIN) [Mus musculus]
  misc_feature (239)..(497): Homolog of NCBI NO: 21758737 NR Description: unnamed protein product [Homo sapiens]
  misc_feature (239)..(497): Homolog of NCBI NO: 22748889 NR Description: hypothetical protein FLJ25795 [Homo sapiens]
  misc_feature (258)..(400): Homolog of NCBI NO: 25408215 NR Description: hypothetical protein At2g32170 [imported] - thaliana >gi|4263702|gb|AAD15388.1| hypothetical protein
MVSPSEMTETAPAIMTTESERIESSRELVDNEEEEKIRRQKKLEEALEAKSLRRIISAYLNYPEASEEDLKRWERSYRKLSPAHKALVPHYPMKFQRLRRCISANSYFIFNMLQAFEPPIDLSQELDGCEDSNLDCAPHERYTLDERHDSSCQPALTNSCTYKEESKHIRDPITGVSIEELQRKEAHDHSPKDDSADTRINDKTCDCHEGQLNHDHGSVSFSSHDWLDSSLQTHVPLVDVDKVRCIIRNIVRDWAAEGQRERDQCYKPILEELDSLFPDRLKESTPPACLVPGAGLGRLALEISCLGFISQGNEFSYYMMICSSFILNYTQVPGEWTIYPWIHSNCNSLSDNDQLRPIAIPDIHPASAGITEGFSMCGGDFVEVYNESSHAGMWDAVVTCFFIDTAHNVIEYIQTISKILKDGGVWINLGPLLYHFADTYGHENEMSIELSLEDVKRVASHFGFVIEKERTIETTYTTNPRAMMQNRYYTAFWTMRKKCAITTT

SEQ ID NO: 97428 - protein, 498 aa, Arabidopsis thaliana
  peptide (1)..(498): Ceres Seq. ID no. 12737468
  misc_feature (1)..(498): Homolog of NCBI NO: 30685202 NR Description: expressed protein [Arabidopsis thaliana] unknown protein [Arabidopsis thaliana]
  misc_feature (160)..(498): Homolog of NCBI NO: 30685200 NR Description: expressed protein [Arabidopsis thaliana]
  misc_feature (1)..(163): Homolog of NCBI NO: 30685200 NR Description: expressed protein [Arabidopsis thaliana]
  misc_feature (213)..(498): Homolog of NCBI NO: 25349707 NR Description: hypothetical protein At2g32160 [imported] - thaliana >gi|4263703|gb|AAD15389.1| hypothetical protein
  misc_feature (160)..(464): Homolog of NCBI NO: 30685195 NR Description: expressed protein [Arabidopsis thaliana]
  misc_feature (334)..(498): Homolog of NCBI NO: 25408215 NR Description: hypothetical protein At2g32170 [imported] - thaliana >gi|4263702|gb|AAD15388.1| hypothetical protein
  misc_feature (233)..(491): Homolog of NCBI NO: 20886869 NR Description: RIKEN cDNA 2410127L17 [Mus musculus] similar to data source:SPTR, source key:O46078, to EG:39E1.1 PROTEIN (CG11596 PROTEIN) [Mus musculus]
  misc_feature (233)..(491): Homolog of NCBI NO: 21758737 NR Description: unnamed protein product [Homo sapiens]
  misc_feature (233)..(491): Homolog of NCBI NO: 22748889 NR Description: hypothetical protein FLJ25795 [Homo sapiens]
  misc_feature (252)..(394): Homolog of NCBI NO: 25408215 NR Description: hypothetical protein At2g32170 [imported] - thaliana >gi|4263702|gb|AAD15388.1| hypothetical protein
MTETAPAIMTTESERIESSRELVDNEEEEKIRRQKKLEEALEAKSLRRIISAYLNYPEASEEDLKRWERSYRKLSPAHKALVPHYPMKFQRLRRCISANSYFIFNMLQAFEPPIDLSQELDGCEDSNLDCAPHERYTLDERHDSSCQPALTNSCTYKEESKHIRDPITGVSIEELQRKEAHDHSPKDDSADTRINDKTCDCHEGQLNHDHGSVSFSSHDWLDSSLQTHVPLVDVDKVRCIIRNIVRDWAAEGQRERDQCYKPILEELDSLFPDRLKESTPPACLVPGAGLGRLALEISCLGFISQGNEFSYYMMICSSFILNYTQVPGEWTIYPWIHSNCNSLSDNDQLRPIAIPDIHPASAGITEGFSMCGGDFVEVYNESSHAGMWDAVVTCFFIDTAHNVIEYIQTISKILKDGGVWINLGPLLYHFADTYGHENEMSIELSLEDVKRVASHFGFVIEKERTIETTYTTNPRAMMQNRYYTAFWTMRKKCAITTT

SEQ ID NO: 97429 - DNA, 1572 bp, Arabidopsis thaliana
  misc_feature (1)..(1572): Ceres Seq. ID no. 12737519
  misc_feature: MA Experiment ID: 20000328 Result: Down-regulated in Transcription
  misc_feature: MA Experiment 20000328 PARAMETER Experiment Name: At_42deg_Heat_Sub_P Parameter: Age (day) Value: 14
  misc_feature: MA Experiment 20000328 PARAMETER Experiment Name: At_42deg_Heat_Sub_P Parameter: Organism Value: A. thaliana
  misc_feature: MA Experiment 20000328 PARAMETER Experiment Name: At_42deg_Heat_Sub_P Parameter: Plant Line Value: WS
  misc_feature: MA Experiment 20000328 PARAMETER Experiment Name: At_42deg_Heat_Sub_P Parameter: Temperature (deg C) Value: 42 vs. 22
  misc_feature: MA Experiment 20000328 PARAMETER Experiment Name: At_42deg_Heat_Sub_P Parameter: Timepoint (hr) Value: 6
  misc_feature: MA Experiment 20000328 PARAMETER Experiment Name: At_42deg_Heat_Sub_P Parameter: Tissue Value: Aerial
  misc_feature: MA Experiment ID: 20000440 Result: Up-regulated in Transcription
  misc_feature: MA Experiment 20000440 PARAMETER Experiment Name: At_Closed-Flower__Sub_P Parameter: Tissue Value: Closed Flower vs. Whole Plant
atggcggaacccaaaaccaagtatgatcgtcagctaaggatttggggagaattaggtcaatcagctcttgaaaccgcgagcatatgtttgctcaattgtggtccaactggctctgaggctctaaagaatcttgttattggtggaatcggaagtatcaccattgtcgacggatctaaagtagaaattggcgaccttggaaacaatttcatggtggatgcgaagagcgttggtcagtcaagagccaaaacggtctgtggctttcttcaggagcttaacgattctgttaaagcaaattttgttgaggagaatccagacactttgatatcgacagacccatctttcttctctcagttcactctagttatcgccactcagctagtagaagattcaatggtgaaattagatagaatctgccgggaagcaaacgtcatgttggttttggctcgctcctatggacttactgggtttgttcgtatcagtgtaaaggaacacaccgctattgagacaaagcctgatcattctcttgatgatctccgcttgaatagtccatggcctgagctgaagagctatgtggagtccattgatctaaatgtagaagaacccgctgcccataagcacattccttacgtcgtcattctagtcaaggtggctgaagaatgggctcaacaccatagcggcaaccttccatcaaccagggaagagaaaaacgagtttaaggacttagttaagtccaagatggtatcagcggatgaagaaaattacaaagaagcccttcttgcagctttcaaagtctttgctcctacaggaatcagccaagagattcaagacattaatcatgatagttgtgctgaagttggctcaaattcctcagatttttgggtaatggtagcagcactcaaggagtttatttcaaatgaaggtggtggggaggtaccacttgaaggttccatgcctgatatgatatcttccacagagcactacatcaatttgcagaaaatctaccattccaaagcggaagctgattttctttccatggaacagagagtaaaaagtattctagttaaagttggtcaggatccaagtagcatctcaaagccaactatcaagagcttctgcaagaatgcacgaaaacttaaagtctgcagatatagaacgatagaagacgagttcaaaagtccttctacaacagaactacataagtacttggctgatgagaattacagtggcgcaattggattttatattcttcttagagctgttgatagatttgctggtacctataagaagtttcctggacagtttgatggatcaactgatgaggacgcatcccagttaaagactattgccctgagtcttcttagtgaaatgggttgtgacggctatgaacttcaggaagaactgtacaatgagatgtgtagatttggtgctgcagagattcacgtggttgctgctttaataggaggaatcacatctcaagaagtgatcaagctcatcacaaagcagtttgttcccaagcgaggaactttcatcttcaacggcattgatcacaagtctcagtctttgacattatag

SEQ ID NO: 97430 - protein, 523 aa, Arabidopsis thaliana
  peptide (1)..(523): Ceres Seq. ID no. 12737520
  misc_feature (24)..(160): Pfam Name: ThiF family Pfam Description: ThiF family
  misc_feature (1)..(523): Homolog of NCBI NO: 15225241 NR Description: putative ubiquitin activating enzyme; protein id: [Arabidopsis thaliana] >gi|25408233|pir||G84732 probable
  misc_feature (1)..(523): Homolog of NCBI NO: 15220442 NR Description: RUB-activating enzyme AXR1; protein id: supported by cDNA: gi_15215701, supported by cDNA: gi_304103
  misc_feature (2)..(523): Homolog of NCBI NO: 29124137 NR Description: putative ubiquitin-activating enzyme (alternative
  misc_feature (2)..(523): Homolog of NCBI NO: 29124136 NR Description: putative ubiquitin-activating enzyme (alternative
  misc_feature (7)..(523): Homolog of NCBI NO: 40889581 NR Description: Chain A, Appbp1-Uba3-Nedd8, An E1-Ubiquitin-Like
  misc_feature (1)..(523): Homolog of NCBI NO: 21450341 NR Description: amyloid beta precursor protein binding protein 1;
  misc_feature (1)..(523): Homolog of NCBI NO: 33416343 NR Description: Unknown (protein for MGC:66148) [Danio rerio]
  misc_feature (1)..(523): Homolog of NCBI NO: 23274055 NR Description: amyloid beta precursor protein binding protein 1,
  misc_feature (7)..(523): Homolog of NCBI NO: 4502169 NR Description: amyloid beta precursor protein-binding protein 1;
  misc_feature (7)..(523): Homolog of NCBI NO: 14091760 NR Description: APP-binding protein 1 [Rattus norvegicus]
MAEPKTKYDRQLRIWGELGQSALETASICLLNCGPTGSEALKNLVIGGIGSITIVDGSKVEIGDLGNNFMVDAKSVGQSRAKTVCGFLQELNDSVKANFVEENPDTLISTDPSFFSQFTLVIATQLVEDSMVKLDRICREANVMLVLARSYGLTGFVRISVKEHTAIETKPDHSLDDLRLNSPWPELKSYVESIDLNVEEPAAHKHIPYVVILVKVAEEWAQHHSGNLPSTREEKNEFKDLVKSKMVSADEENYKEALLAAFKVFAPTGISQEIQDINHDSCAEVGSNSSDFWVMVAALKEFISNEGGGEVPLEGSMPDMISSTEHYINLQKIYHSKAEADFLSMEQRVKSILVKVGQDPSSISKPTIKSFCKNARKLKVCRYRTIEDEFKSPSTTELHKYLADENYSGAIGFYILLRAVDRFAGTYKKFPGQFDGSTDEDASQLKTIALSLLSEMGCDGYELQEELYNEMCRFGAAEIHVVAALIGGITSQEVIKLITKQFVPKRGTFIFNGIDHKSQSLTL

SEQ ID NO: 97431 - protein, 454 aa, Arabidopsis thaliana
  peptide (1)..(454): Ceres Seq. ID no. 12737521
  misc_feature (1)..(91): Pfam Name: ThiF family Pfam Description: ThiF family
  misc_feature (1)..(454): Homolog of NCBI NO: 15225241 NR Description: putative ubiquitin activating enzyme; protein id: [Arabidopsis thaliana] >gi|25408233|pir||G84732 probable
  misc_feature (1)..(454): Homolog of NCBI NO: 15220442 NR Description: RUB-activating enzyme AXR1; protein id: supported by cDNA: gi_15215701, supported by cDNA: gi_304103
  misc_feature (1)..(454): Homolog of NCBI NO: 29124137 NR Description: putative ubiquitin-activating enzyme (alternative
  misc_feature (1)..(454): Homolog of NCBI NO: 29124136 NR Description: putative ubiquitin-activating enzyme (alternative
  misc_feature (1)..(454): Homolog of NCBI NO: 40889581 NR Description: Chain A, Appbp1-Uba3-Nedd8, An E1-Ubiquitin-Like
  misc_feature (1)..(454): Homolog of NCBI NO: 21450341 NR Description: amyloid beta precursor protein binding protein 1;
  misc_feature (1)..(454): Homolog of NCBI NO: 33416343 NR Description: Unknown (protein for MGC:66148) [Danio rerio]
  misc_feature (1)..(454): Homolog of NCBI NO: 23274055 NR Description: amyloid beta precursor protein binding protein 1,
  misc_feature (1)..(454): Homolog of NCBI NO: 4502169 NR Description: amyloid beta precursor protein-binding protein 1;
  misc_feature (1)..(454): Homolog of NCBI NO: 14091760 NR Description: APP-binding protein 1 [Rattus norvegicus]
MVDAKSVGQSRAKTVCGFLQELNDSVKANFVEENPDTLISTDPSFFSQFTLVIATQLVEDSMVKLDRICREANVMLVLARSYGLTGFVRISVKEHTAIETKPDHSLDDLRLNSPWPELKSYVESIDLNVEEPAAHKHIPYVVILVKVAEEWAQHHSGNLPSTREEKNEFKDLVKSKMVSADEENYKEALLAAFKVFAPTGISQEIQDINHDSCAEVGSNSSDFWVMVAALKEFISNEGGGEVPLEGSMPDMISSTEHYINLQKIYHSKAEADFLSMEQRVKSILVKVGQDPSSISKPTIKSFCKNARKLKVCRYRTIEDEFKSPSTTELHKYLADENYSGAIGFYILLRAVDRFAGTYKKFPGQFDGSTDEDASQLKTIALSLLSEMGCDGYELQEELYNEMCRFGAAEIHVVAALIGGITSQEVIKLITKQFVPKRGTFIFNGIDHKSQSLTL

SEQ ID NO: 97432 - protein, 393 aa, Arabidopsis thaliana
  peptide (1)..(393): Ceres Seq. ID no. 12737522
  misc_feature (1)..(393): Homolog of NCBI NO: 15225241 NR Description: putative ubiquitin activating enzyme; protein id: [Arabidopsis thaliana] >gi|25408233|pir||G84732 probable
  misc_feature (1)..(393): Homolog of NCBI NO: 15220442 NR Description: RUB-activating enzyme AXR1; protein id: supported by cDNA: gi_15215701, supported by cDNA: gi_304103
  misc_feature (1)..(393): Homolog of NCBI NO: 29124137 NR Description: putative ubiquitin-activating enzyme (alternative
  misc_feature (1)..(393): Homolog of NCBI NO: 29124136 NR Description: putative ubiquitin-activating enzyme (alternative
  misc_feature (1)..(393): Homolog of NCBI NO: 40889581 NR Description: Chain A, Appbp1-Uba3-Nedd8, An E1-Ubiquitin-Like
  misc_feature (1)..(393): Homolog of NCBI NO: 21450341 NR Description: amyloid beta precursor protein binding protein 1;
  misc_feature (1)..(393): Homolog of NCBI NO: 33416343 NR Description: Unknown (protein for MGC:66148) [Danio rerio]
  misc_feature (1)..(393): Homolog of NCBI NO: 23274055 NR Description: amyloid beta precursor protein binding protein 1,
  misc_feature (1)..(393): Homolog of NCBI NO: 4502169 NR Description: amyloid beta precursor protein-binding protein 1;
  misc_feature (1)..(393): Homolog of NCBI NO: 14091760 NR Description: APP-binding protein 1 [Rattus norvegicus]
MVKLDRICREANVMLVLARSYGLTGFVRISVKEHTAIETKPDHSLDDLRLNSPWPELKSYVESIDLNVEEPAAHKHIPYVVILVKVAEEWAQHHSGNLPSTREEKNEFKDLVKSKMVSADEENYKEALLAAFKVFAPTGISQEIQDINHDSCAEVGSNSSDFWVMVAALKEFISNEGGGEVPLEGSMPDMISSTEHYINLQKIYHSKAEADFLSMEQRVKSILVKVGQDPSSISKPTIKSFCKNARKLKVCRYRTIEDEFKSPSTTELHKYLADENYSGAIGFYILLRAVDRFAGTYKKFPGQFDGSTDEDASQLKTIALSLLSEMGCDGYELQEELYNEMCRFGAAEIHVVAALIGGITSQEVIKLITKQFVPKRGTFIFNGIDHKSQSLTL

SEQ ID NO: 97433 - DNA, 1119 bp, Arabidopsis thaliana
  misc_feature (1)..(1119): Ceres Seq. ID no. 12737539
  misc_feature: MA Experiment ID: 20000166 Result: Up-regulated in Transcription
  misc_feature: MA Experiment 20000166 PARAMETER Experiment Name: At_100uM_ABA_P Parameter: Age (day) Value: 14
  misc_feature: MA Experiment 20000166 PARAMETER Experiment Name: At_100uM_ABA_P Parameter: Organism Value: A. thaliana
  misc_feature: MA Experiment 20000166 PARAMETER Experiment Name: At_100uM_ABA_P Parameter: Plant Line Value: WS
  misc_feature: MA Experiment 20000166 PARAMETER Experiment Name: At_100uM_ABA_P Parameter: Timepoint (hr) Value: 1
  misc_feature: MA Experiment 20000166 PARAMETER Experiment Name: At_100uM_ABA_P Parameter: Tissue Value: Aerial
  misc_feature: MA Experiment 20000166 PARAMETER Experiment Name: At_100uM_ABA_P Parameter: Treatment Value: 100uM ABA vs. No Treatment
  misc_feature: MA Experiment ID: 20000184 Result: Down-regulated in Transcription
  misc_feature: MA Experiment 20000184 PARAMETER Experiment Name: At_Shoots__P Parameter: Age (day) Value: 7
  misc_feature: MA Experiment 20000184 PARAMETER Experiment Name: At_Shoots__P Parameter: Tissue Value: Shoots vs. Whole Plant
  misc_feature: MA Experiment ID: 20000211 Result: Up-regulated in Transcription
  misc_feature: MA Experiment 20000211 PARAMETER Experiment Name: At_0.001percent_MeJA__P Parameter: Age (day) Value: 14
  misc_feature: MA Experiment 20000211 PARAMETER Experiment Name: At_0.001percent_MeJA__P Parameter: Organism Value: A. thaliana
  misc_feature: MA Experiment 20000211 PARAMETER Experiment Name: At_0.001percent_MeJA__P Parameter: Plant Line Value: WS
  misc_feature: MA Experiment 20000211 PARAMETER Experiment Name: At_0.001percent_MeJA__P Parameter: Timepoint (hr) Value: 1
  misc_feature: MA Experiment 20000211 PARAMETER Experiment Name: At_0.001percent_MeJA__P Parameter: Tissue Value: Aerial
  misc_feature: MA Experiment 20000211 PARAMETER Experiment Name: At_0.001percent_MeJA__P Parameter: Treatment Value: 0.001percent MeJA vs. No Treatment
  misc_feature: MA Experiment ID: 20000267 Result: Up-regulated in Transcription
  misc_feature: MA Experiment 20000267 PARAMETER Experiment Name: At_Drought_P Parameter: Age (day) Value: 7
  misc_feature: MA Experiment 20000267 PARAMETER Experiment Name: At_Drought_P Parameter: Organism Value: A. thaliana
  misc_feature: MA Experiment 20000267 PARAMETER Experiment Name: At_Drought_P Parameter: Plant Line Value: WS
  misc_feature: MA Experiment 20000267 PARAMETER Experiment Name: At_Drought_P Parameter: Timepoint (hr) Value: 6
  misc_feature: MA Experiment 20000267 PARAMETER Experiment Name: At_Drought_P Parameter: Tissue Value: Whole Plant
  misc_feature: MA Experiment 20000267 PARAMETER Experiment Name: At_Drought_P Parameter: Treatment Value: Drought vs. No Drought
  misc_feature: MA Experiment ID: 20000268 Result: Up-regulated in Transcription
  misc_feature: MA Experiment 20000268 PARAMETER Experiment Name: At_100mM_NaCl__P Parameter: Age (day) Value: 14
  misc_feature: MA Experiment 20000268 PARAMETER Experiment Name: At_100mM_NaCl__P Parameter: Organism Value: A. thaliana
  misc_feature: MA Experiment 20000268 PARAMETER Experiment Name: At_100mM_NaCl__P Parameter: Plant Line Value: WS
  misc_feature: MA Experiment 20000268 PARAMETER Experiment Name: At_100mM_NaCl__P Parameter: Timepoint (hr) Value: 6
  misc_feature: MA Experiment 20000268 PARAMETER Experiment Name: At_100mM_NaCl__P Parameter: Tissue Value: Whole Plant
  misc_feature: MA Experiment 20000268 PARAMETER Experiment Name: At_100mM_NaCl__P Parameter: Treatment Value: 100mM NaCl vs. No Treatment
  misc_feature: MA Experiment ID: 20000436 Result: Up-regulated in Transcription
  misc_feature: MA Experiment 20000436 PARAMETER Experiment Name: At_Drought_P Parameter: Age (day) Value: 7
  misc_feature: MA Experiment 20000436 PARAMETER Experiment Name: At_Drought_P Parameter: Organism Value: A. thaliana
  misc_feature: MA Experiment 20000436 PARAMETER Experiment Name: At_Drought_P Parameter: Plant Line Value: WS
  misc_feature: MA Experiment 20000436 PARAMETER Experiment Name: At_Drought_P Parameter: Timepoint (hr) Value: 12
  misc_feature: MA Experiment 20000436 PARAMETER Experiment Name: At_Drought_P Parameter: Tissue Value: Whole Plant
  misc_feature: MA Experiment 20000436 PARAMETER Experiment Name: At_Drought_P Parameter: Treatment Value: Drought vs. No Drought
  misc_feature: MA Experiment ID: 20000437 Result: Up-regulated in Transcription
  misc_feature: MA Experiment 20000437 PARAMETER Experiment Name: At_Drought_P Parameter: Age (day) Value: 8
  misc_feature: MA Experiment 20000437 PARAMETER Experiment Name: At_Drought_P Parameter: Organism Value: A. thaliana
  misc_feature: MA Experiment 20000437 PARAMETER Experiment Name: At_Drought_P Parameter: Plant Line Value: WS
  misc_feature: MA Experiment 20000437 PARAMETER Experiment Name: At_Drought_P Parameter: Timepoint (hr) Value: 24
  misc_feature: MA Experiment 20000437 PARAMETER Experiment Name: At_Drought_P Parameter: Tissue Value: Whole Plant
  misc_feature: MA Experiment 20000437 PARAMETER Experiment Name: At_Drought_P Parameter: Treatment Value: Drought vs. No Drought
  misc_feature: MA Experiment ID: 20000438 Result: Down-regulated in Transcription
  misc_feature: MA Experiment 20000438 PARAMETER Experiment Name: At_Shoots__P Parameter: Age (day) Value: 14
  misc_feature: MA Experiment 20000438 PARAMETER Experiment Name: At_Shoots__P Parameter: Tissue Value: Shoots vs. Whole Plant
  misc_feature: MA Experiment ID: 20000453 Result: Up-regulated in Transcription
  misc_feature: MA Experiment 20000453 PARAMETER Experiment Name: At_100uM_ABA_P Parameter: Age (day) Value: 15
  misc_feature: MA Experiment 20000453 PARAMETER Experiment Name: At_100uM_ABA_P Parameter: Organism Value: A. thaliana
  misc_feature: MA Experiment 20000453 PARAMETER Experiment Name: At_100uM_ABA_P Parameter: Plant Line Value: WS
  misc_feature: MA Experiment 20000453 PARAMETER Experiment Name: At_100uM_ABA_P Parameter: Timepoint (hr) Value: 24
  misc_feature: MA Experiment 20000453 PARAMETER Experiment Name: At_100uM_ABA_P Parameter: Tissue Value: Aerial
  misc_feature: MA Experiment 20000453 PARAMETER Experiment Name: At_100uM_ABA_P Parameter: Treatment Value: 100uM ABA vs. No Treatment
  misc_feature: MA Experiment ID: 20000527 Result: Down-regulated in Transcription
  misc_feature: MA Experiment 20000527 PARAMETER Experiment Name: At_10percent_PEG_P Parameter: Age (day) Value: 20
  misc_feature: MA Experiment 20000527 PARAMETER Experiment Name: At_10percent_PEG_P Parameter: Organism Value: A. thaliana
  misc_feature: MA Experiment 20000527 PARAMETER Experiment Name: At_10percent_PEG_P Parameter: Plant Line Value: WS
  misc_feature: MA Experiment 20000527 PARAMETER Experiment Name: At_10percent_PEG_P Parameter: Timepoint (day) Value: 20
  misc_feature: MA Experiment 20000527 PARAMETER Experiment Name: At_10percent_PEG_P Parameter: Tissue Value: Whole Plant
  misc_feature: MA Experiment 20000527 PARAMETER Experiment Name: At_10percent_PEG_P Parameter: Treatment Value: 10percent PEG vs. No Treatment
  misc_feature: MA Experiment ID: 20001556 Result: Up-regulated in Transcription
  misc_feature: MA Experiment 20001556 PARAMETER Experiment Name: At_Drought_Soil_Dry_P Parameter: Age (day) Value: 26
  misc_feature: MA Experiment 20001556 PARAMETER Experiment Name: At_Drought_Soil_Dry_P Parameter: Organism Value: A. thaliana
  misc_feature: MA Experiment 20001556 PARAMETER Experiment Name: At_Drought_Soil_Dry_P Parameter: Plant Line Value: WS
  misc_feature: MA Experiment 20001556 PARAMETER Experiment Name: At_Drought_Soil_Dry_P Parameter: Post Timepoint (hr) Value: None
  misc_feature: MA Experiment 20001556 PARAMETER Experiment Name: At_Drought_Soil_Dry_P Parameter: Post-Treatment Value: None
  misc_feature: MA Experiment 20001556 PARAMETER Experiment Name: At_Drought_Soil_Dry_P Parameter: Timepoint (day) Value: 12
  misc_feature: MA Experiment 20001556 PARAMETER Experiment Name: At_Drought_Soil_Dry_P Parameter: Treatment Value: Drought vs. No Drought
  misc_feature: MA Experiment ID: 20001557 Result: Up-regulated in Transcription
  misc_feature: MA Experiment 20001557 PARAMETER Experiment Name: At_Drought_Soil_Dry_P Parameter: Age (day) Value: 27
  misc_feature: MA Experiment 20001557 PARAMETER Experiment Name: At_Drought_Soil_Dry_P Parameter: Organism Value: A. thaliana
  misc_feature: MA Experiment 20001557 PARAMETER Experiment Name: At_Drought_Soil_Dry_P Parameter: Plant Line Value: WS
  misc_feature: MA Experiment 20001557 PARAMETER Experiment Name: At_Drought_Soil_Dry_P Parameter: Post Timepoint (hr) Value: 3
  misc_feature: MA Experiment 20001557 PARAMETER Experiment Name: At_Drought_Soil_Dry_P Parameter: Post-Treatment Value: Re-Water vs. No Drought
  misc_feature: MA Experiment 20001557 PARAMETER Experiment Name: At_Drought_Soil_Dry_P Parameter: Timepoint (day) Value: 13
  misc_feature: MA Experiment 20001557 PARAMETER Experiment Name: At_Drought_Soil_Dry_P Parameter: Treatment Value: Drought vs. No Drought
  misc_feature: MA Experiment ID: 20001904 Result: Up-regulated in Transcription
  misc_feature: MA Experiment 20001904 PARAMETER Experiment Name: At_Drought_Reproduction_P Parameter: Age (day) Value: 37
  misc_feature: MA Experiment 20001904 PARAMETER Experiment Name: At_Drought_Reproduction_P Parameter: Organism Value: A. thaliana
  misc_feature: MA Experiment 20001904 PARAMETER Experiment Name: At_Drought_Reproduction_P Parameter: Plant Line Value: WS
  misc_feature: MA Experiment 20001904 PARAMETER Experiment Name: At_Drought_Reproduction_P Parameter: Timepoint (day) Value: 7
  misc_feature: MA Experiment 20001904 PARAMETER Experiment Name: At_Drought_Reproduction_P Parameter: Tissue Value: Rosettes
  misc_feature: MA Experiment 20001904 PARAMETER Experiment Name: At_Drought_Reproduction_P Parameter: Treatment Value: Drought vs. No Drought
  misc_feature: MA Experiment ID: 20001905 Result: Up-regulated in Transcription
  misc_feature: MA Experiment 20001905 PARAMETER Experiment Name: At_Drought_Reproduction_P Parameter: Age (day) Value: 40
  misc_feature: MA Experiment 20001905 PARAMETER Experiment Name: At_Drought_Reproduction_P Parameter: Organism Value: A. thaliana
  misc_feature: MA Experiment 20001905 PARAMETER Experiment Name: At_Drought_Reproduction_P Parameter: Plant Line Value: WS
  misc_feature: MA Experiment 20001905 PARAMETER Experiment Name: At_Drought_Reproduction_P Parameter: Timepoint (day) Value: 10
  misc_feature: MA Experiment 20001905 PARAMETER Experiment Name: At_Drought_Reproduction_P Parameter: Tissue Value: Rosettes
  misc_feature: MA Experiment 20001905 PARAMETER Experiment Name: At_Drought_Reproduction_P Parameter: Treatment Value: Drought vs. No Drought
  misc_feature: MA Experiment ID: 20001910 Result: Up-regulated in Transcription
  misc_feature: MA Experiment 20001910 PARAMETER Experiment Name: At_Drought_Reproduction_P Parameter: Age (day) Value: 37
  misc_feature: MA Experiment 20001910 PARAMETER Experiment Name: At_Drought_Reproduction_P Parameter: Organism Value: A. thaliana
  misc_feature: MA Experiment 20001910 PARAMETER Experiment Name: At_Drought_Reproduction_P Parameter: Plant Line Value: WS
  misc_feature: MA Experiment 20001910 PARAMETER Experiment Name: At_Drought_Reproduction_P Parameter: Timepoint (day) Value: 7
  misc_feature: MA Experiment 20001910 PARAMETER Experiment Name: At_Drought_Reproduction_P Parameter: Tissue Value: Flowers
  misc_feature: MA Experiment 20001910 PARAMETER Experiment Name: At_Drought_Reproduction_P Parameter: Treatment Value: Drought vs. No Drought
  misc_feature: MA Experiment ID: 20001911 Result: Up-regulated in Transcription
  misc_feature: MA Experiment 20001911 PARAMETER Experiment Name: At_Drought_Reproduction_P Parameter: Age (day) Value: 40
  misc_feature: MA Experiment 20001911 PARAMETER Experiment Name: At_Drought_Reproduction_P Parameter: Organism Value: A. thaliana
  misc_feature: MA Experiment 20001911 PARAMETER Experiment Name: At_Drought_Reproduction_P Parameter: Plant Line Value: WS
  misc_feature: MA Experiment 20001911 PARAMETER Experiment Name: At_Drought_Reproduction_P Parameter: Timepoint (day) Value: 10
  misc_feature: MA Experiment 20001911 PARAMETER Experiment Name: At_Drought_Reproduction_P Parameter: Tissue Value: Flowers
  misc_feature: MA Experiment 20001911 PARAMETER Experiment Name: At_Drought_Reproduction_P Parameter: Treatment Value: Drought vs. No Drought
atggaatggactagaggaagaatcctaggccgaggctctacagccaccgtatacgccgccgcaggtcacaattcagatgaaatcctcgccgttaaatcatctgaggttcaccgctcagagttcttgcaaagagaagccaagattctctcgtcgttaagttctccttacgtgatcggatacagaggatcagaaaccaagagagagtcaaacggtgtcgttatgtataatcttttgatggagtacgcaccgtatggaacgttgaccgatgcggcggcgaaagacgggggaagagtcgacgagactcgggtagtgaagtacacgcgcgatatactaaaaggattggagtatatacactcgaaaggaatcgtgcattgtgatgtaaagggtagtaacgtggttatttcggagaaaggcgaggccaagattgcggattttggttgtgcgaaacgggttgacccggtgttcgagtcgccggttatgggaacgccggcttttatggctccagaggtggcgcgtggagagaaacaggggaaggagagtgatatatgggcggttggttgtacgatgatagagatggttacgggttctccaccgtggacgaaggcagattcgagggaggatccggtttcggttctttatcgggtcgggtattcgagtgaaactccggagcttccttgtttgcttgcggaagaagcaaaagattttttggaaaagtgtttgaagagggaagcaaatgaaagatggacagcgacacaactcctaaaccatccttttttgacaactaaaccagacattgaaccagttctggttcccggtttgatttcaaactcaccgacaagtgtgacagatcaaacgttttggagatcagtagaggaagaggaagaagaagaaacagaggaaatacagaaggattcgagagatcttgatcgtttaagcttgtggggttgttactcggagaggatcggacggctgaagtgtgttggtggtttggatgggaccagatgtgatatggagggtggggattggattatggtgagagcgaggtgtgaaggaacaatgattagtgggtcacaaaaggaattgattattagtgaaaatgtattggtgggggaattgtaa

SEQ ID NO: 97434 - protein, 372 aa, Arabidopsis thaliana
  peptide (1)..(372): Ceres Seq. ID no. 12737540
  misc_feature (3)..(259): Pfam Name: Protein kinase domain Pfam Description: Protein kinase domain
  misc_feature (1)..(372): Homolog of NCBI NO: 15225692 NR Description: putative protein kinase; protein id: At2g32510.1
  misc_feature (1)..(346): Homolog of NCBI NO: 15220416 NR Description: putative NPK1-related MAP kinase; protein id: supported by cDNA: gi_17381165, supported by cDNA: gi_20259424
  misc_feature (3)..(350): Homolog of NCBI NO: 15240456 NR Description: putative protein; protein id: At5g55090.1
  misc_feature (1)..(294): Homolog of NCBI NO: 15236903 NR Description: putative NPK1-related protein kinase; protein id:
  misc_feature (1)..(294): Homolog of NCBI NO: 19423926 NR Description: unknown protein [Arabidopsis thaliana]
  misc_feature (3)..(316): Homolog of NCBI NO: 34911466 NR Description: NPK1-related protein kinase-like protein [Oryza
  misc_feature (3)..(316): Homolog of NCBI NO: 37530786 NR Description: putative NPK1-related protein kinase [Oryza
  misc_feature (3)..(297): Homolog of NCBI NO: 34911472 NR Description: NPK1-related protein kinase-like protein [Oryza
  misc_feature (5)..(297): Homolog of NCBI NO: 34911476 NR Description: NPK1-related protein kinase-like protein [Oryza
  misc_feature (5)..(297): Homolog of NCBI NO: 34911474 NR Description: NPK1-related protein kinase-like protein [Oryza
MEWTRGRILGRGSTATVYAAAGHNSDEILAVKSSEVHRSEFLQREAKILSSLSSPYVIGYRGSETKRESNGVVMYNLLMEYAPYGTLTDAAAKDGGRVDETRVVKYTRDILKGLEYIHSKGIVHCDVKGSNVVISEKGEAKIADFGCAKRVDPVFESPVMGTPAFMAPEVARGEKQGKESDIWAVGCTMIEMVTGSPPWTKADSREDPVSVLYRVGYSSETPELPCLLAEEAKDFLEKCLKREANERWTATQLLNHPFLTTKPDIEPVLVPGLISNSPTSVTDQTFWRSVEEEEEEETEEIQKDSRDLDRLSLWGCYSERIGRLKCVGGLDGTRCDMEGGDWIMVRARCEGTMISGSQKELIISENVLVGEL

SEQ ID NO: 97435 - protein, 299 aa, Arabidopsis thaliana
  peptide (1)..(299): Ceres Seq. ID no. 12737541
  misc_feature (1)..(186): Pfam Name: Protein kinase domain Pfam Description: Protein kinase domain
  misc_feature (1)..(299): Homolog of NCBI NO: 15225692 NR Description: putative protein kinase; protein id: At2g32510.1
  misc_feature (1)..(273): Homolog of NCBI NO: 15220416 NR Description: putative NPK1-related MAP kinase; protein id: supported by cDNA: gi_17381165, supported by cDNA: gi_20259424
  misc_feature (1)..(277): Homolog of NCBI NO: 15240456 NR Description: putative protein; protein id: At5g55090.1
  misc_feature (1)..(221): Homolog of NCBI NO: 15236903 NR Description: putative NPK1-related protein kinase; protein id:
  misc_feature (1)..(221): Homolog of NCBI NO: 19423926 NR Description: unknown protein [Arabidopsis thaliana]
  misc_feature (1)..(243): Homolog of NCBI NO: 34911466 NR Description: NPK1-related protein kinase-like protein [Oryza
  misc_feature (1)..(243): Homolog of NCBI NO: 37530786 NR Description: putative NPK1-related protein kinase [Oryza
  misc_feature (1)..(224): Homolog of NCBI NO: 34911472 NR Description: NPK1-related protein kinase-like protein [Oryza
  misc_feature (1)..(224): Homolog of NCBI NO: 34911476 NR Description: NPK1-related protein kinase-like protein [Oryza
  misc_feature (1)..(224): Homolog of NCBI NO: 34911474 NR Description: NPK1-related protein kinase-like protein [Oryza
MYNLLMEYAPYGTLTDAAAKDGGRVDETRVVKYTRDILKGLEYIHSKGIVHCDVKGSNVVISEKGEAKIADFGCAKRVDPVFESPVMGTPAFMAPEVARGEKQGKESDIWAVGCTMIEMVTGSPPWTKADSREDPVSVLYRVGYSSETPELPCLLAEEAKDFLEKCLKREANERWTATQLLNHPFLTTKPDIEPVLVPGLISNSPTSVTDQTFWRSVEEEEEEETEEIQKDSRDLDRLSLWGCYSERIGRLKCVGGLDGTRCDMEGGDWIMVRARCEGTMISGSQKELIISENVLVGEL

SEQ ID NO: 97436 - protein, 294 aa, Arabidopsis thaliana
  peptide (1)..(294): Ceres Seq. ID no. 12737542
  misc_feature (1)..(181): Pfam Name: Protein kinase domain Pfam Description: Protein kinase domain
  misc_feature (1)..(294): Homolog of NCBI NO: 15225692 NR Description: putative protein kinase; protein id: At2g32510.1
  misc_feature (1)..(268): Homolog of NCBI NO: 15220416 NR Description: putative NPK1-related MAP kinase; protein id: supported by cDNA: gi_17381165, supported by cDNA: gi_20259424
  misc_feature (1)..(272): Homolog of NCBI NO: 15240456 NR Description: putative protein; protein id: At5g55090.1
  misc_feature (1)..(216): Homolog of NCBI NO: 15236903 NR Description: putative NPK1-related protein kinase; protein id:
  misc_feature (1)..(216): Homolog of NCBI NO: 19423926 NR Description: unknown protein [Arabidopsis thaliana]
  misc_feature (1)..(238): Homolog of NCBI NO: 34911466 NR Description: NPK1-related protein kinase-like protein [Oryza
  misc_feature (1)..(238): Homolog of NCBI NO: 37530786 NR Description: putative NPK1-related protein kinase [Oryza
  misc_feature (1)..(219): Homolog of NCBI NO: 34911472 NR Description: NPK1-related protein kinase-like protein [Oryza
  misc_feature (1)..(219): Homolog of NCBI NO: 34911476 NR Description: NPK1-related protein kinase-like protein [Oryza
  misc_feature (1)..(219): Homolog of NCBI NO: 34911474 NR Description: NPK1-related protein kinase-like protein [Oryza
MEYAPYGTLTDAAAKDGGRVDETRVVKYTRDILKGLEYIHSKGIVHCDVKGSNVVISEKGEAKIADFGCAKRVDPVFESPVMGTPAFMAPEVARGEKQGKESDIWAVGCTMIEMVTGSPPWTKADSREDPVSVLYRVGYSSETPELPCLLAEEAKDFLEKCLKREANERWTATQLLNHPFLTTKPDIEPVLVPGLISNSPTSVTDQTFWRSVEEEEEEETEEIQKDSRDLDRLSLWGCYSERIGRLKCVGGLDGTRCDMEGGDWIMVRARCEGTMISGSQKELIISENVLVGEL

SEQ ID NO: 97437 - DNA, 606 bp, Arabidopsis thaliana
  misc_feature (1)..(606): Ceres Seq. ID no. 12737554
  misc_feature: MA Experiment ID: 20000184 Result: Up-regulated in Transcription
  misc_feature: MA Experiment 20000184 PARAMETER Experiment Name: At_Shoots__P Parameter: Age (day) Value: 7
  misc_feature: MA Experiment 20000184 PARAMETER Experiment Name: At_Shoots__P Parameter: Tissue Value: Shoots vs. Whole Plant
  misc_feature: MA Experiment ID: 20000185 Result: Down-regulated in Transcription
  misc_feature: MA Experiment 20000185 PARAMETER Experiment Name: At_Roots__P Parameter: Age (day) Value: 7 vs. 21
  misc_feature: MA Experiment 20000185 PARAMETER Experiment Name: At_Roots__P Parameter: Organism Value: A. thaliana
  misc_feature: MA Experiment 20000185 PARAMETER Experiment Name: At_Roots__P Parameter: Tissue Value: Roots vs. Whole Plant
  misc_feature: MA Experiment ID: 20000264 Result: Up-regulated in Transcription
  misc_feature: MA Experiment 20000264 PARAMETER Experiment Name: At_Open_Flower_P Parameter: Age (day) Value: 21
  misc_feature: MA Experiment 20000264 PARAMETER Experiment Name: At_Open_Flower_P Parameter: Plant Line Value: WS
  misc_feature: MA Experiment 20000264 PARAMETER Experiment Name: At_Open_Flower_P Parameter: Tissue Value: Open Flower vs. Whole Plant
  misc_feature: MA Experiment ID: 20000438 Result: Up-regulated in Transcription
  misc_feature: MA Experiment 20000438 PARAMETER Experiment Name: At_Shoots__P Parameter: Age (day) Value: 14
  misc_feature: MA Experiment 20000438 PARAMETER Experiment Name: At_Shoots__P Parameter: Tissue Value: Shoots vs. Whole Plant
  misc_feature: MA Experiment ID: 20000495 Result: Down-regulated in Transcription
  misc_feature: MA Experiment 20000495 PARAMETER Experiment Name: At_Guard_Cells_P Parameter: Harvest Date Value: 8/2/2002
  misc_feature: MA Experiment 20000495 PARAMETER Experiment Name: At_Guard_Cells_P Parameter: Organism Value: A. thaliana
  misc_feature: MA Experiment 20000495 PARAMETER Experiment Name: At_Guard_Cells_P Parameter: Tissue Value: Guard Cells vs. Leaves
  misc_feature: MA Experiment ID: 20000573 Result: Up-regulated in Transcription
  misc_feature: MA Experiment 20000573 PARAMETER Experiment Name: At_100uM_ABA_Mutants__P Parameter: Organism Value: A. thaliana
  misc_feature: MA Experiment 20000573 PARAMETER Experiment Name: At_100uM_ABA_Mutants__P Parameter: Plant Line Value: CS22 vs. Ler wt
  misc_feature: MA Experiment 20000573 PARAMETER Experiment Name: At_100uM_ABA_Mutants__P Parameter: Timepoint (hr) Value: N/A
  misc_feature: MA Experiment 20000573 PARAMETER Experiment Name: At_100uM_ABA_Mutants__P Parameter: Tissue Value: Whole Plant
  misc_feature: MA Experiment 20000573 PARAMETER Experiment Name: At_100uM_ABA_Mutants__P Parameter: Treatment Value: None
  misc_feature: MA Experiment ID: 20001906 Result: Down-regulated in Transcription
  misc_feature: MA Experiment 20001906 PARAMETER Experiment Name: At_Drought_Reproduction_P Parameter: Age (day) Value: 35
  misc_feature: MA Experiment 20001906 PARAMETER Experiment Name: At_Drought_Reproduction_P Parameter: Organism Value: A. thaliana
  misc_feature: MA Experiment 20001906 PARAMETER Experiment Name: At_Drought_Reproduction_P Parameter: Plant Line Value: WS
  misc_feature: MA Experiment 20001906 PARAMETER Experiment Name: At_Drought_Reproduction_P Parameter: Timepoint (day) Value: 5
  misc_feature: MA Experiment 20001906 PARAMETER Experiment Name: At_Drought_Reproduction_P Parameter: Tissue Value: Siliques
  misc_feature: MA Experiment 20001906 PARAMETER Experiment Name: At_Drought_Reproduction_P Parameter: Treatment Value: Drought vs. No Drought
  misc_feature: MA Experiment ID: 20001909 Result: Down-regulated in Transcription
  misc_feature: MA Experiment 20001909 PARAMETER Experiment Name: At_Drought_Reproduction_P Parameter: Age (day) Value: 35
  misc_feature: MA Experiment 20001909 PARAMETER Experiment Name: At_Drought_Reproduction_P Parameter: Organism Value: A. thaliana
  misc_feature: MA Experiment 20001909 PARAMETER Experiment Name: At_Drought_Reproduction_P Parameter: Plant Line Value: WS
  misc_feature: MA Experiment 20001909 PARAMETER Experiment Name: At_Drought_Reproduction_P Parameter: Timepoint (day) Value: 5
  misc_feature: MA Experiment 20001909 PARAMETER Experiment Name: At_Drought_Reproduction_P Parameter: Tissue Value: Flowers
  misc_feature: MA Experiment 20001909 PARAMETER Experiment Name: At_Drought_Reproduction_P Parameter: Treatment Value: Drought vs. No Drought
atgggtttaatttccgggaaggtgtgtgtgtttatctttgtattcgctctagtcgctgaattttcgttcggaaatgttgaggttaacgacgacaaacactttttccacaaacctcgtccatttttacacaaacctcgtccattcctccacaagcatggcatttacaagaaaggtttcggtaagggtttgggcggtggaggcggtctaggcggcggaggtggtctaggaggcggtggtggcctaggaggcggtggaggtttaggcggtggtggaggtttaggcggcggtggtggtctaggaggcggtagcggtttgggaggaggagggggtctaggaggcggtagcggtttgggaggaggagggggtctaggaggtggtggtggtggtggtttaggaggaggaggtggattgggtggtggagctggaggaggatacggtggtggtgctggaggaggacttggaggcggaggtggaattggaggaggaggaggctttggcggtggagggggaggaggattcgggggcggagccggtggtggatttggtaaaggcattggtggtggaggaggtcttggaggaggttatgttggtggtggccatcactga

SEQ ID NO: 97438 - protein, 201 aa, Arabidopsis thaliana
  peptide (1)..(201): Ceres Seq. ID no. 12737555
  misc_feature (64)..(200): Pfam Name: Herpesvirus latent membrane protein 1 (LMP1) Pfam Description: Herpesvirus latent membrane protein 1 (LMP1)
  misc_feature (1)..(201): Homolog of NCBI NO: 15225728 NR Description: unknown protein; protein id: At2g32690.1
  misc_feature (59)..(199): Homolog of NCBI NO: 121627 NR Description: GLYCINE-RICH CELL WALL STRUCTURAL PROTEIN 1
  misc_feature (53)..(199): Homolog of NCBI NO: 34394662 NR Description: putative glycine-rich cell wall structural
  misc_feature (58)..(199): Homolog of NCBI NO: 34394662 NR Description: putative glycine-rich cell wall structural
  misc_feature (58)..(199): Homolog of NCBI NO: 72320 NR Description: glycine-rich cell wall protein precursor - thaliana >gi|16293|emb|CAA41249.1| glycine rich protein
  misc_feature (58)..(199): Homolog of NCBI NO: 15228946 NR Description: unknown protein; protein id: At3g17050.1
  misc_feature (1)..(199): Homolog of NCBI NO: 34394704 NR Description: putative glycine-rich cell wall structural
  misc_feature (58)..(199): Homolog of NCBI NO: 34394662 NR Description: putative glycine-rich cell wall structural
  misc_feature (58)..(199): Homolog of NCBI NO: 34394662 NR Description: putative glycine-rich cell wall structural
  misc_feature (50)..(199): Homolog of NCBI NO: 72320 NR Description: glycine-rich cell wall protein precursor - thaliana >gi|16293|emb|CAA41249.1| glycine rich protein
MGLISGKVCVFIFVFALVAEFSFGNVEVNDDKHFFHKPRPFLHKPRPFLHKHGIYKKGFGKGLGGGGGLGGGGGLGGGGGLGGGGGLGGGGGLGGGGGLGGGSGLGGGGGLGGGSGLGGGGGLGGGGGGGLGGGGGLGGGAGGGYGGGAGGGLGGGGGIGGGGGFGGGGGGGFGGGAGGGFGKGIGGGGGLGGGYVGGGHH

SEQ ID NO: 97439 - DNA, 1695 bp, Arabidopsis thaliana
  misc_feature (1)..(1695): Ceres Seq. ID no. 12737563
  misc_feature: MA Experiment ID: 20000315 Result: Down-regulated in Transcription
  misc_feature: MA Experiment 20000315 PARAMETER Experiment Name: At_14day_Shoots-Roots_Sub_P Parameter: Age (day) Value: 14
  misc_feature: MA Experiment 20000315 PARAMETER Experiment Name: At_14day_Shoots-Roots_Sub_P Parameter: Organism Value: A. thaliana
  misc_feature: MA Experiment 20000315 PARAMETER Experiment Name: At_14day_Shoots-Roots_Sub_P Parameter: Plant Line Value: WS
  misc_feature: MA Experiment 20000315 PARAMETER Experiment Name: At_14day_Shoots-Roots_Sub_P Parameter: Tissue Value: Shoots vs. Whole Plant
  misc_feature: MA Experiment ID: 20000327 Result: Up-regulated in Transcription
  misc_feature: MA Experiment 20000327 PARAMETER Experiment Name: At_42deg_Heat_Sub_P Parameter: Age (day) Value: 14
  misc_feature: MA Experiment 20000327 PARAMETER Experiment Name: At_42deg_Heat_Sub_P Parameter: Organism Value: A. thaliana
  misc_feature: MA Experiment 20000327 PARAMETER Experiment Name: At_42deg_Heat_Sub_P Parameter: Plant Line Value: WS
  misc_feature: MA Experiment 20000327 PARAMETER Experiment Name: At_42deg_Heat_Sub_P Parameter: Temperature (deg C) Value: 42 vs. 22
  misc_feature: MA Experiment 20000327 PARAMETER Experiment Name: At_42deg_Heat_Sub_P Parameter: Timepoint (hr) Value: 1
  misc_feature: MA Experiment 20000327 PARAMETER Experiment Name: At_42deg_Heat_Sub_P Parameter: Tissue Value: Aerial
  misc_feature: MA Experiment ID: 20000328 Result: Up-regulated in Transcription
  misc_feature: MA Experiment 20000328 PARAMETER Experiment Name: At_42deg_Heat_Sub_P Parameter: Age (day) Value: 14
  misc_feature: MA Experiment 20000328 PARAMETER Experiment Name: At_42deg_Heat_Sub_P Parameter: Organism Value: A. thaliana
  misc_feature: MA Experiment 20000328 PARAMETER Experiment Name: At_42deg_Heat_Sub_P Parameter: Plant Line Value: WS
  misc_feature: MA Experiment 20000328 PARAMETER Experiment Name: At_42deg_Heat_Sub_P Parameter: Temperature (deg C) Value: 42 vs. 22
  misc_feature: MA Experiment 20000328 PARAMETER Experiment Name: At_42deg_Heat_Sub_P Parameter: Timepoint (hr) Value: 6
  misc_feature: MA Experiment 20000328 PARAMETER Experiment Name: At_42deg_Heat_Sub_P Parameter: Tissue Value: Aerial
ctgacccggaagtttctaatctctctctctttcctaaagtaacaaactttaaattttctgcaaaatcgaacaacgaatcatcagcccgagaagcttcttcaatcctgtaaatttttcattctacgtaccaatctctcatttcccagattcgtttcttgcttccattgctcttcctttgtaccaatcatcatctccaggtgatcggtttattaaaaattagggtttttgattgttctaatccgatctctcggttcctttaagattgatgatgaatttcgaagcgtgatatgaaaagatctgaagacttgatgtcagaacttgcgttgcgtgggttccgagataattgttgatggaaagagtatcagagcgaagtttgtcagaaaatttgagaagaagcgatcgagaagatgggaagattatagaatgggaagaattcgaccatgagcttacgaggttatggagtctttcttctgctatgaaattagccacagagaggaaacaaatcctgcaaccgaaacttgagtctcttattcaggttagtactgaatcattgagacgcactaatgaacttgaagaaatgcgtcagaggcttgaagcaagaaaattgttggtggacaagacatcagttgcttgcaaagttactgagcaggatgttaaaaagaaagaggagaatcttagtacagaagtgaggtctttgctagtaggcggaacaactctttcgatcgctaaaagcaaattgcaggaatcaaactgccaactagaaggagaaagtggttatgcacatttaaagattgtaacgaataagctgagaaagaggcagcagttcatggtatctcaagtttcatttatctatcccttgaagattgaagctggaccttcacaagaccaagaactggaatcatttcctggtggcagtagattaggaactaagcctctgagtcaaggatctgtgagaattctggggttgccttttagtatggccccgtttacaaagatgagcttcttcaccgacaagaaagaagttcagaagtctgcaactgccctaggatatgtagcccatgccgtgtcactaatagctccttacttgagagtgccaattcgttatcctttgtgcctggggggttccaaaacatacattcgagactatgcaccttacattgagccttcaccatcagacatgtctccgattaccacgctttcccaaaatattaactttgtagagtttcctctgtttctggatggtcaagatacaacacgagctgcctatgctgtcttcttactaaacaagaacatcgagcaactcttgaactttgtgggggaaaatagtctaggaccacgtcaggttctagcaaacctgaaggagctaattcgaatcatccaatctccagattatatcgattatttatgacgatgatgatgatgacgacgaaaataatgacgatgatgaagatatcaatccattccttctcacacatcttccagagttccagtgtctcttcttgtttattgaatcatctcaagtcagacactttgtggaggtaaaaaagtacaaataattgattttgttagagaaattttagacatggaaattctctttaggatgagactcctcctctctagatgtgatgtttttggtttggagagaccgacgataaacgaaagcttagtctattatacagttctttcttaagttct

SEQ ID NO: 97440 - protein, 352 aa, Arabidopsis thaliana
  peptide (1)..(352): Ceres Seq. ID no. 12737564
  misc_feature (1)..(352): Homolog of NCBI NO: 30685426 NR Description: expressed protein [Arabidopsis thaliana]
  misc_feature (77)..(315): Homolog of NCBI NO: 7486092 NR Description: hypothetical protein At2g32760 [imported] -
  misc_feature (77)..(315): Homolog of NCBI NO: 20197059 NR Description: hypothetical protein [Arabidopsis thaliana]
  misc_feature (229)..(340): Homolog of NCBI NO: 34857795 NR Description: similar to UV radiation resistance-associated
  misc_feature (229)..(340): Homolog of NCBI NO: 26354727 NR Description: unnamed protein product [Mus musculus]
MERVSERSLSENLRRSDREDGKIIEWEEFDHELTRLWSLSSAMKLATERKQILQPKLESLIQVSTESLRRTNELEEMRQRLEARKLLVDKTSVACKVTEQDVKKKEENLSTEVRSLLVGGTTLSIAKSKLQESNCQLEGESGYAHLKIVTNKLRKRQQFMVSQVSFIYPLKIEAGPSQDQELESFPGGSRLGTKPLSQGSVRILGLPFSMAPFTKMSFFTDKKEVQKSATALGYVAHAVSLIAPYLRVPIRYPLCLGGSKTYIRDYAPYIEPSPSDMSPITTLSQNINFVEFPLFLDGQDTTRAAYAVFLLNKNIEQLLNFVGENSLGPRQVLANLKELIRIIQSPDYIDYL

SEQ ID NO: 97441 - protein, 310 aa, Arabidopsis thaliana
  peptide (1)..(310): Ceres Seq. ID no. 12737565
  misc_feature (1)..(310): Homolog of NCBI NO: 30685426 NR Description: expressed protein [Arabidopsis thaliana]
  misc_feature (35)..(273): Homolog of NCBI NO: 7486092 NR Description: hypothetical protein At2g32760 [imported] -
  misc_feature (35)..(273): Homolog of NCBI NO: 20197059 NR Description: hypothetical protein [Arabidopsis thaliana]
  misc_feature (187)..(298): Homolog of NCBI NO: 34857795 NR Description: similar to UV radiation resistance-associated
  misc_feature (187)..(298): Homolog of NCBI NO: 26354727 NR Description: unnamed protein product [Mus musculus]
MKLATERKQILQPKLESLIQVSTESLRRTNELEEMRQRLEARKLLVDKTSVACKVTEQDVKKKEENLSTEVRSLLVGGTTLSIAKSKLQESNCQLEGESGYAHLKIVTNKLRKRQQFMVSQVSFIYPLKIEAGPSQDQELESFPGGSRLGTKPLSQGSVRILGLPFSMAPFTKMSFFTDKKEVQKSATALGYVAHAVSLIAPYLRVPIRYPLCLGGSKTYIRDYAPYIEPSPSDMSPITTLSQNINFVEFPLFLDGQDTTRAAYAVFLLNKNIEQLLNFVGENSLGPRQVLANLKELIRIIQSPDYIDYL

SEQ ID NO: 97442 - protein, 276 aa, Arabidopsis thaliana
  peptide (1)..(276): Ceres Seq. ID no. 12737566
  misc_feature (1)..(276): Homolog of NCBI NO: 30685426 NR Description: expressed protein [Arabidopsis thaliana]
  misc_feature (1)..(239): Homolog of NCBI NO: 7486092 NR Description: hypothetical protein At2g32760 [imported] -
  misc_feature (1)..(239): Homolog of NCBI NO: 20197059 NR Description: hypothetical protein [Arabidopsis thaliana]
  misc_feature (153)..(264): Homolog of NCBI NO: 34857795 NR Description: similar to UV radiation resistance-associated
  misc_feature (153)..(264): Homolog of NCBI NO: 26354727 NR Description: unnamed protein product [Mus musculus]
MRQRLEARKLLVDKTSVACKVTEQDVKKKEENLSTEVRSLLVGGTTLSIAKSKLQESNCQLEGESGYAHLKIVTNKLRKRQQFMVSQVSFIYPLKIEAGPSQDQELESFPGGSRLGTKPLSQGSVRILGLPFSMAPFTKMSFFTDKKEVQKSATALGYVAHAVSLIAPYLRVPIRYPLCLGGSKTYIRDYAPYIEPSPSDMSPITTLSQNINFVEFPLFLDGQDTTRAAYAVFLLNKNIEQLLNFVGENSLGPRQVLANLKELIRIIQSPDYIDYL

SEQ ID NO: 97443 - DNA, 1530 bp, Arabidopsis thaliana
  misc_feature (1)..(1530): Ceres Seq. ID no. 12737567
  misc_feature: MA Experiment ID: 20000355 Result: Up-regulated in Transcription
  misc_feature: MA Experiment 20000355 PARAMETER Experiment Name: At_Siliques_Sub_P Parameter: Age (day) Value: 21
  misc_feature: MA Experiment 20000355 PARAMETER Experiment Name: At_Siliques_Sub_P Parameter: Organism Value: A. thaliana
  misc_feature: MA Experiment 20000355 PARAMETER Experiment Name: At_Siliques_Sub_P Parameter: Plant Line Value: WS
  misc_feature: MA Experiment 20000355 PARAMETER Experiment Name: At_Siliques_Sub_P Parameter: Tissue Value: Less Than 5mm Siliques vs. Whole Plant
atgatgaaaccagttccaaagctttgggttgtcatctcaagtgcctttgtgttctgtcttttagttctgtttcaaatcaataaatcagatttgatcgaagcaaatctccaaatcactcatcaagttaacaacttcctcatctccttcgttgcttcttcaaataatcaaatcctaaatcacaccaaacatgcgaatgagagtgatggaatcagagcgaaacagcttgaggaagaagaaacggatacttgcgccggaagatacatctacatgtacaatcttccaagcacattcaacgacgacatcatcaaagaatgtcgtccactcatcaaatggttcgatatgtgtccattcatggtcaattccgggctcggtccacagattttggtctccgataaaaccacagctcgagtcttaaccgtgaaaaccggttcttggtactcaacgaaccaattcttgctttcggttatcttccgagagaggatgaaacactacgagtgtttgaccaacaactcttctctagcctcagcgatctatgtcccatactacgcaggatttgatgtgagccgtcacctctggggatacaacgtgacggttagagacgaattggcgataaagctggcacaatggctgagagagagacctgaatgggggaagatgtacggccgagatcacttctttgtgaccggacggattggttgggatttcaggaggtttcacgatgaagattcagattggggaagcaaactgatgctattacctgaattctcgaatctgacaatgttaggtatcgaaacgactgcttgggctaacgaatttgcgattccttatcctacttatttccatccaaagagcttaacagagatttggagatggcagaagaaagtgaagagtgtgaagaggaagtatttgttttcgtttgttggaggtccaagacctaaattggatggatctattaggggagagattataaagcagtgccttgcatctcacggtaaatgcaactttcttaactgctttgttaatgactgcgataatccggttaagataatgaaggtgtttgaaaattctgtcttctgtttacaaccttcgggagattcgtacactcggagatcgatattcgattcgattctggcgggttgtataccggttttcttcagcccaggttcgggttacaaccaatatatttggtattttccaaaggattataccaagtactcggtttacataccagagaatgaaatgagaaatggaacggttagtctcaagaatattttgggtatgatcgctaaggagaggattttgaggatgagaaaagaggttgtgaagattataccaaaaatcatatataataaaccagggtttggaccggagaagattgaagatgcgtttgacattgcagtggataggatgcttgagagggtagcaatggttaagaggatgatggaagaagggaaagatgttcaaagtcagtattattcacagacaaaggatttgaaaaaacttgagattatacatgaaaaaactgcttaa

SEQ ID NO: 97444 - protein, 509 aa, Arabidopsis thaliana; identical to SEQ ID NO: 78653
  peptide (1)..(509): Ceres Seq. ID no. 12737568
  misc_feature (88)..(440): Pfam Name: Exostosin family Pfam Description: Exostosin family
  misc_feature (1)..(509): Homolog of NCBI NO: 15225735 NR Description: hypothetical protein; protein id: At2g32750.1
  misc_feature (20)..(478): Homolog of NCBI NO: 15225734 NR Description: Exostosin family; protein id: At2g32740.1
  misc_feature (82)..(499): Homolog of NCBI NO: 29824391 NR Description: unknown protein [Arabidopsis thaliana]
  misc_feature (71)..(486): Homolog of NCBI NO: 27497206 NR Description: Unknown protein [Oryza sativa (japonica
  misc_feature (44)..(486): Homolog of NCBI NO: 15227020 NR Description: hypothetical protein; protein id: At2g29040.1
  misc_feature (70)..(499): Homolog of NCBI NO: 25411977 NR Description: hypothetical protein At2g20370 [imported] - thaliana >gi|4512698|gb|AAD21751.1| unknown protein [Arabidopsis
  misc_feature (70)..(499): Homolog of NCBI NO: 30680972 NR Description: expressed protein [Arabidopsis thaliana]
  misc_feature (52)..(479): Homolog of NCBI NO: 15225165 NR Description: Exostosin family; protein id: At2g31990.1
  misc_feature (77)..(478): Homolog of NCBI NO: 27497203 NR Description: Hypothetical protein [Oryza sativa (japonica
  misc_feature (71)..(506): Homolog of NCBI NO: 37535066 NR Description: hypothetical protein [Oryza sativa (japonica group)] >gi|22165082|gb|AAM93699.1| hypothetical protein [Oryza

SEQ ID NO: 97445 - protein, 508 aa, Arabidopsis thaliana; identical to SEQ ID NO: 78654
  peptide (1)..(508): Ceres Seq. ID no. 12737569
  misc_feature (87)..(439): Pfam Name: Exostosin family Pfam Description: Exostosin family
  misc_feature (1)..(508): Homolog of NCBI NO: 15225735 NR Description: hypothetical protein; protein id: At2g32750.1
  misc_feature (19)..(477): Homolog of NCBI NO: 15225734 NR Description: Exostosin family; protein id: At2g32740.1
  misc_feature (81)..(498): Homolog of NCBI NO: 29824391 NR Description: unknown protein [Arabidopsis thaliana]
  misc_feature (70)..(485): Homolog of NCBI NO: 27497206 NR Description: Unknown protein [Oryza sativa (japonica
  misc_feature (43)..(485): Homolog of NCBI NO: 15227020 NR Description: hypothetical protein; protein id: At2g29040.1
  misc_feature (69)..(498): Homolog of NCBI NO: 25411977 NR Description: hypothetical protein At2g20370 [imported] - thaliana >gi|4512698|gb|AAD21751.1| unknown protein [Arabidopsis
  misc_feature (69)..(498): Homolog of NCBI NO: 30680972 NR Description: expressed protein [Arabidopsis thaliana]
  misc_feature (51)..(478): Homolog of NCBI NO: 15225165 NR Description: Exostosin family; protein id: At2g31990.1
  misc_feature (76)..(477): Homolog of NCBI NO: 27497203 NR Description: Hypothetical protein [Oryza sativa (japonica
  misc_feature (70)..(505): Homolog of NCBI NO: 37535066 NR Description: hypothetical protein [Oryza sativa (japonica group)] >gi|22165082|gb|AAM93699.1| hypothetical protein [Oryza

SEQ ID NO: 97446 - protein, 420 aa, Arabidopsis thaliana
  peptide (1)..(420): Ceres Seq. ID no. 12737570
  misc_feature (1)..(351): Pfam Name: Exostosin family Pfam Description: Exostosin family
  misc_feature (1)..(420): Homolog of NCBI NO: 15225735 NR Description: hypothetical protein; protein id: At2g32750.1
  misc_feature (1)..(389): Homolog of NCBI NO: 15225734 NR Description: Exostosin family; protein id: At2g32740.1
  misc_feature (1)..(410): Homolog of NCBI NO: 29824391 NR Description: unknown protein [Arabidopsis thaliana]
  misc_feature (1)..(397): Homolog of NCBI NO: 27497206 NR Description: Unknown protein [Oryza sativa (japonica
  misc_feature (1)..(397): Homolog of NCBI NO: 15227020 NR Description: hypothetical protein; protein id: At2g29040.1
  misc_feature (1)..(410): Homolog of NCBI NO: 25411977 NR Description: hypothetical protein At2g20370 [imported] - thaliana >gi|4512698|gb|AAD21751.1| unknown protein [Arabidopsis
  misc_feature (1)..(410): Homolog of NCBI NO: 30680972 NR Description: expressed protein [Arabidopsis thaliana]
  misc_feature (1)..(390): Homolog of NCBI NO: 15225165 NR Description: Exostosin family; protein id: At2g31990.1
  misc_feature (1)..(389): Homolog of NCBI NO: 27497203 NR Description: Hypothetical protein [Oryza sativa (japonica
  misc_feature (1)..(417): Homolog of NCBI NO: 37535066 NR Description: hypothetical protein [Oryza sativa (japonica group)] >gi|22165082|gb|AAM93699.1| hypothetical protein [Oryza
MYNLPSTFNDDIIKECRPLIKWFDMCPFMVNSGLGPQILVSDKTTARVLTVKTGSWYSTNQFLLSVIFRERMKHYECLTNNSSLASAIYVPYYAGFDVSRHLWGYNVTVRDELAIKLAQWLRERPEWGKMYGRDHFFVTGRIGWDFRRFHDEDSDWGSKLMLLPEFSNLTMLGIETTAWANEFAIPYPTYFHPKSLTEIWRWQKKVKSVKRKYLFSFVGGPRPKLDGSIRGEIIKQCLASHGKCNFLNCFVNDCDNPVKIMKVFENSVFCLQPSGDSYTRRSIFDSILAGCIPVFFSPGSGYNQYIWYFPKDYTKYSVYIPENEMRNGTVSLKNILGMIAKERILRMRKEVVKIIPKIIYNKPGFGPEKIEDAFDIAVDRMLERVAMVKRMMEEGKDVQSQYYSQTKDLKKLEIIHEKTA

SEQ ID NO: 97447 - DNA, 2547 bp, Arabidopsis thaliana
  misc_feature (1)..(2547): Ceres Seq. ID no. 12737575
  misc_feature: MA Experiment ID: 20000169 Result: Up-regulated in Transcription
  misc_feature: MA Experiment 20000169 PARAMETER Experiment Name: At_100uM_ABA_P Parameter: Age (day) Value: 14
  misc_feature: MA Experiment 20000169 PARAMETER Experiment Name: At_100uM_ABA_P Parameter: Organism Value: A. thaliana
  misc_feature: MA Experiment 20000169 PARAMETER Experiment Name: At_100uM_ABA_P Parameter: Plant Line Value: WS
  misc_feature: MA Experiment 20000169 PARAMETER Experiment Name: At_100uM_ABA_P Parameter: Timepoint (hr) Value: 6
  misc_feature: MA Experiment 20000169 PARAMETER Experiment Name: At_100uM_ABA_P Parameter: Tissue Value: Aerial
  misc_feature: MA Experiment 20000169 PARAMETER Experiment Name: At_100uM_ABA_P Parameter: Treatment Value: 100uM ABA vs. No Treatment
  misc_feature: MA Experiment ID: 20000171 Result: Down-regulated in Transcription
  misc_feature: MA Experiment 20000171 PARAMETER Experiment Name: At_42deg_Heat_P Parameter: Age (day) Value: 14
  misc_feature: MA Experiment 20000171 PARAMETER Experiment Name: At_42deg_Heat_P Parameter: Organism Value: A. thaliana
  misc_feature: MA Experiment 20000171 PARAMETER Experiment Name: At_42deg_Heat_P Parameter: Plant Line Value: WS
  misc_feature: MA Experiment 20000171 PARAMETER Experiment Name: At_42deg_Heat_P Parameter: Temperature (deg C) Value: 42 vs. 22
  misc_feature: MA Experiment 20000171 PARAMETER Experiment Name: At_42deg_Heat_P Parameter: Timepoint (hr) Value: 1
  misc_feature: MA Experiment 20000171 PARAMETER Experiment Name: At_42deg_Heat_P Parameter: Tissue Value: Aerial
  misc_feature: MA Experiment ID: 20000185 Result: Down-regulated in Transcription
  misc_feature: MA Experiment 20000185 PARAMETER Experiment Name: At_Roots__P Parameter: Age (day) Value: 7 vs. 21
  misc_feature: MA Experiment 20000185 PARAMETER Experiment Name: At_Roots__P Parameter: Organism Value: A. thaliana
  misc_feature: MA Experiment 20000185 PARAMETER Experiment Name: At_Roots__P Parameter: Tissue Value: Roots vs. Whole Plant
  misc_feature: MA Experiment ID: 20000213 Result: Down-regulated in Transcription
  misc_feature: MA Experiment 20000213 PARAMETER Experiment Name: At_4deg_Cold_P Parameter: Timepoint (hr) Value: 2
  misc_feature: MA Experiment ID: 20000234 Result: Down-regulated in Transcription
  misc_feature: MA Experiment 20000234 PARAMETER Experiment Name: At_Siliques_P Parameter: Age (day) Value: 21
  misc_feature: MA Experiment 20000234 PARAMETER Experiment Name: At_Siliques_P Parameter: Organism Value: A. thaliana
  misc_feature: MA Experiment 20000234 PARAMETER Experiment Name: At_Siliques_P Parameter: Plant Line Value: WS
  misc_feature: MA Experiment 20000234 PARAMETER Experiment Name: At_Siliques_P Parameter: Tissue Value: Less Than 5mm Siliques vs. Whole Plant
  misc_feature: MA Experiment ID: 20000264 Result: Down-regulated in Transcription
  misc_feature: MA Experiment 20000264 PARAMETER Experiment Name: At_Open_Flower_P Parameter: Age (day) Value: 21
  misc_feature: MA Experiment 20000264 PARAMETER Experiment Name: At_Open_Flower_P Parameter: Plant Line Value: WS
  misc_feature: MA Experiment 20000264 PARAMETER Experiment Name: At_Open_Flower_P Parameter: Tissue Value: Open Flower vs. Whole Plant
  misc_feature: MA Experiment ID: 20000265 Result: Down-regulated in Transcription
  misc_feature: MA Experiment 20000265 PARAMETER Experiment Name: At_Open_Flower_P Parameter: Age (day) Value: 21
  misc_feature: MA Experiment 20000265 PARAMETER Experiment Name: At_Open_Flower_P Parameter: Plant Line Value: WS
  misc_feature: MA Experiment 20000265 PARAMETER Experiment Name: At_Open_Flower_P Parameter: Tissue Value: Closed Flower vs. Whole Plant
  misc_feature: MA Experiment ID: 20000267 Result: Up-regulated in Transcription
  misc_feature: MA Experiment 20000267 PARAMETER Experiment Name: At_Drought_P Parameter: Age (day) Value: 7
  misc_feature: MA Experiment 20000267 PARAMETER Experiment Name: At_Drought_P Parameter: Organism Value: A. thaliana
  misc_feature: MA Experiment 20000267 PARAMETER Experiment Name: At_Drought_P Parameter: Plant Line Value: WS
  misc_feature: MA Experiment 20000267 PARAMETER Experiment Name: At_Drought_P Parameter: Timepoint (hr) Value: 6
  misc_feature: MA Experiment 20000267 PARAMETER Experiment Name: At_Drought_P Parameter: Tissue Value: Whole Plant
  misc_feature: MA Experiment 20000267 PARAMETER Experiment Name: At_Drought_P Parameter: Treatment Value: Drought vs. No Drought
  misc_feature: MA Experiment ID: 20000286 Result: Down-regulated in Transcription
  misc_feature: MA Experiment 20000286 PARAMETER Experiment Name: At_Open_Flower_P Parameter: Age (day) Value: 21
  misc_feature: MA Experiment 20000286 PARAMETER Experiment Name: At_Open_Flower_P Parameter: Plant Line Value: WS
  misc_feature: MA Experiment 20000286 PARAMETER Experiment Name: At_Open_Flower_P Parameter: Tissue Value: Half Open vs. Whole Plant
  misc_feature: MA Experiment ID: 20000436 Result: Up-regulated in Transcription
  misc_feature: MA Experiment 20000436 PARAMETER Experiment Name: At_Drought_P Parameter: Age (day) Value: 7
  misc_feature: MA Experiment 20000436 PARAMETER Experiment Name: At_Drought_P Parameter: Organism Value: A. thaliana
  misc_feature: MA Experiment 20000436 PARAMETER Experiment Name: At_Drought_P Parameter: Plant Line Value: WS
  misc_feature: MA Experiment 20000436 PARAMETER Experiment Name: At_Drought_P Parameter: Timepoint (hr) Value: 12
  misc_feature: MA Experiment 20000436 PARAMETER Experiment Name: At_Drought_P Parameter: Tissue Value: Whole Plant
  misc_feature: MA Experiment 20000436 PARAMETER Experiment Name: At_Drought_P Parameter: Treatment Value: Drought vs. No Drought
  misc_feature: MA Experiment ID: 20000437 Result: Up-regulated in Transcription
  misc_feature: MA Experiment 20000437 PARAMETER Experiment Name: At_Drought_P Parameter: Age (day) Value: 8
  misc_feature: MA Experiment 20000437 PARAMETER Experiment Name: At_Drought_P Parameter: Organism Value: A. thaliana
  misc_feature: MA Experiment 20000437 PARAMETER Experiment Name: At_Drought_P Parameter: Plant Line Value: WS
  misc_feature: MA Experiment 20000437 PARAMETER Experiment Name: At_Drought_P Parameter: Timepoint (hr) Value: 24
  misc_feature: MA Experiment 20000437 PARAMETER Experiment Name: At_Drought_P Parameter: Tissue Value: Whole Plant
  misc_feature: MA Experiment 20000437 PARAMETER Experiment Name: At_Drought_P Parameter: Treatment Value: Drought vs. No Drought
  misc_feature: MA Experiment ID: 20000439 Result: Down-regulated in Transcription
  misc_feature: MA Experiment 20000439 PARAMETER Experiment Name: At_Roots__P Parameter: Age (day) Value: 14 vs. 21
  misc_feature: MA Experiment 20000439 PARAMETER Experiment Name: At_Roots__P Parameter: Organism Value: A. thaliana
  misc_feature: MA Experiment 20000439 PARAMETER Experiment Name: At_Roots__P Parameter: Tissue Value: Roots vs. Whole Plant
  misc_feature: MA Experiment ID: 20000794 Result: Down-regulated in Transcription
  misc_feature: MA Experiment 20000794 PARAMETER Experiment Name: At_Petals_P Parameter: Age (day) Value: 23-25 days
  misc_feature: MA Experiment 20000794 PARAMETER Experiment Name: At_Petals_P Parameter: Plant Line Value: WS
  misc_feature: MA Experiment 20000794 PARAMETER Experiment Name: At_Petals_P Parameter: Tissue Value: Petals vs. Whole plant
  misc_feature: MA Experiment ID: 20001247 Result: Up-regulated in Transcription
  misc_feature: MA Experiment 20001247 PARAMETER Experiment Name: At_Far-red-induction_P Parameter: Age (day) Value: 7
  misc_feature: MA Experiment 20001247 PARAMETER Experiment Name: At_Far-red-induction_P Parameter: Light Value: Far-red vs. White
  misc_feature: MA Experiment 20001247 PARAMETER Experiment Name: At_Far-red-induction_P Parameter: Organism Value: A. thaliana
  misc_feature: MA Experiment 20001247 PARAMETER Experiment Name: At_Far-red-induction_P Parameter: Plant Line Value: Columbia
  misc_feature: MA Experiment 20001247 PARAMETER Experiment Name: At_Far-red-induction_P Parameter: Timepoint (hr) Value: 1
  misc_feature: MA Experiment 20001247 PARAMETER Experiment Name: At_Far-red-induction_P Parameter: Tissue Value: Whole Plant
  misc_feature: MA Experiment ID: 20001248 Result: Up-regulated in Transcription
  misc_feature: MA Experiment 20001248 PARAMETER Experiment Name: At_Far-red-induction_P Parameter: Age (day) Value: 7
  misc_feature: MA Experiment 20001248 PARAMETER Experiment Name: At_Far-red-induction_P Parameter: Light Value: Far-red vs. White
  misc_feature: MA Experiment 20001248 PARAMETER Experiment Name: At_Far-red-induction_P Parameter: Organism Value: A. thaliana
  misc_feature: MA Experiment 20001248 PARAMETER Experiment Name: At_Far-red-induction_P Parameter: Plant Line Value: Columbia
  misc_feature: MA Experiment 20001248 PARAMETER Experiment Name: At_Far-red-induction_P Parameter: Timepoint (hr) Value: 4
  misc_feature: MA Experiment 20001248 PARAMETER Experiment Name: At_Far-red-induction_P Parameter: Tissue Value: Whole Plant
  misc_feature: MA Experiment ID: 20001450 Result: Up-regulated in Transcription
  misc_feature: MA Experiment 20001450 PARAMETER Experiment Name: At_Far-red-induction_P Parameter: Age (day) Value: 7
  misc_feature: MA Experiment 20001450 PARAMETER Experiment Name: At_Far-red-induction_P Parameter: Light Value: Far-red vs. White
  misc_feature: MA Experiment 20001450 PARAMETER Experiment Name: At_Far-red-induction_P Parameter: Organism Value: A. thaliana
  misc_feature: MA Experiment 20001450 PARAMETER Experiment Name: At_Far-red-induction_P Parameter: Plant Line Value: Columbia
  misc_feature: MA Experiment 20001450 PARAMETER Experiment Name: At_Far-red-induction_P Parameter: Timepoint (hr) Value: 8
  misc_feature: MA Experiment 20001450 PARAMETER Experiment Name: At_Far-red-induction_P Parameter: Tissue Value: Whole Plant
  misc_feature: MA Experiment ID: 20001451 Result: Up-regulated in Transcription
  misc_feature: MA Experiment 20001451 PARAMETER Experiment Name: At_Far-red-induction_P Parameter: Age (day) Value: 7
  misc_feature: MA Experiment 20001451 PARAMETER Experiment Name: At_Far-red-induction_P Parameter: Light Value: Far-red vs. White
  misc_feature: MA Experiment 20001451 PARAMETER Experiment Name: At_Far-red-induction_P Parameter: Organism Value: A. thaliana
  misc_feature: MA Experiment 20001451 PARAMETER Experiment Name: At_Far-red-induction_P Parameter: Plant Line Value: Columbia
  misc_feature: MA Experiment 20001451 PARAMETER Experiment Name: At_Far-red-induction_P Parameter: Timepoint (hr) Value: 24
  misc_feature: MA Experiment 20001451 PARAMETER Experiment Name: At_Far-red-induction_P Parameter: Tissue Value: Whole Plant
  misc_feature: MA Experiment ID: 20001905 Result: Up-regulated in Transcription
  misc_feature: MA Experiment 20001905 PARAMETER Experiment Name: At_Drought_Reproduction_P Parameter: Age (day) Value: 40
  misc_feature: MA Experiment 20001905 PARAMETER Experiment Name: At_Drought_Reproduction_P Parameter: Organism Value: A. thaliana
  misc_feature: MA Experiment 20001905 PARAMETER Experiment Name: At_Drought_Reproduction_P Parameter: Plant Line Value: WS
  misc_feature: MA Experiment 20001905 PARAMETER Experiment Name: At_Drought_Reproduction_P Parameter: Timepoint (day) Value: 10
  misc_feature: MA Experiment 20001905 PARAMETER Experiment Name: At_Drought_Reproduction_P Parameter: Tissue Value: Rosettes
  misc_feature: MA Experiment 20001905 PARAMETER Experiment Name: At_Drought_Reproduction_P Parameter: Treatment Value: Drought vs. No Drought
  misc_feature: MA Experiment ID: 20001911 Result: Up-regulated in Transcription
  misc_feature: MA Experiment 20001911 PARAMETER Experiment Name: At_Drought_Reproduction_P Parameter: Age (day) Value: 40
  misc_feature: MA Experiment 20001911 PARAMETER Experiment Name: At_Drought_Reproduction_P Parameter: Organism Value: A. thaliana
  misc_feature: MA Experiment 20001911 PARAMETER Experiment Name: At_Drought_Reproduction_P Parameter: Plant Line Value: WS
  misc_feature: MA Experiment 20001911 PARAMETER Experiment Name: At_Drought_Reproduction_P Parameter: Timepoint (day) Value: 10
  misc_feature: MA Experiment 20001911 PARAMETER Experiment Name: At_Drought_Reproduction_P Parameter: Tissue Value: Flowers
  misc_feature: MA Experiment 20001911 PARAMETER Experiment Name: At_Drought_Reproduction_P Parameter: Treatment Value: Drought vs. No Drought
atggctatggatcatctctgtttcgtactaccgacagaatccggcgagttaaagccaccggtgatggtcgaggagaccacagaagaagaagaggagaagaagagtcgtgattgtggacgtcaagttgtgagtttaatcggagatttattccggcgattacacggctctaagttggtgaagagcttgaatctctgtagtatcaacgagagtaaagattcgatttcaatggagatcaataaatcattcactgacatggaaggtgttcagctttccagcaaagtcggttgcgagaatccaagaatctttggatactctgagctttatatcggaactaatggtttcagcgacgaactgatcctcggaagcggcggtttcggccgcgtttacaaggcgttgttaccgagcgacggaaccaccgtggctgttaaatgcttggcggagaagaaaggagaacaattcgagaaaactttcgcggcggagcttgttgcggtggctcagctccgccatcgaaatcttgtgaagttaagaggttggtgtctacacgaagacgagttgcttcttgtttacgattacatgcctaaccggagcttagatcgtgtgcttttccgacgaccggaagttaactccgattttaaaccgttggattgggatcggaggggtaaaatcgtcaaaggactcgccgccgcgttgttctacctccacgagcagttagagactcagatcattcacagagatgtgaagacgagtaacgttatgttggattctgagtttaacgctaaactcggagattttggtttagctcggtggttagaacacaagattgatgaaacagagcatgattcgagttacgactctgtttcttccttccgtaaccaccagttccgagtcgcggattcgactcggatcggtgggactatcgggtacttaccaccggagagtttccggaaaaaaaccgttgccaccgctaaaacagatgttttcagctttggtgttgtggttttagaggttgtctccggtagacgagccgttgatctttcgttctcggaagataaaatcattttacttgattgggttcggagattatccgataaccggaaattactcgacgccggggattctcggttagcaaaaggatcttatgatctctctgatatgaagagaatgattcatcttgctctgctctgttctttaaacaatccaacgcatcgtcccaacatgaaatgggttatcggagcactttccggcgagttttccggtaacttaccggcgttaccttcgtttaagagccatcctctttatattcctttatcttctttaaaatcaacctcaacttcggcgactacgactactacaagaacaacgatgaccaccaccacctccacaactagcttcaatgcgtcgtcggagtcaacgccgtcatcaaattacgttactgcccttgaggattctatttaccagacggcggagactggagaaaatccgtactttaattacaacagccggagagtgatgtcatcaaagtctttcgtattggacacgccaagagagatttcatacaacgaccttgttttagccactgataatttctctgatgcacgtcgcgttgctgaggttgattttggtacggcttattatggtttactaaatggagaccaacatattgtggtgaaacgtctcggtatgactaaatgtccggcgcttgttacccggttctccactgaactacttaacctaggccggcttcgacaccgtaacctagtaatgctccgtggttggtgcaccgaacacggagaaatgcttgtagtgtacgattattccgcgaatcgtaagctaagtcatcttcttttccataatcatatacctggaaactctgttttgcgatggaaaagtcggtacaacgtgatcaaatcgcttgcttgcgctgtacgttatctccacgaggaatgggacgaacaagtcattcaccgaaacattacttcttcaactatatttcttgatagagatatgaatccgcggctttgcggattcgcattggcagagtttttgtctagaaacgacaaggctcatcaagctgcaaaaaagaaaggatctgctcaagggatttttggttatatggcaccagaatacatggaatccggcgaggctacaaccatggcggatgtatacagctttggcgtggtagtgctcgagatggttacggggcagccagcagtggattacaagaggaaaaaagaagatgctcttatggtgttgcgaatccgcgaagtagttggtaaccgaaaaaaactcttggaggagattgcagatattcatttggatgatgaatacgagaatcgagaattggcaaggctattacggttagggttagtttgcacgagaaccgatccgaagttaaggcctagcattagccaagtggtgagtatattggatggaagcgagaggttcttcgaagaggaaggaggaaaggaaggtgacgttagccgcaagcaaatgtatgattcgtctatgttgatgattagacaaatgcaagcgcttgggatccattga

SEQ ID NO: 97448 - protein, 848 aa, Arabidopsis thaliana
  peptide (1)..(848): Ceres Seq. ID no. 12737576
  misc_feature (1)..(449): Homolog of NCBI NO: 4376160 NR Description: putative kinase [Arabidopsis thaliana]
  misc_feature (514)..(811): Homolog of NCBI NO: 25404097 NR Description: probable receptor protein kinase F14G9.24 - Arabidopsis thaliana >gi|12321749|gb|AAG50909.1|AC069159_10
  misc_feature (99)..(273): Homolog of NCBI NO: 25404097 NR Description: probable receptor protein kinase F14G9.24 - Arabidopsis thaliana >gi|12321749|gb|AAG50909.1|AC069159_10
  misc_feature (299)..(460): Homolog of NCBI NO: 25404097 NR Description: probable receptor protein kinase F14G9.24 - Arabidopsis thaliana >gi|12321749|gb|AAG50909.1|AC069159_10
  misc_feature (497)..(813): Homolog of NCBI NO: 6686398 NR Description: F1E22.15 [Arabidopsis thaliana]
  misc_feature (51)..(278): Homolog of NCBI NO: 6686398 NR Description: F1E22.15 [Arabidopsis thaliana]
  misc_feature (297)..(500): Homolog of NCBI NO: 6686398 NR Description: F1E22.15 [Arabidopsis thaliana]
  misc_feature (522)..(809): Homolog of NCBI NO: 15220338 NR Description: serine/threonine kinase, putative; protein id:
  misc_feature (82)..(276): Homolog of NCBI NO: 15220338 NR Description: serine/threonine kinase, putative; protein id:
  misc_feature (297)..(459): Homolog of NCBI NO: 15220338 NR Description: serine/threonine kinase, putative; protein id:
MAMDHLCFVLPTESGELKPPVMVEETTEEEEEKKSRDCGRQVVSLIGDLFRRLHGSKLVKSLNLCSINESKDSISMEINKSFTDMEGVQLSSKVGCENPRIFGYSELYIGTNGFSDELILGSGGFGRVYKALLPSDGTTVAVKCLAEKKGEQFEKTFAAELVAVAQLRHRNLVKLRGWCLHEDELLLVYDYMPNRSLDRVLFRRPEVNSDFKPLDWDRRGKIVKGLAAALFYLHEQLETQIIHRDVKTSNVMLDSEFNAKLGDFGLARWLEHKIDETEHDSSYDSVSSFRNHQFRVADSTRIGGTIGYLPPESFRKKTVATAKTDVFSFGVVVLEVVSGRRAVDLSFSEDKIILLDWVRRLSDNRKLLDAGDSRLAKGSYDLSDMKRMIHLALLCSLNNPTHRPNMKWVIGALSGEFSGNLPALPSFKSHPLYIPLSSLKSTSTSATTTTTRTTMTTTTSTTSFNASSESTPSSNYVTALEDSIYQTAETGENPYFNYNSRRVMSSKSFVLDTPREISYNDLVLATDNFSDARRVAEVDFGTAYYGLLNGDQHIVVKRLGMTKCPALVTRFSTELLNLGRLRHRNLVMLRGWCTEHGEMLVVYDYSANRKLSHLLFHNHIPGNSVLRWKSRYNVIKSLACAVRYLHEEWDEQVIHRNITSSTIFLDRDMNPRLCGFALAEFLSRNDKAHQAAKKKGSAQGIFGYMAPEYMESGEATTMADVYSFGVVVLEMVTGQPAVDYKRKKEDALMVLRIREVVGNRKKLLEEIADIHLDDEYENRELARLLRLGLVCTRTDPKLRPSISQVVSILDGSERFFEEEGGKEGDVSRKQMYDSSMLMIRQMQALGIH

SEQ ID NO: 97449 - protein, 846 aa, Arabidopsis thaliana
  peptide (1)..(846): Ceres Seq. ID no. 12737577
  misc_feature (1)..(447): Homolog of NCBI NO: 4376160 NR Description: putative kinase [Arabidopsis thaliana]
  misc_feature (512)..(809): Homolog of NCBI NO: 25404097 NR Description: probable receptor protein kinase F14G9.24 - Arabidopsis thaliana >gi|12321749|gb|AAG50909.1|AC069159_10
  misc_feature (97)..(271): Homolog of NCBI NO: 25404097 NR Description: probable receptor protein kinase F14G9.24 - Arabidopsis thaliana >gi|12321749|gb|AAG50909.1|AC069159_10
  misc_feature (297)..(458): Homolog of NCBI NO: 25404097 NR Description: probable receptor protein kinase F14G9.24 - Arabidopsis thaliana >gi|12321749|gb|AAG50909.1|AC069159_10
  misc_feature (495)..(811): Homolog of NCBI NO: 6686398 NR Description: F1E22.15 [Arabidopsis thaliana]
  misc_feature (49)..(276): Homolog of NCBI NO: 6686398 NR Description: F1E22.15 [Arabidopsis thaliana]
  misc_feature (295)..(498): Homolog of NCBI NO: 6686398 NR Description: F1E22.15 [Arabidopsis thaliana]
  misc_feature (520)..(807): Homolog of NCBI NO: 15220338 NR Description: serine/threonine kinase, putative; protein id:
  misc_feature (80)..(274): Homolog of NCBI NO: 15220338 NR Description: serine/threonine kinase, putative; protein id:
  misc_feature (295)..(457): Homolog of NCBI NO: 15220338 NR Description: serine/threonine kinase, putative; protein id:
MDHLCFVLPTESGELKPPVMVEETTEEEEEKKSRDCGRQVVSLIGDLFRRLHGSKLVKSLNLCSINESKDSISMEINKSFTDMEGVQLSSKVGCENPRIFGYSELYIGTNGFSDELILGSGGFGRVYKALLPSDGTTVAVKCLAEKKGEQFEKTFAAELVAVAQLRHRNLVKLRGWCLHEDELLLVYDYMPNRSLDRVLFRRPEVNSDFKPLDWDRRGKIVKGLAAALFYLHEQLETQIIHRDVKTSNVMLDSEFNAKLGDFGLARWLEHKIDETEHDSSYDSVSSFRNHQFRVADSTRIGGTIGYLPPESFRKKTVATAKTDVFSFGVVVLEVVSGRRAVDLSFSEDKIILLDWVRRLSDNRKLLDAGDSRLAKGSYDLSDMKRMIHLALLCSLNNPTHRPNMKWVIGALSGEFSGNLPALPSFKSHPLYIPLSSLKSTSTSATTTTTRTTMTTTTSTTSFNASSESTPSSNYVTALEDSIYQTAETGENPYFNYNSRRVMSSKSFVLDTPREISYNDLVLATDNFSDARRVAEVDFGTAYYGLLNGDQHIVVKRLGMTKCPALVTRFSTELLNLGRLRHRNLVMLRGWCTEHGEMLVVYDYSANRKLSHLLFHNHIPGNSVLRWKSRYNVIKSLACAVRYLHEEWDEQVIHRNITSSTIFLDRDMNPRLCGFALAEFLSRNDKAHQAAKKKGSAQGIFGYMAPEYMESGEATTMADVYSFGVVVLEMVTGQPAVDYKRKKEDALMVLRIREVVGNRKKLLEEIADIHLDDEYENRELARLLRLGLVCTRTDPKLRPSISQVVSILDGSERFFEEEGGKEGDVSRKQMYDSSMLMIRQMQALGIH

SEQ ID NO: 97450 - protein, 827 aa, Arabidopsis thaliana
  peptide (1)..(827): Ceres Seq. ID no. 12737578
  misc_feature (1)..(428): Homolog of NCBI NO: 4376160 NR Description: putative kinase [Arabidopsis thaliana]
  misc_feature (493)..(790): Homolog of NCBI NO: 25404097 NR Description: probable receptor protein kinase F14G9.24 - Arabidopsis thaliana >gi|12321749|gb|AAG50909.1|AC069159_10
  misc_feature (78)..(252): Homolog of NCBI NO: 25404097 NR Description: probable receptor protein kinase F14G9.24 - Arabidopsis thaliana >gi|12321749|gb|AAG50909.1|AC069159_10
  misc_feature (278)..(439): Homolog of NCBI NO: 25404097 NR Description: probable receptor protein kinase F14G9.24 - Arabidopsis thaliana >gi|12321749|gb|AAG50909.1|AC069159_10
  misc_feature (476)..(792): Homolog of NCBI NO: 6686398 NR Description: F1E22.15 [Arabidopsis thaliana]
  misc_feature (30)..(257): Homolog of NCBI NO: 6686398 NR Description: F1E22.15 [Arabidopsis thaliana]
  misc_feature (276)..(479): Homolog of NCBI NO: 6686398 NR Description: F1E22.15 [Arabidopsis thaliana]
  misc_feature (501)..(788): Homolog of NCBI NO: 15220338 NR Description: serine/threonine kinase, putative; protein id:
  misc_feature (61)..(255): Homolog of NCBI NO: 15220338 NR Description: serine/threonine kinase, putative; protein id:
  misc_feature (276)..(438): Homolog of NCBI NO: 15220338 NR Description: serine/threonine kinase, putative; protein id:
MVEETTEEEEEKKSRDCGRQVVSLIGDLFRRLHGSKLVKSLNLCSINESKDSISMEINKSFTDMEGVQLSSKVGCENPRIFGYSELYIGTNGFSDELILGSGGFGRVYKALLPSDGTTVAVKCLAEKKGEQFEKTFAAELVAVAQLRHRNLVKLRGWCLHEDELLLVYDYMPNRSLDRVLFRRPEVNSDFKPLDWDRRGKIVKGLAAALFYLHEQLETQIIHRDVKTSNVMLDSEFNAKLGDFGLARWLEHKIDETEHDSSYDSVSSFRNHQFRVADSTRIGGTIGYLPPESFRKKTVATAKTDVFSFGVVVLEVVSGRRAVDLSFSEDKIILLDWVRRLSDNRKLLDAGDSRLAKGSYDLSDMKRMIHLALLCSLNNPTHRPNMKWVIGALSGEFSGNLPALPSFKSHPLYIPLSSLKSTSTSATTTTTRTTMTTTTSTTSFNASSESTPSSNYVTALEDSIYQTAETGENPYFNYNSRRVMSSKSFVLDTPREISYNDLVLATDNFSDARRVAEVDFGTAYYGLLNGDQHIVVKRLGMTKCPALVTRFSTELLNLGRLRHRNLVMLRGWCTEHGEMLVVYDYSANRKLSHLLFHNHIPGNSVLRWKSRYNVIKSLACAVRYLHEEWDEQVIHRNITSSTIFLDRDMNPRLCGFALAEFLSRNDKAHQAAKKKGSAQGIFGYMAPEYMESGEATTMADVYSFGVVVLEMVTGQPAVDYKRKKEDALMVLRIREVVGNRKKLLEEIADIHLDDEYENRELARLLRLGLVCTRTDPKLRPSISQVVSILDGSERFFEEEGGKEGDVSRKQMYDSSMLMIRQMQALGIH

SEQ ID NO: 97451 - DNA, 3111 bp, Arabidopsis thaliana
  misc_feature (1)..(3111): Ceres Seq. ID no. 12737624
  misc_feature: MA Experiment ID: 20000264 Result: Up-regulated in Transcription
  misc_feature: MA Experiment 20000264 PARAMETER Experiment Name: At_Open_Flower_P Parameter: Age (day) Value: 21
  misc_feature: MA Experiment 20000264 PARAMETER Experiment Name: At_Open_Flower_P Parameter: Plant Line Value: WS
  misc_feature: MA Experiment 20000264 PARAMETER Experiment Name: At_Open_Flower_P Parameter: Tissue Value: Open Flower vs. Whole Plant
  misc_feature: MA Experiment ID: 20000286 Result: Up-regulated in Transcription
  misc_feature: MA Experiment 20000286 PARAMETER Experiment Name: At_Open_Flower_P Parameter: Age (day) Value: 21
  misc_feature: MA Experiment 20000286 PARAMETER Experiment Name: At_Open_Flower_P Parameter: Plant Line Value: WS
  misc_feature: MA Experiment 20000286 PARAMETER Experiment Name: At_Open_Flower_P Parameter: Tissue Value: Half Open vs. Whole Plant
  misc_feature: MA Experiment ID: 20000438 Result: Down-regulated in Transcription
  misc_feature: MA Experiment 20000438 PARAMETER Experiment Name: At_Shoots__P Parameter: Age (day) Value: 14
  misc_feature: MA Experiment 20000438 PARAMETER Experiment Name: At_Shoots__P Parameter: Tissue Value: Shoots vs. Whole Plant
  misc_feature: MA Experiment ID: 20000794 Result: Up-regulated in Transcription
  misc_feature: MA Experiment 20000794 PARAMETER Experiment Name: At_Petals_P Parameter: Age (day) Value: 23-25 days
  misc_feature: MA Experiment 20000794 PARAMETER Experiment Name: At_Petals_P Parameter: Plant Line Value: WS
  misc_feature: MA Experiment 20000794 PARAMETER Experiment Name: At_Petals_P Parameter: Tissue Value: Petals vs. Whole plant
  misc_feature: MA Experiment ID: 20001757 Result: Down-regulated in Transcription
  misc_feature: MA Experiment 20001757 PARAMETER Experiment Name: At_50mM_NH4NO3_L-to-H_P Parameter: Timepoint (hr) Value: 6
  misc_feature: MA Experiment 20001757 PARAMETER Experiment Name: At_50mM_NH4NO3_L-to-H_P Parameter: Tissue Value: Leaf
  misc_feature: MA Experiment 20001757 PARAMETER Experiment Name: At_50mM_NH4NO3_L-to-H_P Parameter: Treatment Value: 50mM NH4NO3 vs 100mM Mannitol
  misc_feature: MA Experiment ID: 20001904 Result: Up-regulated in Transcription
  misc_feature: MA Experiment 20001904 PARAMETER Experiment Name: At_Drought_Reproduction_P Parameter: Age (day) Value: 37
  misc_feature: MA Experiment 20001904 PARAMETER Experiment Name: At_Drought_Reproduction_P Parameter: Organism Value: A. thaliana
  misc_feature: MA Experiment 20001904 PARAMETER Experiment Name: At_Drought_Reproduction_P Parameter: Plant Line Value: WS
  misc_feature: MA Experiment 20001904 PARAMETER Experiment Name: At_Drought_Reproduction_P Parameter: Timepoint (day) Value: 7
  misc_feature: MA Experiment 20001904 PARAMETER Experiment Name: At_Drought_Reproduction_P Parameter: Tissue Value: Rosettes
  misc_feature: MA Experiment 20001904 PARAMETER Experiment Name: At_Drought_Reproduction_P Parameter: Treatment Value: Drought vs. No Drought
  misc_feature: MA Experiment ID: 20001910 Result: Up-regulated in Transcription
  misc_feature: MA Experiment 20001910 PARAMETER Experiment Name: At_Drought_Reproduction_P Parameter: Age (day) Value: 37
  misc_feature: MA Experiment 20001910 PARAMETER Experiment Name: At_Drought_Reproduction_P Parameter: Organism Value: A. thaliana
  misc_feature: MA Experiment 20001910 PARAMETER Experiment Name: At_Drought_Reproduction_P Parameter: Plant Line Value: WS
  misc_feature: MA Experiment 20001910 PARAMETER Experiment Name: At_Drought_Reproduction_P Parameter: Timepoint (day) Value: 7
  misc_feature: MA Experiment 20001910 PARAMETER Experiment Name: At_Drought_Reproduction_P Parameter: Tissue Value: Flowers
  misc_feature: MA Experiment 20001910 PARAMETER Experiment Name: At_Drought_Reproduction_P Parameter: Treatment Value: Drought vs. No Drought
atggcttcaagtccacccaagaagaccttaaattcacaatcttcttccttaagccggcctccacaagctgtcaagtttggtcgccggacgtccagtggtcgcattgttagcctctcccgtgacgatgacatggacgtctctggtgattactccggccaaaatgattacatcaactacaccgtcctcatgcctccaacacctgacaaccaacctgctggctcctctggctccacctcggagtctaaaggtgatgctaaccgaggtggaggaggaggagacgggcccaagatggggaataagctggagaggagattgtctgtcatgaaatcaaataacaaatcaatgttgttgaggagccagacgggagattttgatcataacaggtggttgtttgaatctaaaggaaaatacggtattggaaacgcgttttggtcagaagaggatgatacctatgatggtggcgttagcaagtccgatttcttagacaagccatggaaacctctcacgaggaaagttcagatcccggccaaaattcttagtccctacaggttattaatcgtgattcgtcttgtgatagtcttcttcttcctttggtggcgtattacgaaccctaatgaggatgcaatgtggttatggggactatcgatagtctgcgagatttggttcgctttctcttggattcttgacattcttccgaagctaaaccctataaatagagctactgaccttgctgccttgcatgacaagtttgagcagccctctccgtcaaatcccactggtcgctctgatcttcccggtgttgatgtgttcgtttccacggctgaccctgagaaggaaccgcctttagtcactgcaaacacccttctctcgatccttgctgtggattatccaattgagaagctttctgcttacatttctgacgatggtggtgcaattctcacctttgaagctatggctgaagctgttcgttttgctgagtattgggtgccattttgcagaaaacatgatatagagccacggaacccggatagttactttagcattaaaaaggacccaacaaaaaacaagaaaaggcaagatttcgtcaaagatcgtcgttggatcaagcgtgagtatgacgaattcaaggtcaggatcaatggtcttccagaacaaatcaagaaaagagctgaacagttcaacatgagagaagagctcaaggagaagcgaattgcccgagagaaaaatgggggtgtattgccgccagatggggttgaggtggtaaaagcaacgtggatggctgatggtacgcattggccagggacatggtttgaacctaaacctgatcattcaaaaggagatcacgccggaattctacagatcatgagcaaagtgcctgatcttgaaccggtgatgggcggaccgaatgaaggcgcgctagatttcacagggattgatattcgtgtacctatgtttgcttatgtctcgcgtgagaaacgtccaggttttgaccacaacaagaaagccggcgctatgaatggtatggttagagcttcagccatattatccaatggcgcgtttatcctcaatctggactgtgatcactacatctacaactccaaagctatcaaagaaggaatgtgtttcatgatggaccgaggtggtgacaggatctgttatattcagtttccacaacggttcgaaggaatcgacccatcagatcgatatgcaaatcacaatactgtcttcttcgatggtaacatgagagcattagatgggttacaaggtcctgtctatgttggaacagggtgtatgttccgaaggtatgctctctatggattcaacccacctcgagccaatgagtactcaggcgtgtttggtcaggaaaaggctccagctatgcatgtccggactcagtcccaagcatcccaaacgtcccaagcgtctgatttagagtctgatacacagcctcttaatgatgatccagatcttggtctgcccaaaaagtttggtaattcgaccatgttcacagacactattccagttgcagagtaccaaggacggcctctagcagatcacatgtcggttaaaaacggaagaccacctggtgctttgctcctgccacgacctccccttgatgctccaacagtggctgaagccatcgctgtcatttcttgctggtatgaagacaatactgaatggggagatagaatcggatggatttacgggtcggtcacggaagacgtggtgacaggttatcgtatgcataaccgtggttggcggtccgtttactgcatcacaaaacgtgatgctttccgtggcacagctccaatcaatctcactgaccgtctccatcaagttctccgttgggccacaggctctgtagaaatctttttctccaagaacaatgccatgttcgccaccagaaggctcaagtttctccagcgagtcgcctacctcaatgtcgggatctaccctttcacttccatcttcttggtcgtctattgcttcctccctgctctctgtctcttcagcggaaaattcatcgtccagagcctcgatatccacttcctctcctaccttctctgcatcaccgtaaccctaaccctaatctcactcctcgaggtcaaatggtcgggaatcggactggaagaatggtggagaaatgaacagttttggttaatcggaggcacaagcgctcatcttgcagcagtcgttcaaggtttgctcaaagttatagccggaatcgaaatctccttcaccctgacatcgaaagcctcaggagaagacgaagacgacatctttgcggatctttacattgtgaaatggacaggcttattcatcatgccgcttacaatcatcatagtcaaccttgttgcgatagtgattggagcttcgagaacaatatacagtgtgattccgcaatggggcaagttaatgggaggaatattctttagtttatgggtcttgactcatatgtatccgtttgctaaaggattgatgggtcgaagaggaaaggttccaacgattgtttatgtttggtccgggcttgtgtcgattaccgtctcgctgctttggatcaccattagtcctccagatgatgtttcaggcagtggaggaatctcagtgtaa

SEQ ID NO: 97452 - protein, 1036 aa, Arabidopsis thaliana
  peptide (1)..(1036): Ceres Seq. ID no. 12737625
  misc_feature (419)..(1024): Homolog of NCBI NO: 28411807 NR Description: cellulose synthase-4 [Oryza sativa (japonica
  misc_feature (133)..(392): Homolog of NCBI NO: 28411807 NR Description: cellulose synthase-4 [Oryza sativa (japonica
  misc_feature (439)..(1024): Homolog of NCBI NO: 9622880 NR Description: cellulose synthase-4 [Zea mays]
  misc_feature (133)..(392): Homolog of NCBI NO: 9622880 NR Description: cellulose synthase-4 [Zea mays]
  misc_feature (703)..(1024): Homolog of NCBI NO: 23534479 NR Description: cellulose synthase [Populus tremuloides]
  misc_feature (439)..(682): Homolog of NCBI NO: 23534479 NR Description: cellulose synthase [Populus tremuloides]
  misc_feature (146)..(388): Homolog of NCBI NO: 23534479 NR Description: cellulose synthase [Populus tremuloides]
  misc_feature (439)..(1024): Homolog of NCBI NO: 30103013 NR Description: putative cellulose synthase catalytic subunit
  misc_feature (133)..(392): Homolog of NCBI NO: 30103013 NR Description: putative cellulose synthase catalytic subunit
  misc_feature (425)..(1024): Homolog of NCBI NO: 15238454 NR Description: cellulose synthase catalytic subunit protein id: At5g05170.1, supported by cDNA: gi_2827142 thaliana] >gi|9759258|dbj|BAB09693.1| cellulose synthase
MASSPPKKTLNSQSSSLSRPPQAVKFGRRTSSGRIVSLSRDDDMDVSGDYSGQNDYINYTVLMPPTPDNQPAGSSGSTSESKGDANRGGGGGDGPKMGNKLERRLSVMKSNNKSMLLRSQTGDFDHNRWLFESKGKYGIGNAFWSEEDDTYDGGVSKSDFLDKPWKPLTRKVQIPAKILSPYRLLIVIRLVIVFFFLWWRITNPNEDAMWLWGLSIVCEIWFAFSWILDILPKLNPINRATDLAALHDKFEQPSPSNPTGRSDLPGVDVFVSTADPEKEPPLVTANTLLSILAVDYPIEKLSAYISDDGGAILTFEAMAEAVRFAEYWVPFCRKHDIEPRNPDSYFSIKKDPTKNKKRQDFVKDRRWIKREYDEFKVRINGLPEQIKKRAEQFNMREELKEKRIAREKNGGVLPPDGVEVVKATWMADGTHWPGTWFEPKPDHSKGDHAGILQIMSKVPDLEPVMGGPNEGALDFTGIDIRVPMFAYVSREKRPGFDHNKKAGAMNGMVRASAILSNGAFILNLDCDHYIYNSKAIKEGMCFMMDRGGDRICYIQFPQRFEGIDPSDRYANHNTVFFDGNMRALDGLQGPVYVGTGCMFRRYALYGFNPPRANEYSGVFGQEKAPAMHVRTQSQASQTSQASDLESDTQPLNDDPDLGLPKKFGNSTMFTDTIPVAEYQGRPLADHMSVKNGRPPGALLLPRPPLDAPTVAEAIAVISCWYEDNTEWGDRIGWIYGSVTEDVVTGYRMHNRGWRSVYCITKRDAFRGTAPINLTDRLHQVLRWATGSVEIFFSKNNAMFATRRLKFLQRVAYLNVGIYPFTSIFLVVYCFLPALCLFSGKFIVQSLDIHFLSYLLCITVTLTLISLLEVKWSGIGLEEWWRNEQFWLIGGTSAHLAAVVQGLLKVIAGIEISFTLTSKASGEDEDDIFADLYIVKWTGLFIMPLTIIIVNLVAIVIGASRTIYSVIPQWGKLMGGIFFSLWVLTHMYPFAKGLMGRRGKVPTIVYVWSGLVSITVSLLWITISPPDDVSGSGGISV

SEQ ID NO: 97453 - protein, 993 aa, Arabidopsis thaliana
  peptide (1)..(993): Ceres Seq. ID no. 12737626
  misc_feature (376)..(981): Homolog of NCBI NO: 28411807 NR Description: cellulose synthase-4 [Oryza sativa (japonica
  misc_feature (90)..(349): Homolog of NCBI NO: 28411807 NR Description: cellulose synthase-4 [Oryza sativa (japonica
  misc_feature (396)..(981): Homolog of NCBI NO: 9622880 NR Description: cellulose synthase-4 [Zea mays]
  misc_feature (90)..(349): Homolog of NCBI NO: 9622880 NR Description: cellulose synthase-4 [Zea mays]
  misc_feature (660)..(981): Homolog of NCBI NO: 23534479 NR Description: cellulose synthase [Populus tremuloides]
  misc_feature (396)..(639): Homolog of NCBI NO: 23534479 NR Description: cellulose synthase [Populus tremuloides]
  misc_feature (103)..(345): Homolog of NCBI NO: 23534479 NR Description: cellulose synthase [Populus tremuloides]
  misc_feature (396)..(981): Homolog of NCBI NO: 30103013 NR Description: putative cellulose synthase catalytic subunit
  misc_feature (90)..(349): Homolog of NCBI NO: 30103013 NR Description: putative cellulose synthase catalytic subunit
  misc_feature (382)..(981): Homolog of NCBI NO: 15238454 NR Description: cellulose synthase catalytic subunit protein id: At5g05170.1, supported by cDNA: gi_2827142 thaliana] >gi|9759258|dbj|BAB09693.1| cellulose synthase
MDVSGDYSGQNDYINYTVLMPPTPDNQPAGSSGSTSESKGDANRGGGGGDGPKMGNKLERRLSVMKSNNKSMLLRSQTGDFDHNRWLFESKGKYGIGNAFWSEEDDTYDGGVSKSDFLDKPWKPLTRKVQIPAKILSPYRLLIVIRLVIVFFFLWWRITNPNEDAMWLWGLSIVCEIWFAFSWILDILPKLNPINRATDLAALHDKFEQPSPSNPTGRSDLPGVDVFVSTADPEKEPPLVTANTLLSILAVDYPIEKLSAYISDDGGAILTFEAMAEAVRFAEYWVPFCRKHDIEPRNPDSYFSIKKDPTKNKKRQDFVKDRRWIKREYDEFKVRINGLPEQIKKRAEQFNMREELKEKRIAREKNGGVLPPDGVEVVKATWMADGTHWPGTWFEPKPDHSKGDHAGILQIMSKVPDLEPVMGGPNEGALDFTGIDIRVPMFAYVSREKRPGFDHNKKAGAMNGMVRASAILSNGAFILNLDCDHYIYNSKAIKEGMCFMMDRGGDRICYIQFPQRFEGIDPSDRYANHNTVFFDGNMRALDGLQGPVYVGTGCMFRRYALYGFNPPRANEYSGVFGQEKAPAMHVRTQSQASQTSQASDLESDTQPLNDDPDLGLPKKFGNSTMFTDTIPVAEYQGRPLADHMSVKNGRPPGALLLPRPPLDAPTVAEAIAVISCWYEDNTEWGDRIGWIYGSVTEDVVTGYRMHNRGWRSVYCITKRDAFRGTAPINLTDRLHQVLRWATGSVEIFFSKNNAMFATRRLKFLQRVAYLNVGIYPFTSIFLVVYCFLPALCLFSGKFIVQSLDIHFLSYLLCITVTLTLISLLEVKWSGIGLEEWWRNEQFWLIGGTSAHLAAVVQGLLKVIAGIEISFTLTSKASGEDEDDIFADLYIVKWTGLFIMPLTIIIVNLVAIVIGASRTIYSVIPQWGKLMGGIFFSLWVLTHMYPFAKGLMGRRGKVPTIVYVWSGLVSITVSLLWITISPPDDVSGSGGISV

SEQ ID NO: 97454 - protein, 974 aa, Arabidopsis thaliana
  peptide (1)..(974): Ceres Seq. ID no. 12737627
  misc_feature (357)..(962): Homolog of NCBI NO: 28411807 NR Description: cellulose synthase-4 [Oryza sativa (japonica
  misc_feature (71)..(330): Homolog of NCBI NO: 28411807 NR Description: cellulose synthase-4 [Oryza sativa (japonica
  misc_feature (377)..(962): Homolog of NCBI NO: 9622880 NR Description: cellulose synthase-4 [Zea mays]
  misc_feature (71)..(330): Homolog of NCBI NO: 9622880 NR Description: cellulose synthase-4 [Zea mays]
  misc_feature (641)..(962): Homolog of NCBI NO: 23534479 NR Description: cellulose synthase [Populus tremuloides]
  misc_feature (377)..(620): Homolog of NCBI NO: 23534479 NR Description: cellulose synthase [Populus tremuloides]
  misc_feature (84)..(326): Homolog of NCBI NO: 23534479 NR Description: cellulose synthase [Populus tremuloides]
  misc_feature (377)..(962): Homolog of NCBI NO: 30103013 NR Description: putative cellulose synthase catalytic subunit
  misc_feature (71)..(330): Homolog of NCBI NO: 30103013 NR Description: putative cellulose synthase catalytic subunit
  misc_feature (363)..(962): Homolog of NCBI NO: 15238454 NR Description: cellulose synthase catalytic subunit protein id: At5g05170.1, supported by cDNA: gi_2827142 thaliana] >gi|9759258|dbj|BAB09693.1| cellulose synthase
MPPTPDNQPAGSSGSTSESKGDANRGGGGGDGPKMGNKLERRLSVMKSNNKSMLLRSQTGDFDHNRWLFESKGKYGIGNAFWSEEDDTYDGGVSKSDFLDKPWKPLTRKVQIPAKILSPYRLLIVIRLVIVFFFLWWRITNPNEDAMWLWGLSIVCEIWFAFSWILDILPKLNPINRATDLAALHDKFEQPSPSNPTGRSDLPGVDVFVSTADPEKEPPLVTANTLLSILAVDYPIEKLSAYISDDGGAILTFEAMAEAVRFAEYWVPFCRKHDIEPRNPDSYFSIKKDPTKNKKRQDFVKDRRWIKREYDEFKVRINGLPEQIKKRAEQFNMREELKEKRIAREKNGGVLPPDGVEVVKATWMADGTHWPGTWFEPKPDHSKGDHAGILQIMSKVPDLEPVMGGPNEGALDFTGIDIRVPMFAYVSREKRPGFDHNKKAGAMNGMVRASAILSNGAFILNLDCDHYIYNSKAIKEGMCFMMDRGGDRICYIQFPQRFEGIDPSDRYANHNTVFFDGNMRALDGLQGPVYVGTGCMFRRYALYGFNPPRANEYSGVFGQEKAPAMHVRTQSQASQTSQASDLESDTQPLNDDPDLGLPKKFGNSTMFTDTIPVAEYQGRPLADHMSVKNGRPPGALLLPRPPLDAPTVAEAIAVISCWYEDNTEWGDRIGWIYGSVTEDVVTGYRMHNRGWRSVYCITKRDAFRGTAPINLTDRLHQVLRWATGSVEIFFSKNNAMFATRRLKFLQRVAYLNVGIYPFTSIFLVVYCFLPALCLFSGKFIVQSLDIHFLSYLLCITVTLTLISLLEVKWSGIGLEEWWRNEQFWLIGGTSAHLAAVVQGLLKVIAGIEISFTLTSKASGEDEDDIFADLYIVKWTGLFIMPLTIIIVNLVAIVIGASRTIYSVIPQWGKLMGGIFFSLWVLTHMYPFAKGLMGRRGKVPTIVYVWSGLVSITVSLLWITISPPDDVSGSGGISV

SEQ ID NO: 97455 - DNA, 1981 bp, Arabidopsis thaliana
  misc_feature (1)..(1981): Ceres Seq. ID no. 12737634
  misc_feature: MA Experiment ID: 20000307 Result: Down-regulated in Transcription
  misc_feature: MA Experiment 20000307 PARAMETER Experiment Name: At_Germinating_Seeds_Sub_P Parameter: Age (hr) Value: 24 vs. 0
  misc_feature: MA Experiment 20000307 PARAMETER Experiment Name: At_Germinating_Seeds_Sub_P Parameter: Organism Value: A. thaliana
  misc_feature: MA Experiment 20000307 PARAMETER Experiment Name: At_Germinating_Seeds_Sub_P Parameter: Plant Line Value: WS
  misc_feature: MA Experiment 20000307 PARAMETER Experiment Name: At_Germinating_Seeds_Sub_P Parameter: Tissue Value: Germinating Seeds
  misc_feature: MA Experiment ID: 20000327 Result: Up-regulated in Transcription
  misc_feature: MA Experiment 20000327 PARAMETER Experiment Name: At_42deg_Heat_Sub_P Parameter: Age (day) Value: 14
  misc_feature: MA Experiment 20000327 PARAMETER Experiment Name: At_42deg_Heat_Sub_P Parameter: Organism Value: A. thaliana
  misc_feature: MA Experiment 20000327 PARAMETER Experiment Name: At_42deg_Heat_Sub_P Parameter: Plant Line Value: WS
  misc_feature: MA Experiment 20000327 PARAMETER Experiment Name: At_42deg_Heat_Sub_P Parameter: Temperature (deg C) Value: 42 vs. 22
  misc_feature: MA Experiment 20000327 PARAMETER Experiment Name: At_42deg_Heat_Sub_P Parameter: Timepoint (hr) Value: 1
  misc_feature: MA Experiment 20000327 PARAMETER Experiment Name: At_42deg_Heat_Sub_P Parameter: Tissue Value: Aerial
  misc_feature: MA Experiment ID: 20000328 Result: Up-regulated in Transcription
  misc_feature: MA Experiment 20000328 PARAMETER Experiment Name: At_42deg_Heat_Sub_P Parameter: Age (day) Value: 14
  misc_feature: MA Experiment 20000328 PARAMETER Experiment Name: At_42deg_Heat_Sub_P Parameter: Organism Value: A. thaliana
  misc_feature: MA Experiment 20000328 PARAMETER Experiment Name: At_42deg_Heat_Sub_P Parameter: Plant Line Value: WS
  misc_feature: MA Experiment 20000328 PARAMETER Experiment Name: At_42deg_Heat_Sub_P Parameter: Temperature (deg C) Value: 42 vs. 22
  misc_feature: MA Experiment 20000328 PARAMETER Experiment Name: At_42deg_Heat_Sub_P Parameter: Timepoint (hr) Value: 6
  misc_feature: MA Experiment 20000328 PARAMETER Experiment Name: At_42deg_Heat_Sub_P Parameter: Tissue Value: Aerial
  misc_feature: MA Experiment ID: 20001807 Result: Up-regulated in Transcription
  misc_feature: MA Experiment 20001807 PARAMETER Experiment Name: At_50mM_NH4NO3_L-to-H_Sub_P Parameter: Timepoint (hr) Value: 6
  misc_feature: MA Experiment 20001807 PARAMETER Experiment Name: At_50mM_NH4NO3_L-to-H_Sub_P Parameter: Tissue Value: Leaf
  misc_feature: MA Experiment 20001807 PARAMETER Experiment Name: At_50mM_NH4NO3_L-to-H_Sub_P Parameter: Treatment Value: 50mM NH4NO3 vs 100mM Mannitol
aattgcaatcttctcggttgtgtgagagaatcaatcaccatgtatcggcttgtctccaacgttgcttccaaagctaggattgccagaaagtgtacaagccagattggaagcaggctcaattctactaggaattatgcagcaaaagacataaggttcggtgttgaagctcgggctttaatgcttaggggtgttgaggatcttgctgatgcagttaaagtcactatgggacccaagggtcgtaatgtcatcatcgaacaaagctggggtgcaccaaaggtgacaaaggatggtgtgactgttgccaagagcattgagttcaaggatagaattaagaacgttggtgccagtcttgtgaaacaggttgctaacgccacaaatgacgtagctggtgatggaacaacgtgtgccacagtccttactagagctatcttcacggaaggttgtaaatcagttgccgctggaatgaatgcaatggacctaagacgtggtatcaaattggcagttgatactgttgtgacgaacttgcagagccgagcacgcatgattagcacctctgaagaaatcgcccaagttggaacaatatcagctaatggagatagggaaattggtgaactgattgcaaaggctatggaaactgtcggcaaagagggagtgatcacaattcaagatggcaagaccttgtttaatgagctggaagttgttgagggtatgaagattgacaggggatacatctccccgtacttcataactaacccgaaaacacaaaaatgtgaactagaagatcctctcattcttatccacgagaagaaaatttccaatataaacgcaatggtgaaagtattagaactggccctcaagaagcaaaggccgctgctgatcgttgctgaggatgtggagagcgatgctcttgccaccctaattctgaacaaacttcgtgctaatatcaaggtctgtgctgtgaaggcccctggttttggagagaaccgaaaggccaatttacatgatctagctgccctcactggagcccaggtaataacagaagagttgggtatgaatctagacaacattgacctcagtatgtttggaaactgcaagaaggtaacggtatccaaagatgatactgttgttctcgatggggctggtgacaagcaagcaattggggaacgatgtgaacagatacgatccatggttgaagcaagcacttctgattatgacaaggagaagttgcaagaaaggttggctaagctttcgggtggtgttgctgtactaaagattggaggagcaagtgagacagaagttagtgaaaagaaagatagagtaacggatgctctaaatgccactaaagcagccgtagaggagggtattgttccaggtggtggtgttgctcttttgtatgcttcgaaagaacttgagaagctttccacagctaactttgatcagaaaattggtgttcaaatcattcaaaacgcactcaagacacctgtttacacgattgcttccaatgctggagtcgagggtgcagttgtcgtaggcaagcttttggaacaagataatcctgaccttggttatgatgctgctaaaggagaatatgtggacatgataaaggctggtattatcgatcctttgaaagtgatcagaaccgcattagttgatgctgcaagtgtttcgtctttgttgacaacgacggaagcagttgtgactgagattccaacgaaagaggtagcatctccgggtatgggcggtggtggcatgggcggcatgggtggcatgggcggtatgggaggaatgggtttctgaggagaactataaaccctgagtagggttctttggaatctgttgtgagagatgctacggttggttcatccacaagacactaatgtattctttaatcatgattggtagagagagaccttcagattttccgtgattttcaattcacaaacgatttataaactattttgaagaagatccttttccgatt

SEQ ID NO: 97456 - protein, 598 aa, Arabidopsis thaliana
  peptide (1)..(598): Ceres Seq. ID no. 12737635
  misc_feature (75)..(570): Pfam Name: TCP-1/cpn60 chaperonin family Pfam Description: TCP-1/cpn60 chaperonin family
  misc_feature (75)..(598): Homolog of NCBI NO: 25300354 NR Description: mitochondrial chaperonin (HSP60) [imported] - thaliana >gi|2924773|gb|AAC04902.1| mitochondrial chaperonin
  misc_feature (14)..(598): Homolog of NCBI NO: 543992 NR Description: CHAPERONIN CPN60, MITOCHONDRIAL PRECURSOR
  misc_feature (14)..(590): Homolog of NCBI NO: 15229559 NR Description: mitochondrial chaperonin hsp60; protein id: supported by cDNA: gi_20466255 [Arabidopsis thaliana] Chaperonin CPN60, mitochondrial precursor (HSP60)
  misc_feature (14)..(587): Homolog of NCBI NO: 99676 NR Description: chaperonin hsp60 precursor - Arabidopsis thaliana
  misc_feature (14)..(587): Homolog of NCBI NO: 461736 NR Description: CHAPERONIN CPN60-2, MITOCHONDRIAL PRECURSOR
  misc_feature (14)..(587): Homolog of NCBI NO: 461735 NR Description: CHAPERONIN CPN60-1, MITOCHONDRIAL PRECURSOR
  misc_feature (14)..(587): Homolog of NCBI NO: 37535140 NR Description: mitochondrial chaperonin-60 [Oryza sativa
  misc_feature (14)..(587): Homolog of NCBI NO: 283035 NR Description: chaperonin hsp60 - maize >gi|22248|emb|CAA78100.1|
  misc_feature (14)..(587): Homolog of NCBI NO: 2506275 NR Description: CHAPERONIN CPN60-1, MITOCHONDRIAL PRECURSOR
  misc_feature (1)..(577): Homolog of NCBI NO: 22984788 NR Description: hypothetical protein [Burkholderia fungorum]
NCNLLGCVRESITMYRLVSNVASKARIARKCTSQIGSRLNSTRNYAAKDIRFGVEARALMLRGVEDLADAVKVTMGPKGRNVIIEQSWGAPKVTKDGVTVAKSIEFKDRIKNVGASLVKQVANATNDVAGDGTTCATVLTRAIFTEGCKSVAAGMNAMDLRRGIKLAVDTVVTNLQSRARMISTSEEIAQVGTISANGDREIGELIAKAMETVGKEGVITIQDGKTLFNELEVVEGMKIDRGYISPYFITNPKTQKCELEDPLILIHEKKISNINAMVKVLELALKKQRPLLIVAEDVESDALATLILNKLRANIKVCAVKAPGFGENRKANLHDLAALTGAQVITEELGMNLDNIDLSMFGNCKKVTVSKDDTVVLDGAGDKQAIGERCEQIRSMVEASTSDYDKEKLQERLAKLSGGVAVLKIGGASETEVSEKKDRVTDALNATKAAVEEGIVPGGGVALLYASKELEKLSTANFDQKIGVQIIQNALKTPVYTIASNAGVEGAVVVGKLLEQDNPDLGYDAAKGEYVDMIKAGIIDPLKVIRTALVDAASVSSLLTTTEAVVTEIPTKEVASPGMGGGGMGGMGGMGGMGGMGF

SEQ ID NO: 97457 - protein, 585 aa, Arabidopsis thaliana
  peptide (1)..(585): Ceres Seq. ID no. 12737636
  misc_feature (62)..(557): Pfam Name: TCP-1/cpn60 chaperonin family Pfam Description: TCP-1/cpn60 chaperonin family
  misc_feature (62)..(585): Homolog of NCBI NO: 25300354 NR Description: mitochondrial chaperonin (HSP60) [imported] - thaliana >gi|2924773|gb|AAC04902.1| mitochondrial chaperonin
  misc_feature (1)..(585): Homolog of NCBI NO: 543992 NR Description: CHAPERONIN CPN60, MITOCHONDRIAL PRECURSOR
  misc_feature (1)..(577): Homolog of NCBI NO: 15229559 NR Description: mitochondrial chaperonin hsp60; protein id: supported by cDNA: gi_20466255 [Arabidopsis thaliana] Chaperonin CPN60, mitochondrial precursor (HSP60)
  misc_feature (1)..(574): Homolog of NCBI NO: 99676 NR Description: chaperonin hsp60 precursor - Arabidopsis thaliana
  misc_feature (1)..(574): Homolog of NCBI NO: 461736 NR Description: CHAPERONIN CPN60-2, MITOCHONDRIAL PRECURSOR
  misc_feature (1)..(574): Homolog of NCBI NO: 461735 NR Description: CHAPERONIN CPN60-1, MITOCHONDRIAL PRECURSOR
  misc_feature (1)..(574): Homolog of NCBI NO: 37535140 NR Description: mitochondrial chaperonin-60 [Oryza sativa
  misc_feature (1)..(574): Homolog of NCBI NO: 283035 NR Description: chaperonin hsp60 - maize >gi|22248|emb|CAA78100.1|
  misc_feature (1)..(574): Homolog of NCBI NO: 2506275 NR Description: CHAPERONIN CPN60-1, MITOCHONDRIAL PRECURSOR
  misc_feature (1)..(564): Homolog of NCBI NO: 22984788 NR Description: hypothetical protein [Burkholderia fungorum]
MYRLVSNVASKARIARKCTSQIGSRLNSTRNYAAKDIRFGVEARALMLRGVEDLADAVKVTMGPKGRNVIIEQSWGAPKVTKDGVTVAKSIEFKDRIKNVGASLVKQVANATNDVAGDGTTCATVLTRAIFTEGCKSVAAGMNAMDLRRGIKLAVDTVVTNLQSRARMISTSEEIAQVGTISANGDREIGELIAKAMETVGKEGVITIQDGKTLFNELEVVEGMKIDRGYISPYFITNPKTQKCELEDPLILIHEKKISNINAMVKVLELALKKQRPLLIVAEDVESDALATLILNKLRANIKVCAVKAPGFGENRKANLHDLAALTGAQVITEELGMNLDNIDLSMFGNCKKVTVSKDDTVVLDGAGDKQAIGERCEQIRSMVEASTSDYDKEKLQERLAKLSGGVAVLKIGGASETEVSEKKDRVTDALNATKAAVEEGIVPGGGVALLYASKELEKLSTANFDQKIGVQIIQNALKTPVYTIASNAGVEGAVVVGKLLEQDNPDLGYDAAKGEYVDMIKAGIIDPLKVIRTALVDAASVSSLLTTTEAVVTEIPTKEVASPGMGGGGMGGMGGMGGMGGMGF

SEQ ID NO: 97458 - protein, 539 aa, Arabidopsis thaliana
  peptide (1)..(539): Ceres Seq. ID no. 12737637
  misc_feature (16)..(511): Pfam Name: TCP-1/cpn60 chaperonin family Pfam Description: TCP-1/cpn60 chaperonin family
  misc_feature (16)..(539): Homolog of NCBI NO: 25300354 NR Description: mitochondrial chaperonin (HSP60) [imported] - thaliana >gi|2924773|gb|AAC04902.1| mitochondrial chaperonin
  misc_feature (1)..(539): Homolog of NCBI NO: 543992 NR Description: CHAPERONIN CPN60, MITOCHONDRIAL PRECURSOR
  misc_feature (1)..(531): Homolog of NCBI NO: 15229559 NR Description: mitochondrial chaperonin hsp60; protein id: supported by cDNA: gi_20466255 [Arabidopsis thaliana] Chaperonin CPN60, mitochondrial precursor (HSP60)
  misc_feature (1)..(528): Homolog of NCBI NO: 99676 NR Description: chaperonin hsp60 precursor - Arabidopsis thaliana
  misc_feature (1)..(528): Homolog of NCBI NO: 461736 NR Description: CHAPERONIN CPN60-2, MITOCHONDRIAL PRECURSOR
  misc_feature (1)..(528): Homolog of NCBI NO: 461735 NR Description: CHAPERONIN CPN60-1, MITOCHONDRIAL PRECURSOR
  misc_feature (1)..(528): Homolog of NCBI NO: 37535140 NR Description: mitochondrial chaperonin-60 [Oryza sativa
  misc_feature (1)..(528): Homolog of NCBI NO: 283035 NR Description: chaperonin hsp60 - maize >gi|22248|emb|CAA78100.1|
  misc_feature (1)..(528): Homolog of NCBI NO: 2506275 NR Description: CHAPERONIN CPN60-1, MITOCHONDRIAL PRECURSOR
  misc_feature (1)..(518): Homolog of NCBI NO: 22984788 NR Description: hypothetical protein [Burkholderia fungorum]
MLRGVEDLADAVKVTMGPKGRNVIIEQSWGAPKVTKDGVTVAKSIEFKDRIKNVGASLVKQVANATNDVAGDGTTCATVLTRAIFTEGCKSVAAGMNAMDLRRGIKLAVDTVVTNLQSRARMISTSEEIAQVGTISANGDREIGELIAKAMETVGKEGVITIQDGKTLFNELEVVEGMKIDRGYISPYFITNPKTQKCELEDPLILIHEKKISNINAMVKVLELALKKQRPLLIVAEDVESDALATLILNKLRANIKVCAVKAPGFGENRKANLHDLAALTGAQVITEELGMNLDNIDLSMFGNCKKVTVSKDDTVVLDGAGDKQAIGERCEQIRSMVEASTSDYDKEKLQERLAKLSGGVAVLKIGGASETEVSEKKDRVTDALNATKAAVEEGIVPGGGVALLYASKELEKLSTANFDQKIGVQIIQNALKTPVYTIASNAGVEGAVVVGKLLEQDNPDLGYDAAKGEYVDMIKAGIIDPLKVIRTALVDAASVSSLLTTTEAVVTEIPTKEVASPGMGGGGMGGMGGMGGMGGMGF

SEQ ID NO: 97459 - DNA, 1308 bp, Arabidopsis thaliana
  misc_feature (1)..(1308): Ceres Seq. ID no. 12737645
  misc_feature: MA Experiment ID: 20000182 Result: Up-regulated in Transcription
  misc_feature: MA Experiment 20000182 PARAMETER Experiment Name: At_2mM_SA_P Parameter: Age (day) Value: 14
  misc_feature: MA Experiment 20000182 PARAMETER Experiment Name: At_2mM_SA_P Parameter: Organism Value: A. thaliana
  misc_feature: MA Experiment 20000182 PARAMETER Experiment Name: At_2mM_SA_P Parameter: Plant Line Value: WS
  misc_feature: MA Experiment 20000182 PARAMETER Experiment Name: At_2mM_SA_P Parameter: Timepoint (hr) Value: 6
  misc_feature: MA Experiment 20000182 PARAMETER Experiment Name: At_2mM_SA_P Parameter: Tissue Value: Aerial
  misc_feature: MA Experiment 20000182 PARAMETER Experiment Name: At_2mM_SA_P Parameter: Treatment Value: 2mM SA vs. No Treatment
  misc_feature: MA Experiment ID: 20000211 Result: Up-regulated in Transcription
  misc_feature: MA Experiment 20000211 PARAMETER Experiment Name: At_0.001percent_MeJA__P Parameter: Age (day) Value: 14
  misc_feature: MA Experiment 20000211 PARAMETER Experiment Name: At_0.001percent_MeJA__P Parameter: Organism Value: A. thaliana
  misc_feature: MA Experiment 20000211 PARAMETER Experiment Name: At_0.001percent_MeJA__P Parameter: Plant Line Value: WS
  misc_feature: MA Experiment 20000211 PARAMETER Experiment Name: At_0.001percent_MeJA__P Parameter: Timepoint (hr) Value: 1
  misc_feature: MA Experiment 20000211 PARAMETER Experiment Name: At_0.001percent_MeJA__P Parameter: Tissue Value: Aerial
  misc_feature: MA Experiment 20000211 PARAMETER Experiment Name: At_0.001percent_MeJA__P Parameter: Treatment Value: 0.001percent MeJA vs. No Treatment
  misc_feature: MA Experiment ID: 20000438 Result: Down-regulated in Transcription
  misc_feature: MA Experiment 20000438 PARAMETER Experiment Name: At_Shoots__P Parameter: Age (day) Value: 14
  misc_feature: MA Experiment 20000438 PARAMETER Experiment Name: At_Shoots__P Parameter: Tissue Value: Shoots vs. Whole Plant
  misc_feature: MA Experiment ID: 20000496 Result: Down-regulated in Transcription
  misc_feature: MA Experiment 20000496 PARAMETER Experiment Name: At_Guard_Cells_P Parameter: Harvest Date Value: 7/19/2002
  misc_feature: MA Experiment 20000496 PARAMETER Experiment Name: At_Guard_Cells_P Parameter: Organism Value: Canola
  misc_feature: MA Experiment 20000496 PARAMETER Experiment Name: At_Guard_Cells_P Parameter: Tissue Value: Guard Cells vs. Leaves
  misc_feature: MA Experiment ID: 20000527 Result: Down-regulated in Transcription
  misc_feature: MA Experiment 20000527 PARAMETER Experiment Name: At_10percent_PEG_P Parameter: Age (day) Value: 20
  misc_feature: MA Experiment 20000527 PARAMETER Experiment Name: At_10percent_PEG_P Parameter: Organism Value: A. thaliana
  misc_feature: MA Experiment 20000527 PARAMETER Experiment Name: At_10percent_PEG_P Parameter: Plant Line Value: WS
  misc_feature: MA Experiment 20000527 PARAMETER Experiment Name: At_10percent_PEG_P Parameter: Timepoint (day) Value: 20
  misc_feature: MA Experiment 20000527 PARAMETER Experiment Name: At_10percent_PEG_P Parameter: Tissue Value: Whole Plant
  misc_feature: MA Experiment 20000527 PARAMETER Experiment Name: At_10percent_PEG_P Parameter: Treatment Value: 10percent PEG vs. No Treatment
  misc_feature: MA Experiment ID: 20000573 Result: Up-regulated in Transcription
  misc_feature: MA Experiment 20000573 PARAMETER Experiment Name: At_100uM_ABA_Mutants__P Parameter: Organism Value: A. thaliana
  misc_feature: MA Experiment 20000573 PARAMETER Experiment Name: At_100uM_ABA_Mutants__P Parameter: Plant Line Value: CS22 vs. Ler wt
  misc_feature: MA Experiment 20000573 PARAMETER Experiment Name: At_100uM_ABA_Mutants__P Parameter: Timepoint (hr) Value: N/A
  misc_feature: MA Experiment 20000573 PARAMETER Experiment Name: At_100uM_ABA_Mutants__P Parameter: Tissue Value: Whole Plant
  misc_feature: MA Experiment 20000573 PARAMETER Experiment Name: At_100uM_ABA_Mutants__P Parameter: Treatment Value: None
  misc_feature: MA Experiment ID: 20000709 Result: Up-regulated in Transcription
  misc_feature: MA Experiment 20000709 PARAMETER Experiment Name: At_15mM_NH4NO3_L-to-H_P Parameter: Age (hr) Value: 14
  misc_feature: MA Experiment 20000709 PARAMETER Experiment Name: At_15mM_NH4NO3_L-to-H_P Parameter: Organism Value: A. thaliana
  misc_feature: MA Experiment 20000709 PARAMETER Experiment Name: At_15mM_NH4NO3_L-to-H_P Parameter: Plant Line Value: WS
  misc_feature: MA Experiment 20000709 PARAMETER Experiment Name: At_15mM_NH4NO3_L-to-H_P Parameter: Timepoint (hr) Value: 4
  misc_feature: MA Experiment 20000709 PARAMETER Experiment Name: At_15mM_NH4NO3_L-to-H_P Parameter: Tissue Value: Aerial
  misc_feature: MA Experiment 20000709 PARAMETER Experiment Name: At_15mM_NH4NO3_L-to-H_P Parameter: Treatment Value: 15mM NH4NO3 vs. 30mM Mannitol
atgagtttctgcaaattggtttcttttgttttgatccttcacttactaaactcgtgtctgatttcatgttcctcgaatgatttgtctcaaattcctaaaaatttccttagtctagctaaaagagaagattttttcgattggatggttggaataagaaggaggatccacgagaacccagagttaggttacgaggaagtagagacatctaagctagtcaagacagaattggacaagatgggtgtgtcttataagaatccagttgctgtaactggtgttattggatatgttggaactggccatgccccctttgttgctttgagggctgatatggatgcacttcctattcaggaaatggtggaatgggaacacaagagtaagattccagggaagatgcacgcttgcggacatgacgctcacactacgatgctcctcggtgctgcaaagttgctcaaagaacaccaagaagagctacagggtacagtgattctggttttccaaccagctgaggaaggaggagcaggtgcaaagaaaatcgtggaggctggagtattggagaatgtgggtgcaatctttggattacatgtttcgaatctattgggattaggtcaactgagctcaagagagggtctattgatggctggtagtggacgtttcaaagctacgataagcgggaaaggaggtcatgcagctcttcctcaattcgccatagatccagtattggcagcttcaaatgttattctgagcttacaacacctcgtttcacgagaggcagatcctttagactcgcaggtggttacagttgctacatttgaaggcagtgatgcttttaatgtcattcccgactctgttactatcggtggcacattccgagcccttttacctaaaagttttgagcaactcaagcaaagaattgttcaggttatcacaacgcaagcaagcgtaaatatgtgtaatgcaacagttgactttcttgaagatgagactcctcctttcccgccgactgtgaacaataaaaccttgcacctgttttacaagaacgtttcagtggatatgttagggattgagaattatgttgagacgctaccagtgatggtatcagaggattttgctttctaccaacaagcaatcccgggacattttagctttgttgggatgcagaacaaatctcattcaccaatggcgaaccctcactctccgttttttgaagttaatgaagaattactcccttatggtgcttcccttcttgcttctttggccacaagatatcttcttgactcatcttcatcgccaaataaagatgaactttga

SEQ ID NO: 97460 - protein, 435 aa, Arabidopsis thaliana
  peptide (1)..(435): Ceres Seq. ID no. 12737646
  misc_feature (45)..(424): Pfam Name: Peptidase family M20/M25/M40 Pfam Description: Peptidase family M20/M25/M40
  misc_feature (1)..(435): Homolog of NCBI NO: 15218029 NR Description: auxin conjugate hydrolase (ILL5); protein id: [Arabidopsis thaliana] >gi|25319490|pir||H96556 auxin conjugate
  misc_feature (1)..(432): Homolog of NCBI NO: 15218027 NR Description: IAA-Ala hydrolase (IAR3); protein id:
  misc_feature (1)..(432): Homolog of NCBI NO: 2181184 NR Description: JR3 protein [Arabidopsis thaliana]
  misc_feature (15)..(425): Homolog of NCBI NO: 27948556 NR Description: IAA-amino acid hydrolase [Oryza sativa (indica
  misc_feature (15)..(425): Homolog of NCBI NO: 34914096 NR Description: putative IAA-Ala hydrolase [Oryza sativa
  misc_feature (1)..(428): Homolog of NCBI NO: 902791 NR Description: ILL2
  misc_feature (1)..(428): Homolog of NCBI NO: 15241894 NR Description: IAA-amino acid hydrolase (gb|AAC04866.1); protein At5g56660.1, supported by cDNA: gi_18175666, supported by cDNA:
  misc_feature (1)..(428): Homolog of NCBI NO: 18175667 NR Description: IAA-amino acid hydrolase [Arabidopsis thaliana]
  misc_feature (1)..(428): Homolog of NCBI NO: 15241892 NR Description: IAA-amino acid hydrolase homolog 1 precursor protein id: At5g56650.1, supported by cDNA: gi_902788
  misc_feature (36)..(423): Homolog of NCBI NO: 34910396 NR Description: putative IAA-Ala hydrolase [Oryza sativa
MSFCKLVSFVLILHLLNSCLISCSSNDLSQIPKNFLSLAKREDFFDWMVGIRRRIHENPELGYEEVETSKLVKTELDKMGVSYKNPVAVTGVIGYVGTGHAPFVALRADMDALPIQEMVEWEHKSKIPGKMHACGHDAHTTMLLGAAKLLKEHQEELQGTVILVFQPAEEGGAGAKKIVEAGVLENVGAIFGLHVSNLLGLGQLSSREGLLMAGSGRFKATISGKGGHAALPQFAIDPVLAASNVILSLQHLVSREADPLDSQVVTVATFEGSDAFNVIPDSVTIGGTFRALLPKSFEQLKQRIVQVITTQASVNMCNATVDFLEDETPPFPPTVNNKTLHLFYKNVSVDMLGIENYVETLPVMVSEDFAFYQQAIPGHFSFVGMQNKSHSPMANPHSPFFEVNEELLPYGASLLASLATRYLLDSSSSPNKDEL

SEQ ID NO: 97461 - protein, 388 aa, Arabidopsis thaliana
  peptide (1)..(388): Ceres Seq. ID no. 12737647
  misc_feature (1)..(377): Pfam Name: Peptidase family M20/M25/M40 Pfam Description: Peptidase family M20/M25/M40
  misc_feature (1)..(388): Homolog of NCBI NO: 15218029 NR Description: auxin conjugate hydrolase (ILL5); protein id: [Arabidopsis thaliana] >gi|25319490|pir||H96556 auxin conjugate
  misc_feature (1)..(385): Homolog of NCBI NO: 15218027 NR Description: IAA-Ala hydrolase (IAR3); protein id:
  misc_feature (1)..(385): Homolog of NCBI NO: 2181184 NR Description: JR3 protein [Arabidopsis thaliana]
  misc_feature (1)..(378): Homolog of NCBI NO: 27948556 NR Description: IAA-amino acid hydrolase [Oryza sativa (indica
  misc_feature (1)..(378): Homolog of NCBI NO: 34914096 NR Description: putative IAA-Ala hydrolase [Oryza sativa
  misc_feature (1)..(381): Homolog of NCBI NO: 902791 NR Description: ILL2
  misc_feature (1)..(381): Homolog of NCBI NO: 15241894 NR Description: IAA-amino acid hydrolase (gb|AAC04866.1); protein At5g56660.1, supported by cDNA: gi_18175666, supported by cDNA:
  misc_feature (1)..(381): Homolog of NCBI NO: 18175667 NR Description: IAA-amino acid hydrolase [Arabidopsis thaliana]
  misc_feature (1)..(381): Homolog of NCBI NO: 15241892 NR Description: IAA-amino acid hydrolase homolog 1 precursor protein id: At5g56650.1, supported by cDNA: gi_902788
  misc_feature (1)..(376): Homolog of NCBI NO: 34910396 NR Description: putative IAA-Ala hydrolase [Oryza sativa
MVGIRRRIHENPELGYEEVETSKLVKTELDKMGVSYKNPVAVTGVIGYVGTGHAPFVALRADMDALPIQEMVEWEHKSKIPGKMHACGHDAHTTMLLGAAKLLKEHQEELQGTVILVFQPAEEGGAGAKKIVEAGVLENVGAIFGLHVSNLLGLGQLSSREGLLMAGSGRFKATISGKGGHAALPQFAIDPVLAASNVILSLQHLVSREADPLDSQVVTVATFEGSDAFNVIPDSVTIGGTFRALLPKSFEQLKQRIVQVITTQASVNMCNATVDFLEDETPPFPPTVNNKTLHLFYKNVSVDMLGIENYVETLPVMVSEDFAFYQQAIPGHFSFVGMQNKSHSPMANPHSPFFEVNEELLPYGASLLASLATRYLLDSSSSPNKDEL

SEQ ID NO: 97462 - protein, 357 aa, Arabidopsis thaliana
  peptide (1)..(357): Ceres Seq. ID no. 12737648
  misc_feature (1)..(346): Pfam Name: Peptidase family M20/M25/M40 Pfam Description: Peptidase family M20/M25/M40
  misc_feature (1)..(357): Homolog of NCBI NO: 15218029 NR Description: auxin conjugate hydrolase (ILL5); protein id: [Arabidopsis thaliana] >gi|25319490|pir||H96556 auxin conjugate
  misc_feature (1)..(354): Homolog of NCBI NO: 15218027 NR Description: IAA-Ala hydrolase (IAR3); protein id:
  misc_feature (1)..(354): Homolog of NCBI NO: 2181184 NR Description: JR3 protein [Arabidopsis thaliana]
  misc_feature (1)..(347): Homolog of NCBI NO: 27948556 NR Description: IAA-amino acid hydrolase [Oryza sativa (indica
  misc_feature (1)..(347): Homolog of NCBI NO: 34914096 NR Description: putative IAA-Ala hydrolase [Oryza sativa
  misc_feature (1)..(350): Homolog of NCBI NO: 902791 NR Description: ILL2
  misc_feature (1)..(350): Homolog of NCBI NO: 15241894 NR Description: IAA-amino acid hydrolase (gb|AAC04866.1); protein At5g56660.1, supported by cDNA: gi_18175666, supported by cDNA:
  misc_feature (1)..(350): Homolog of NCBI NO: 18175667 NR Description: IAA-amino acid hydrolase [Arabidopsis thaliana]
  misc_feature (1)..(350): Homolog of NCBI NO: 15241892 NR Description: IAA-amino acid hydrolase homolog 1 precursor protein id: At5g56650.1, supported by cDNA: gi_902788
  misc_feature (1)..(345): Homolog of NCBI NO: 34910396 NR Description: putative IAA-Ala hydrolase [Oryza sativa
MGVSYKNPVAVTGVIGYVGTGHAPFVALRADMDALPIQEMVEWEHKSKIPGKMHACGHDAHTTMLLGAAKLLKEHQEELQGTVILVFQPAEEGGAGAKKIVEAGVLENVGAIFGLHVSNLLGLGQLSSREGLLMAGSGRFKATISGKGGHAALPQFAIDPVLAASNVILSLQHLVSREADPLDSQVVTVATFEGSDAFNVIPDSVTIGGTFRALLPKSFEQLKQRIVQVITTQASVNMCNATVDFLEDETPPFPPTVNNKTLHLFYKNVSVDMLGIENYVETLPVMVSEDFAFYQQAIPGHFSFVGMQNKSHSPMANPHSPFFEVNEELLPYGASLLASLATRYLLDSSSSPNKDEL

SEQ ID NO: 97463 - DNA, 2888 bp, Arabidopsis thaliana
  misc_feature (1)..(2888): Ceres Seq. ID no. 12737649
  misc_feature: MA Experiment ID: 20000306 Result: Down-regulated in Transcription
  misc_feature: MA Experiment 20000306 PARAMETER Experiment Name: At_Germinating_Seeds_Sub_P Parameter: Age (hr) Value: 6 vs. 0
  misc_feature: MA Experiment 20000306 PARAMETER Experiment Name: At_Germinating_Seeds_Sub_P Parameter: Organism Value: A. thaliana
  misc_feature: MA Experiment 20000306 PARAMETER Experiment Name: At_Germinating_Seeds_Sub_P Parameter: Plant Line Value: WS
  misc_feature: MA Experiment 20000306 PARAMETER Experiment Name: At_Germinating_Seeds_Sub_P Parameter: Tissue Value: Germinating Seeds
  misc_feature: MA Experiment ID: 20000307 Result: Up-regulated in Transcription
  misc_feature: MA Experiment 20000307 PARAMETER Experiment Name: At_Germinating_Seeds_Sub_P Parameter: Age (hr) Value: 24 vs. 0
  misc_feature: MA Experiment 20000307 PARAMETER Experiment Name: At_Germinating_Seeds_Sub_P Parameter: Organism Value: A. thaliana
  misc_feature: MA Experiment 20000307 PARAMETER Experiment Name: At_Germinating_Seeds_Sub_P Parameter: Plant Line Value: WS
  misc_feature: MA Experiment 20000307 PARAMETER Experiment Name: At_Germinating_Seeds_Sub_P Parameter: Tissue Value: Germinating Seeds
  misc_feature: MA Experiment ID: 20000314 Result: Down-regulated in Transcription
  misc_feature: MA Experiment 20000314 PARAMETER Experiment Name: At_14day_Shoots-Roots_Sub_P Parameter: Age (day) Value: 14
  misc_feature: MA Experiment 20000314 PARAMETER Experiment Name: At_14day_Shoots-Roots_Sub_P Parameter: Organism Value: A. thaliana
  misc_feature: MA Experiment 20000314 PARAMETER Experiment Name: At_14day_Shoots-Roots_Sub_P Parameter: Plant Line Value: WS
  misc_feature: MA Experiment 20000314 PARAMETER Experiment Name: At_14day_Shoots-Roots_Sub_P Parameter: Tissue Value: Roots vs. Whole Plant
  misc_feature: MA Experiment ID: 20000315 Result: Down-regulated in Transcription
  misc_feature: MA Experiment 20000315 PARAMETER Experiment Name: At_14day_Shoots-Roots_Sub_P Parameter: Age (day) Value: 14
  misc_feature: MA Experiment 20000315 PARAMETER Experiment Name: At_14day_Shoots-Roots_Sub_P Parameter: Organism Value: A. thaliana
  misc_feature: MA Experiment 20000315 PARAMETER Experiment Name: At_14day_Shoots-Roots_Sub_P Parameter: Plant Line Value: WS
  misc_feature: MA Experiment 20000315 PARAMETER Experiment Name: At_14day_Shoots-Roots_Sub_P Parameter: Tissue Value: Shoots vs. Whole Plant
  misc_feature: MA Experiment ID: 20000327 Result: Down-regulated in Transcription
  misc_feature: MA Experiment 20000327 PARAMETER Experiment Name: At_42deg_Heat_Sub_P Parameter: Age (day) Value: 14
  misc_feature: MA Experiment 20000327 PARAMETER Experiment Name: At_42deg_Heat_Sub_P Parameter: Organism Value: A. thaliana
  misc_feature: MA Experiment 20000327 PARAMETER Experiment Name: At_42deg_Heat_Sub_P Parameter: Plant Line Value: WS
  misc_feature: MA Experiment 20000327 PARAMETER Experiment Name: At_42deg_Heat_Sub_P Parameter: Temperature (deg C) Value: 42 vs. 22
  misc_feature: MA Experiment 20000327 PARAMETER Experiment Name: At_42deg_Heat_Sub_P Parameter: Timepoint (hr) Value: 1
  misc_feature: MA Experiment 20000327 PARAMETER Experiment Name: At_42deg_Heat_Sub_P Parameter: Tissue Value: Aerial
  misc_feature: MA Experiment ID: 20000328 Result: Down-regulated in Transcription
  misc_feature: MA Experiment 20000328 PARAMETER Experiment Name: At_42deg_Heat_Sub_P Parameter: Age (day) Value: 14
  misc_feature: MA Experiment 20000328 PARAMETER Experiment Name: At_42deg_Heat_Sub_P Parameter: Organism Value: A. thaliana
  misc_feature: MA Experiment 20000328 PARAMETER Experiment Name: At_42deg_Heat_Sub_P Parameter: Plant Line Value: WS
  misc_feature: MA Experiment 20000328 PARAMETER Experiment Name: At_42deg_Heat_Sub_P Parameter: Temperature (deg C) Value: 42 vs. 22
  misc_feature: MA Experiment 20000328 PARAMETER Experiment Name: At_42deg_Heat_Sub_P Parameter: Timepoint (hr) Value: 6
  misc_feature: MA Experiment 20000328 PARAMETER Experiment Name: At_42deg_Heat_Sub_P Parameter: Tissue Value: Aerial
  misc_feature: MA Experiment ID: 20000329 Result: Up-regulated in Transcription
  misc_feature: MA Experiment 20000329 PARAMETER Experiment Name: At_4deg_Cold_Sub_P Parameter: Age (day) Value: 14
  misc_feature: MA Experiment 20000329 PARAMETER Experiment Name: At_4deg_Cold_Sub_P Parameter: Organism Value: A. thaliana
  misc_feature: MA Experiment 20000329 PARAMETER Experiment Name: At_4deg_Cold_Sub_P Parameter: Plant Line Value: WS
  misc_feature: MA Experiment 20000329 PARAMETER Experiment Name: At_4deg_Cold_Sub_P Parameter: Temperature (deg C) Value: 4 vs. 22
  misc_feature: MA Experiment 20000329 PARAMETER Experiment Name: At_4deg_Cold_Sub_P Parameter: Timepoint (hr) Value: 6
  misc_feature: MA Experiment 20000329 PARAMETER Experiment Name: At_4deg_Cold_Sub_P Parameter: Tissue Value: Aerial
  misc_feature: MA Experiment ID: 20000355 Result: Down-regulated in Transcription
  misc_feature: MA Experiment 20000355 PARAMETER Experiment Name: At_Siliques_Sub_P Parameter: Age (day) Value: 21
  misc_feature: MA Experiment 20000355 PARAMETER Experiment Name: At_Siliques_Sub_P Parameter: Organism Value: A. thaliana
  misc_feature: MA Experiment 20000355 PARAMETER Experiment Name: At_Siliques_Sub_P Parameter: Plant Line Value: WS
  misc_feature: MA Experiment 20000355 PARAMETER Experiment Name: At_Siliques_Sub_P Parameter: Tissue Value: Less Than 5mm Siliques vs. Whole Plant
  misc_feature: MA Experiment ID: 20000440 Result: Down-regulated in Transcription
  misc_feature: MA Experiment 20000440 PARAMETER Experiment Name: At_Closed-Flower__Sub_P Parameter: Tissue Value: Closed Flower vs. Whole Plant
aaaaaaaaaaacagatcccttctttgcatagtaaggaagatattaatggagagtcatcgtgtgttcgttgccacttttatgctgatacttcatcttgttcaagctcaagatcaacccggattcatcaatgtggattgcggtttactccctcgtgattctccttacaacgcactcggaaccggtttagtatatacatcagatgtcggtttagttagcagtgggaaaactggtaaaatcgccaaggaattcgaagagaacaacagtacaccgaatttgacattgagatactttccagacggagcacgaaactgctacaacttaaacgtgagccgtgacaccaactatatgatcaaggctacattcgtgtatggaaattacgatggtcataaagatgagccgaacttcgacctttacttgggtccaaatttatgggcaacggtaagccgcagtgaaactgttgaggagatcatccatgtgacgaaatccgattcgttacaggtttgtcttgctaagacgggagattttataccttttattaatatcttggagctacgaccattgaagaaaaatgtgtacgttacagaaagtggctcactcaagctcttatttaggaagtattttagtgactcaggtcaaacgataaggtatccagatgatatctatgaccgtgtatggcatgcatccttcctggaaaataattgggcacaagtatcgacgactttgggtgtaaacgttactgataattatgatttatcacaagatgtaatggcaacgggcgcaacacctctaaacgatagtgagacattgaacattacatggaacgtagagcctcctactacaaaggtttactcctacatgcactttgcagagcttgagacactaagggccaacgatacaagggaattcaatgtgatgctgaatggaaatgacttgtttggaccttacagtccaataccgctaaagaccgaaacagaaaccaacttaaaaccagaggaatgcgaagatggggcatgtattttgcagcttgtgaagacgtcaaaatcaactcttccgcctttacttaatgctatagaggctttcaccgtgattgatttcctacaagtggagacagatgaagatgacgctgctgctatcaagaatgttcaaaatgcttatggattgattaatagaagcagttggcaaggagatccatgtgtccccaaacagtattcgtgggacggtctaaagtgcagttactcagatagtactccaccaataattaatttcttagacttatctgcaagtggactaaccgggatcatcgcgcctgccattcaaaatcttactcacctagaaatattggccttgtcaaataacaatttgaccggagaagtacctgaatttctagctgacttaaaatcaatcatggtcatagacttaagaggcaataacctcagtggcccggttcctgcctcacttcttcagaagaaaggattgatgctacatcttgatgacaatccccatattctttgcacaactggttcatgtatgcacaaaggagaaggcgaaaaaaagagtatcattgtaccagtggttgcatcaattgtttcattggctgttattataggtgcactcattctgttccttgttttccgaaagaaaaaggcatcaaaagttgaagggacactaccatcttacatgcaagcatcagatggtagatcgccgagatcctctgaaccagcaatagtgacgaaaaacaaaaggtttacttactcacaagttgtgataatgacaaataacttccaaagaatccttgggaaaggagggtttggaatcgtttatcatggctttgtgaacggtgttgaacaagtagctgttaagatactctctcattcatcatctcaagggtataaacaattcaaagctgaggtagaacttcttcttagagttcatcacaagaatttggttggtcttgttgggtattgcgacgaaggagagaacatggctcttatctatgaatacatggccaatggagatttaaaagaacatatgtcaggaacaagaaaccgatttattttaaattgggaaactagactaaaaatagtcattgactctgcgcaagggcttgagtatttgcataatggatgcaaaccactaatggtacacagggacgtcaaaactacaaatatattgttaaatgaacactttgaagccaaacttgctgattttgggctttcaaggtcttttccgattggaggtgaaactcatgtgtcaacagttgttgctggaactcctggatatctcgatcctgaatattacaaaacaaatcggttgacagagaagagtgatgtatatagttttgggattgtattgttggagatgatcacaaatcggccagtgatagaccaaagccgtgaaaagccatatatttcagaatgggtggggataatgcttacgaaaggagacatcattagcattatggatccaagtctaaatggagactatgattctggttctgtgtggaaagctgttgaactagcaatgtcttgtctgaatccttcttcaacaagaagacctaccatgtctcaagttcttattgcattaaacgaatgtttggtatctgaaaattcaaggggaggagcgagtagggacatggactcaaagagttccctagaggtaagcttgacatttgatactgatgtgagcccaatggctaggtagattacatgaaatattatcatgcggtatcacataaatttgtttatatgtttttatttacagaactatcctcaaattagtatctctcttataggccacctttgttaatgaactctgaactttttgtcattgatacatgtgtgaataacagtccaaagtctattattgttccgccgtaatgtatcagtttc

SEQ ID NO: 97464 - protein, 899 aa, Arabidopsis thaliana
  peptide (1)..(899): Ceres Seq. ID no. 12737650
  misc_feature (21)..(899): Homolog of NCBI NO: 9294681 NR Description: receptor-like protein kinase [Arabidopsis
  misc_feature (21)..(899): Homolog of NCBI NO: 15232537 NR Description: serine/threonine-specific protein kinase,
  misc_feature (16)..(899): Homolog of NCBI NO: 25387119 NR Description: probable protein kinase [imported] - Arabidopsis >gi|9802783|gb|AAF99852.1|AC015448_2 Putative protein kinase
  misc_feature (16)..(553): Homolog of NCBI NO: 25387103 NR Description: probable receptor protein kinase [imported] - thaliana >gi|12321669|gb|AAG50871.1|AC025294_9 receptor protein
  misc_feature (21)..(899): Homolog of NCBI NO: 39104601 NR Description: unknown protein [Arabidopsis thaliana]
  misc_feature (307)..(636): Homolog of NCBI NO: 15238490 NR Description: leucine-rich repeat transmembrane protein kinase,
  misc_feature (662)..(899): Homolog of NCBI NO: 15238490 NR Description: leucine-rich repeat transmembrane protein kinase,
  misc_feature (192)..(284): Homolog of NCBI NO: 15238490 NR Description: leucine-rich repeat transmembrane protein kinase,
  misc_feature (26)..(90): Homolog of NCBI NO: 15238490 NR Description: leucine-rich repeat transmembrane protein kinase,
  misc_feature (121)..(198): Homolog of NCBI NO: 15238490 NR Description: leucine-rich repeat transmembrane protein kinase,
KKKNRSLLCIVRKILMESHRVFVATFMLILHLVQAQDQPGFINVDCGLLPRDSPYNALGTGLVYTSDVGLVSSGKTGKIAKEFEENNSTPNLTLRYFPDGARNCYNLNVSRDTNYMIKATFVYGNYDGHKDEPNFDLYLGPNLWATVSRSETVEEIIHVTKSDSLQVCLAKTGDFIPFINILELRPLKKNVYVTESGSLKLLFRKYFSDSGQTIRYPDDIYDRVWHASFLENNWAQVSTTLGVNVTDNYDLSQDVMATGATPLNDSETLNITWNVEPPTTKVYSYMHFAELETLRANDTREFNVMLNGNDLFGPYSPIPLKTETETNLKPEECEDGACILQLVKTSKSTLPPLLNAIEAFTVIDFLQVETDEDDAAAIKNVQNAYGLINRSSWQGDPCVPKQYSWDGLKCSYSDSTPPIINFLDLSASGLTGIIAPAIQNLTHLEILALSNNNLTGEVPEFLADLKSIMVIDLRGNNLSGPVPASLLQKKGLMLHLDDNPHILCTTGSCMHKGEGEKKSIIVPVVASIVSLAVIIGALILFLVFRKKKASKVEGTLPSYMQASDGRSPRSSEPAIVTKNKRFTYSQVVIMTNNFQRILGKGGFGIVYHGFVNGVEQVAVKILSHSSSQGYKQFKAEVELLLRVHHKNLVGLVGYCDEGENMALIYEYMANGDLKEHMSGTRNRFILNWETRLKIVIDSAQGLEYLHNGCKPLMVHRDVKTTNILLNEHFEAKLADFGLSRSFPIGGETHVSTVVAGTPGYLDPEYYKTNRLTEKSDVYSFGIVLLEMITNRPVIDQSREKPYISEWVGIMLTKGDIISIMDPSLNGDYDSGSVWKAVELAMSCLNPSSTRRPTMSQVLIALNECLVSENSRGGASRDMDSKSSLEVSLTFDTDVSPMAR

SEQ ID NO: 97465 - protein, 884 aa, Arabidopsis thaliana
  peptide (1)..(884): Ceres Seq. ID no. 12737651
  misc_feature (6)..(884): Homolog of NCBI NO: 9294681 NR Description: receptor-like protein kinase [Arabidopsis
  misc_feature (6)..(884): Homolog of NCBI NO: 15232537 NR Description: serine/threonine-specific protein kinase,
  misc_feature (1)..(884): Homolog of NCBI NO: 25387119 NR Description: probable protein kinase [imported] - Arabidopsis >gi|9802783|gb|AAF99852.1|AC015448_2 Putative protein kinase
  misc_feature (1)..(538): Homolog of NCBI NO: 25387103 NR Description: probable receptor protein kinase [imported] - thaliana >gi|12321669|gb|AAG50871.1|AC025294_9 receptor protein
  misc_feature (6)..(884): Homolog of NCBI NO: 39104601 NR Description: unknown protein [Arabidopsis thaliana]
  misc_feature (292)..(621): Homolog of NCBI NO: 15238490 NR Description: leucine-rich repeat transmembrane protein kinase,
  misc_feature (647)..(884): Homolog of NCBI NO: 15238490 NR Description: leucine-rich repeat transmembrane protein kinase,
  misc_feature (177)..(269): Homolog of NCBI NO: 15238490 NR Description: leucine-rich repeat transmembrane protein kinase,
  misc_feature (11)..(75): Homolog of NCBI NO: 15238490 NR Description: leucine-rich repeat transmembrane protein kinase,
  misc_feature (106)..(183): Homolog of NCBI NO: 15238490 NR Description: leucine-rich repeat transmembrane protein kinase,
MESHRVFVATFMLILHLVQAQDQPGFINVDCGLLPRDSPYNALGTGLVYTSDVGLVSSGKTGKIAKEFEENNSTPNLTLRYFPDGARNCYNLNVSRDTNYMIKATFVYGNYDGHKDEPNFDLYLGPNLWATVSRSETVEEIIHVTKSDSLQVCLAKTGDFIPFINILELRPLKKNVYVTESGSLKLLFRKYFSDSGQTIRYPDDIYDRVWHASFLENNWAQVSTTLGVNVTDNYDLSQDVMATGATPLNDSETLNITWNVEPPTTKVYSYMHFAELETLRANDTREFNVMLNGNDLFGPYSPIPLKTETETNLKPEECEDGACILQLVKTSKSTLPPLLNAIEAFTVIDFLQVETDEDDAAAIKNVQNAYGLINRSSWQGDPCVPKQYSWDGLKCSYSDSTPPIINFLDLSASGLTGIIAPAIQNLTHLEILALSNNNLTGEVPEFLADLKSIMVIDLRGNNLSGPVPASLLQKKGLMLHLDDNPHILCTTGSCMHKGEGEKKSIIVPVVASIVSLAVIIGALILFLVFRKKKASKVEGTLPSYMQASDGRSPRSSEPAIVTKNKRFTYSQVVIMTNNFQRILGKGGFGIVYHGFVNGVEQVAVKILSHSSSQGYKQFKAEVELLLRVHHKNLVGLVGYCDEGENMALIYEYMANGDLKEHMSGTRNRFILNWETRLKIVIDSAQGLEYLHNGCKPLMVHRDVKTTNILLNEHFEAKLADFGLSRSFPIGGETHVSTVVAGTPGYLDPEYYKTNRLTEKSDVYSFGIVLLEMITNRPVIDQSREKPYISEWVGIMLTKGDIISIMDPSLNGDYDSGSVWKAVELAMSCLNPSSTRRPTMSQVLIALNECLVSENSRGGASRDMDSKSSLEVSLTFDTDVSPMAR

SEQ ID NO: 97466 - protein, 873 aa, Arabidopsis thaliana
  peptide (1)..(873): Ceres Seq. ID no. 12737652
  misc_feature (1)..(873): Homolog of NCBI NO: 9294681 NR Description: receptor-like protein kinase [Arabidopsis
  misc_feature (1)..(873): Homolog of NCBI NO: 15232537 NR Description: serine/threonine-specific protein kinase,
  misc_feature (1)..(873): Homolog of NCBI NO: 25387119 NR Description: probable protein kinase [imported] - Arabidopsis >gi|9802783|gb|AAF99852.1|AC015448_2 Putative protein kinase
  misc_feature (1)..(527): Homolog of NCBI NO: 25387103 NR Description: probable receptor protein kinase [imported] - thaliana >gi|12321669|gb|AAG50871.1|AC025294_9 receptor protein
  misc_feature (1)..(873): Homolog of NCBI NO: 39104601 NR Description: unknown protein [Arabidopsis thaliana]
  misc_feature (281)..(610): Homolog of NCBI NO: 15238490 NR Description: leucine-rich repeat transmembrane protein kinase,
  misc_feature (636)..(873): Homolog of NCBI NO: 15238490 NR Description: leucine-rich repeat transmembrane protein kinase,
  misc_feature (166)..(258): Homolog of NCBI NO: 15238490 NR Description: leucine-rich repeat transmembrane protein kinase,
  misc_feature (1)..(64): Homolog of NCBI NO: 15238490 NR Description: leucine-rich repeat transmembrane protein kinase,
  misc_feature (95)..(172): Homolog of NCBI NO: 15238490 NR Description: leucine-rich repeat transmembrane protein kinase,
MLILHLVQAQDQPGFINVDCGLLPRDSPYNALGTGLVYTSDVGLVSSGKTGKIAKEFEENNSTPNLTLRYFPDGARNCYNLNVSRDTNYMIKATFVYGNYDGHKDEPNFDLYLGPNLWATVSRSETVEEIIHVTKSDSLQVCLAKTGDFIPFINILELRPLKKNVYVTESGSLKLLFRKYFSDSGQTIRYPDDIYDRVWHASFLENNWAQVSTTLGVNVTDNYDLSQDVMATGATPLNDSETLNITWNVEPPTTKVYSYMHFAELETLRANDTREFNVMLNGNDLFGPYSPIPLKTETETNLKPEECEDGACILQLVKTSKSTLPPLLNAIEAFTVIDFLQVETDEDDAAAIKNVQNAYGLINRSSWQGDPCVPKQYSWDGLKCSYSDSTPPIINFLDLSASGLTGIIAPAIQNLTHLEILALSNNNLTGEVPEFLADLKSIMVIDLRGNNLSGPVPASLLQKKGLMLHLDDNPHILCTTGSCMHKGEGEKKSIIVPVVASIVSLAVIIGALILFLVFRKKKASKVEGTLPSYMQASDGRSPRSSEPAIVTKNKRFTYSQVVIMTNNFQRILGKGGFGIVYHGFVNGVEQVAVKILSHSSSQGYKQFKAEVELLLRVHHKNLVGLVGYCDEGENMALIYEYMANGDLKEHMSGTRNRFILNWETRLKIVIDSAQGLEYLHNGCKPLMVHRDVKTTNILLNEHFEAKLADFGLSRSFPIGGETHVSTVVAGTPGYLDPEYYKTNRLTEKSDVYSFGIVLLEMITNRPVIDQSREKPYISEWVGIMLTKGDIISIMDPSLNGDYDSGSVWKAVELAMSCLNPSSTRRPTMSQVLIALNECLVSENSRGGASRDMDSKSSLEVSLTFDTDVSPMAR

SEQ ID NO: 97467 - DNA, 2514 bp, Arabidopsis thaliana
  misc_feature (1)..(2514): Ceres Seq. ID no. 12737653
  misc_feature: MA Experiment ID: 20000315 Result: Up-regulated in Transcription
  misc_feature: MA Experiment 20000315 PARAMETER Experiment Name: At_14day_Shoots-Roots_Sub_P Parameter: Age (day) Value: 14
  misc_feature: MA Experiment 20000315 PARAMETER Experiment Name: At_14day_Shoots-Roots_Sub_P Parameter: Organism Value: A. thaliana
  misc_feature: MA Experiment 20000315 PARAMETER Experiment Name: At_14day_Shoots-Roots_Sub_P Parameter: Plant Line Value: WS
  misc_feature: MA Experiment 20000315 PARAMETER Experiment Name: At_14day_Shoots-Roots_Sub_P Parameter: Tissue Value: Shoots vs. Whole Plant
atgaagtctcttcatttttgtttgctctttatgatcgtatcttttacagtttcgagacccgtcgaagctcaagatcaagcaggattcatcagcttggattgtgggttggtgcctaaggaaaccacttatgtggaaacgtcgacgaatataacatacaaatcagacgcaaattacaccgacagcggattggtcgggaagatcaatgatgcacacaagacactggttcaacaaccgctttgggccttgagaagcttccctgagggtgaaagaaactgttacaacttcaaccttaccgtgaacagcacatatttgatcagaggaacttttttgtatgggaattatgacggcttgaatcaatccccaagctttgaccttcacattggtgctagcaaatggacctctgttaacatagtaggagtaacagataccgtaatgcccgagataatccatgtcttaacacaaaaacgtcttcaagtctgtcttgttaagacaggaaagacgacaccgttcatttcgtcattggaattgcgtccgttgataaataacatttacatcgcggaaagtggatcaatggtcttgcaaaatagagtatattttccatctgattcaacatctatcgtcaggtacgatgaggacatacacgaccgagtatggaatccagtttcagatgatgattcctcatcgataagcacggacctccaggtccaaacaaataacttatatgacgtgcctcaattcgtaatgaagactgctgctatccctaaagatgctagtgcgccatggagcttagtgtggactatagataacaccactgctctgtcatatgtatatatgcatttcgcagaaattcaggatttaaaagccaatgaccttagagaattcgacattacttacaatggtggcaagctttggttttcccagtttaggcctaacaaactcagcattctaacgatgttcagtcaagtccccttgacttcatcaaatggcgagtataatttcactttcgaaatgactagtaactcaactcttccaccccttatcaacgccctcgagatatatacaggtctagaaattctacagcttcagacagacaaggatgaagtttctgctatgatgaacatcaaaacgacttatgatttgagcaaaaagataagctggcagggagatccatgtgctcctcagctgtatcggtgggaaggtctagattgtagttatccggacaccgaggcatcacggattatatccttgaacttgaatgcgagcgggttgaacggtaccataacatctgacataaccaagctaacacagttgagcgagcttttgggtgaaaaggttaaaatgaatcccacagccaaaaaagagagtaaaaaggttcccatagttcctatcgcagcatcagtggctggcgtgtttgctctgatagttatattggccatctttttcattgttaaaggaaaaaaagggaaaagtgctgaaggaccacccttatcagtcactagtggtacagctaaaagtgagacaagatcatccaatccatcaatcatgagaaaagatcgcaagatcacatatcctcaggtattgaagatgactaataacttcgagagagttcttggtaaaggagggtttggaacagtatatcatggaaacatggaagatgctcaagtagctgtgaaaatgctctcgcactcatcggctcaaggttataaagagttcaaagcagaggttgaacttcttttaagagttcaccacagacatttggtgggacttgtgggttactgtgatgatggagataacttggctctgatttatgaatatatggcaaatggagacctgagggagaatatgttaggaaaacgtggaggcaatgtccttacctgggaaaacaggatgcaaatagctgtagaggctgcacaaggactggagtatctgcacaatggatgtacgcctccaatggtccatagagatgttaaaactactaacatcttattgaatgcacagtgtggagcgaaactagccgactttgggctctctagatcttttccaatcgatggtgaatgtcatgtctcaacagtcgttgcgggtacacctgggtacctagaccctgagtattacagaacaaactggctaagcgagaagagtgacgtgtacagcttcggtgtagtgctattagagatagtcacaaaccagcctgttataaatcaaacaagagagagacctcacatcaatgaatgggttggcttcatgctcagtaaaggagacatcaagagcatcgtcgacccaaaactgatgggggactatgacacaaacggtgcatggaagattgtggagctgggtcttgcctgtgtgaacccgtcttcgaacctaagaccaacaatggcacacgttgtgattgagctaaacgagtgtgtggcctttgaaaatgcaaggcgacaaggtagtgaagagatgtacacaagaagttctactaactttagtcacacgtctgcttccgaattttcccccggggcaagataa

SEQ ID NO: 97468 - protein, 837 aa, Arabidopsis thaliana
  peptide (1)..(837): Ceres Seq. ID no. 12737654
  misc_feature (405)..(837): Homolog of NCBI NO: 25387121 NR Description: probable protein kinase [imported] - Arabidopsis >gi|9802790|gb|AAF99859.1|AC015448_9 Putative protein kinase
  misc_feature (8)..(440): Homolog of NCBI NO: 25387121 NR Description: probable protein kinase [imported] - Arabidopsis >gi|9802790|gb|AAF99859.1|AC015448_9 Putative protein kinase
  misc_feature (8)..(440): Homolog of NCBI NO: 15218059 NR Description: light repressible receptor protein kinase,
  misc_feature (617)..(837): Homolog of NCBI NO: 15218059 NR Description: light repressible receptor protein kinase,
  misc_feature (405)..(618): Homolog of NCBI NO: 15218059 NR Description: light repressible receptor protein kinase,
  misc_feature (353)..(837): Homolog of NCBI NO: 25405508 NR Description: probable protein kinase [imported] - Arabidopsis >gi|9802791|gb|AAF99860.1|AC015448_10 Putative protein kinase
  misc_feature (1)..(440): Homolog of NCBI NO: 25405508 NR Description: probable protein kinase [imported] - Arabidopsis >gi|9802791|gb|AAF99860.1|AC015448_10 Putative protein kinase
  misc_feature (406)..(837): Homolog of NCBI NO: 15218075 NR Description: light repressible receptor protein kinase,
  misc_feature (1)..(352): Homolog of NCBI NO: 15218075 NR Description: light repressible receptor protein kinase,
  misc_feature (411)..(837): Homolog of NCBI NO: 25387154 NR Description: protein F22G5.6 [imported] - Arabidopsis thaliana
MKSLHFCLLFMIVSFTVSRPVEAQDQAGFISLDCGLVPKETTYVETSTNITYKSDANYTDSGLVGKINDAHKTLVQQPLWALRSFPEGERNCYNFNLTVNSTYLIRGTFLYGNYDGLNQSPSFDLHIGASKWTSVNIVGVTDTVMPEIIHVLTQKRLQVCLVKTGKTTPFISSLELRPLINNIYIAESGSMVLQNRVYFPSDSTSIVRYDEDIHDRVWNPVSDDDSSSISTDLQVQTNNLYDVPQFVMKTAAIPKDASAPWSLVWTIDNTTALSYVYMHFAEIQDLKANDLREFDITYNGGKLWFSQFRPNKLSILTMFSQVPLTSSNGEYNFTFEMTSNSTLPPLINALEIYTGLEILQLQTDKDEVSAMMNIKTTYDLSKKISWQGDPCAPQLYRWEGLDCSYPDTEASRIISLNLNASGLNGTITSDITKLTQLSELLGEKVKMNPTAKKESKKVPIVPIAASVAGVFALIVILAIFFIVKGKKGKSAEGPPLSVTSGTAKSETRSSNPSIMRKDRKITYPQVLKMTNNFERVLGKGGFGTVYHGNMEDAQVAVKMLSHSSAQGYKEFKAEVELLLRVHHRHLVGLVGYCDDGDNLALIYEYMANGDLRENMLGKRGGNVLTWENRMQIAVEAAQGLEYLHNGCTPPMVHRDVKTTNILLNAQCGAKLADFGLSRSFPIDGECHVSTVVAGTPGYLDPEYYRTNWLSEKSDVYSFGVVLLEIVTNQPVINQTRERPHINEWVGFMLSKGDIKSIVDPKLMGDYDTNGAWKIVELGLACVNPSSNLRPTMAHVVIELNECVAFENARRQGSEEMYTRSSTNFSHTSASEFSPGAR

SEQ ID NO: 97469 - protein, 827 aa, Arabidopsis thaliana
  peptide (1)..(827): Ceres Seq. ID no. 12737655
  misc_feature (395)..(827): Homolog of NCBI NO: 25387121 NR Description: probable protein kinase [imported] - Arabidopsis >gi|9802790|gb|AAF99859.1|AC015448_9 Putative protein kinase
  misc_feature (1)..(430): Homolog of NCBI NO: 25387121 NR Description: probable protein kinase [imported] - Arabidopsis >gi|9802790|gb|AAF99859.1|AC015448_9 Putative protein kinase
  misc_feature (1)..(430): Homolog of NCBI NO: 15218059 NR Description: light repressible receptor protein kinase,
  misc_feature (607)..(827): Homolog of NCBI NO: 15218059 NR Description: light repressible receptor protein kinase,
  misc_feature (395)..(608): Homolog of NCBI NO: 15218059 NR Description: light repressible receptor protein kinase,
  misc_feature (343)..(827): Homolog of NCBI NO: 25405508 NR Description: probable protein kinase [imported] - Arabidopsis >gi|9802791|gb|AAF99860.1|AC015448_10 Putative protein kinase
  misc_feature (1)..(430): Homolog of NCBI NO: 25405508 NR Description: probable protein kinase [imported] - Arabidopsis >gi|9802791|gb|AAF99860.1|AC015448_10 Putative protein kinase
  misc_feature (396)..(827): Homolog of NCBI NO: 15218075 NR Description: light repressible receptor protein kinase,
  misc_feature (1)..(342): Homolog of NCBI NO: 15218075 NR Description: light repressible receptor protein kinase,
  misc_feature (401)..(827): Homolog of NCBI NO: 25387154 NR Description: protein F22G5.6 [imported] - Arabidopsis thaliana
MIVSFTVSRPVEAQDQAGFISLDCGLVPKETTYVETSTNITYKSDANYTDSGLVGKINDAHKTLVQQPLWALRSFPEGERNCYNFNLTVNSTYLIRGTFLYGNYDGLNQSPSFDLHIGASKWTSVNIVGVTDTVMPEIIHVLTQKRLQVCLVKTGKTTPFISSLELRPLINNIYIAESGSMVLQNRVYFPSDSTSIVRYDEDIHDRVWNPVSDDDSSSISTDLQVQTNNLYDVPQFVMKTAAIPKDASAPWSLVWTIDNTTALSYVYMHFAEIQDLKANDLREFDITYNGGKLWFSQFRPNKLSILTMFSQVPLTSSNGEYNFTFEMTSNSTLPPLINALEIYTGLEILQLQTDKDEVSAMMNIKTTYDLSKKISWQGDPCAPQLYRWEGLDCSYPDTEASRIISLNLNASGLNGTITSDITKLTQLSELLGEKVKMNPTAKKESKKVPIVPIAASVAGVFALIVILAIFFIVKGKKGKSAEGPPLSVTSGTAKSETRSSNPSIMRKDRKITYPQVLKMTNNFERVLGKGGFGTVYHGNMEDAQVAVKMLSHSSAQGYKEFKAEVELLLRVHHRHLVGLVGYCDDGDNLALIYEYMANGDLRENMLGKRGGNVLTWENRMQIAVEAAQGLEYLHNGCTPPMVHRDVKTTNILLNAQCGAKLADFGLSRSFPIDGECHVSTVVAGTPGYLDPEYYRTNWLSEKSDVYSFGVVLLEIVTNQPVINQTRERPHINEWVGFMLSKGDIKSIVDPKLMGDYDTNGAWKIVELGLACVNPSSNLRPTMAHVVIELNECVAFENARRQGSEEMYTRSSTNFSHTSASEFSPGAR

SEQ ID NO: 97470 - protein, 693 aa, Arabidopsis thaliana
  peptide (1)..(693): Ceres Seq. ID no. 12737656
  misc_feature (261)..(693): Homolog of NCBI NO: 25387121 NR Description: probable protein kinase [imported] - Arabidopsis >gi|9802790|gb|AAF99859.1|AC015448_9 Putative protein kinase
  misc_feature (1)..(296): Homolog of NCBI NO: 25387121 NR Description: probable protein kinase [imported] - Arabidopsis >gi|9802790|gb|AAF99859.1|AC015448_9 Putative protein kinase
  misc_feature (1)..(296): Homolog of NCBI NO: 15218059 NR Description: light repressible receptor protein kinase,
  misc_feature (473)..(693): Homolog of NCBI NO: 15218059 NR Description: light repressible receptor protein kinase,
  misc_feature (261)..(474): Homolog of NCBI NO: 15218059 NR Description: light repressible receptor protein kinase,
  misc_feature (209)..(693): Homolog of NCBI NO: 25405508 NR Description: probable protein kinase [imported] - Arabidopsis >gi|9802791|gb|AAF99860.1|AC015448_10 Putative protein kinase
  misc_feature (1)..(296): Homolog of NCBI NO: 25405508 NR Description: probable protein kinase [imported] - Arabidopsis >gi|9802791|gb|AAF99860.1|AC015448_10 Putative protein kinase
  misc_feature (262)..(693): Homolog of NCBI NO: 15218075 NR Description: light repressible receptor protein kinase,
  misc_feature (1)..(208): Homolog of NCBI NO: 15218075 NR Description: light repressible receptor protein kinase,
  misc_feature (267)..(693): Homolog of NCBI NO: 25387154 NR Description: protein F22G5.6 [imported] - Arabidopsis thaliana
MPEIIHVLTQKRLQVCLVKTGKTTPFISSLELRPLINNIYIAESGSMVLQNRVYFPSDSTSIVRYDEDIHDRVWNPVSDDDSSSISTDLQVQTNNLYDVPQFVMKTAAIPKDASAPWSLVWTIDNTTALSYVYMHFAEIQDLKANDLREFDITYNGGKLWFSQFRPNKLSILTMFSQVPLTSSNGEYNFTFEMTSNSTLPPLINALEIYTGLEILQLQTDKDEVSAMMNIKTTYDLSKKISWQGDPCAPQLYRWEGLDCSYPDTEASRIISLNLNASGLNGTITSDITKLTQLSELLGEKVKMNPTAKKESKKVPIVPIAASVAGVFALIVILAIFFIVKGKKGKSAEGPPLSVTSGTAKSETRSSNPSIMRKDRKITYPQVLKMTNNFERVLGKGGFGTVYHGNMEDAQVAVKMLSHSSAQGYKEFKAEVELLLRVHHRHLVGLVGYCDDGDNLALIYEYMANGDLRENMLGKRGGNVLTWENRMQIAVEAAQGLEYLHNGCTPPMVHRDVKTTNILLNAQCGAKLADFGLSRSFPIDGECHVSTVVAGTPGYLDPEYYRTNWLSEKSDVYSFGVVLLEIVTNQPVINQTRERPHINEWVGFMLSKGDIKSIVDPKLMGDYDTNGAWKIVELGLACVNPSSNLRPTMAHVVIELNECVAFENARRQGSEEMYTRSSTNFSHTSASEFSPGAR

SEQ ID NO: 97471 - DNA, 2595 bp, Arabidopsis thaliana
  misc_feature (1)..(2595): Ceres Seq. ID no. 12737657
  misc_feature: MA Experiment ID: 20000314 Result: Up-regulated in Transcription
  misc_feature: MA Experiment 20000314 PARAMETER Experiment Name: At_14day_Shoots-Roots_Sub_P Parameter: Age (day) Value: 14
  misc_feature: MA Experiment 20000314 PARAMETER Experiment Name: At_14day_Shoots-Roots_Sub_P Parameter: Organism Value: A. thaliana
  misc_feature: MA Experiment 20000314 PARAMETER Experiment Name: At_14day_Shoots-Roots_Sub_P Parameter: Plant Line Value: WS
  misc_feature: MA Experiment 20000314 PARAMETER Experiment Name: At_14day_Shoots-Roots_Sub_P Parameter: Tissue Value: Roots vs. Whole Plant
atgaagtctattcatgggtttttgctcttcttgatcacagcttatgtcattttggaatcagttcaagctcaagatcaattaggattcatcagtttggattgtgggttagtccctaagaacgcaacttatacggagaagacgacaaatataacatacaaatcagatgcaaattacatcgatagtggattggtcgggaggatcagtgctgagtacaaagcgcagcttcagcaacaaacttggaccgtaagaagcttccctgagggtgaaagaaactgttacaacttcaaccttaccgctaaaagcagatatctcatcagagcaacctttacgtatgggaattacgatggtttgagacaagtccccaagtttgatattcacattggtcctagcaaatggacttctgttaagttggatggagtaggaaatggtgcagtcctcgagatgattcatgtcttaacacaagaccgtcttcaaatttgtcttgttaagacaggaaaagggataccatttatttcgtcgctggaacttcgtccgttgaacaataatacttacctcacgcaaagtggatcgttgattgggttcgcaagagttttcttttcagccactccaacattcataaggtatgatgaggatatccatgatcgagtctgggttcgacagtttggtaatggattgaaatcgataagcacagaccttttggtcgatacaagtaacccctatgatgtgccacaagctgtggcaaagactgcatgtgtaccttcaaatgctagtcagcctctgatctttgattggactcttgacaacatcacttcacaatcatatgtatacatgcatttcgctgaaatccagactcttaaggataatgacatcagagaattcaacattacttataatggtggtcagaatgtgtactcctatttgaggcctgaaaaattcgagatatcaactctattcgattcaaagcctttgagttctccggatggcagtttcagtttgtctttcacgaagaccggtaactcaactcttcctcctcttatcaacggcctcgagatttataaagtcttagaccttctagaactcgagacagatcaagatgaaggcaagtttagcatcaaaaaggttagctggcaaggagatccatgtgctcctaagtcttatcagtgggaaggtttaaactgcagttatccaaactctgatcaacctcggatcatatccttgaacttggcagagaacaagttgaccggtaccataacacctgaaatatccaagctaacacagttgatagagctagatttgtcaaaaaacgatttatcaggagagataccggagttttttgcagatatgaaaaagcttaatgttttcatttgcagaaacttaagtggaaatctaggtctcaacagcacaattccagactctattcaacaaagattagatagcaaatctctaatactaattaagactgttactaaaactgtcaccctgaaaggcaaaagtaaaaaggttccaatgattcctatcgtagcgtcagtggctggtgtgttcgctctgctagttatcttggccatctttttcgtcgttagaaggaaaaacggggaaagtaataagggtacgaatccatcaatcataacaaaggaacgcaggatcacgtatcccgaggtactaaagatgactaataactttgagagagttcttggtaaaggaggatttggaacagtgtaccatggaaacttggaggatactcaagtagctgtgaaaatgctctctcattcgtcagctcaagggtataaagagttcaaagcagaggttgaacttcttttaagagttcaccatagaaatttggtgggacttgtgggttactgtgatgatggagataacttggctttgatttatgaatacatggctaatggagatctcaaggagaatatgtcaggaaaacgtggaggcaatgtccttacctgggaaaacaggatgcaaatagctgtagaggctgcacaaggattggagtatcttcacaatggatgtacgcctcctatggtccatagagatgttaaaactaccaacatcttattgaatgagcggtatggagcaaaactagccgactttgggctctcaagatctttcccagttgatggcgaaagtcatgtctcgacagtggttgcgggcacacctggttaccttgaccctgagtactacagaacaaactggctaagcgagaagagtgatgtgtacagcttcggtgtagtcctattagagatagtcacaaaccagcctgtgacagataaaacaagagagagaactcacatcaatgaatgggttgggtccatgctcactaaaggggacatcaagagcatccttgacccaaaactgatgggggactatgacacaaacggtgcctggaagattgttgagctggctcttgcatgtgtgaacccgtcttcaaaccggagaccaacaatggcacacgtcgtgactgagctaaacgaatgtgtggccttagaaaatgcaaggcgacaaggtcgtgaagagatgcacacaagtggttatgttgactttagtcgctcttctgcttccgaattttcccctggagccagataa

SEQ ID NO: 97472 - protein, 864 aa, Arabidopsis thaliana
  peptide (1)..(864): Ceres Seq. ID no. 12737658
  misc_feature (1)..(864): Homolog of NCBI NO: 25405505 NR Description: probable protein kinase [imported] - Arabidopsis >gi|9802788|gb|AAF99857.1|AC015448_7 Putative protein kinase
  misc_feature (7)..(645): Homolog of NCBI NO: 15218059 NR Description: light repressible receptor protein kinase,
  misc_feature (612)..(864): Homolog of NCBI NO: 15218059 NR Description: light repressible receptor protein kinase,
  misc_feature (1)..(864): Homolog of NCBI NO: 25405508 NR Description: probable protein kinase [imported] - Arabidopsis >gi|9802791|gb|AAF99860.1|AC015448_10 Putative protein kinase
  misc_feature (441)..(864): Homolog of NCBI NO: 15218075 NR Description: light repressible receptor protein kinase,
  misc_feature (1)..(354): Homolog of NCBI NO: 15218075 NR Description: light repressible receptor protein kinase,
  misc_feature (9)..(864): Homolog of NCBI NO: 15232537 NR Description: serine/threonine-specific protein kinase,
  misc_feature (28)..(864): Homolog of NCBI NO: 25387154 NR Description: protein F22G5.6 [imported] - Arabidopsis thaliana
  misc_feature (295)..(601): Homolog of NCBI NO: 15238490 NR Description: leucine-rich repeat transmembrane protein kinase,
  misc_feature (627)..(864): Homolog of NCBI NO: 15238490 NR Description: leucine-rich repeat transmembrane protein kinase,
MKSIHGFLLFLITAYVILESVQAQDQLGFISLDCGLVPKNATYTEKTTNITYKSDANYIDSGLVGRISAEYKAQLQQQTWTVRSFPEGERNCYNFNLTAKSRYLIRATFTYGNYDGLRQVPKFDIHIGPSKWTSVKLDGVGNGAVLEMIHVLTQDRLQICLVKTGKGIPFISSLELRPLNNNTYLTQSGSLIGFARVFFSATPTFIRYDEDIHDRVWVRQFGNGLKSISTDLLVDTSNPYDVPQAVAKTACVPSNASQPLIFDWTLDNITSQSYVYMHFAEIQTLKDNDIREFNITYNGGQNVYSYLRPEKFEISTLFDSKPLSSPDGSFSLSFTKTGNSTLPPLINGLEIYKVLDLLELETDQDEGKFSIKKVSWQGDPCAPKSYQWEGLNCSYPNSDQPRIISLNLAENKLTGTITPEISKLTQLIELDLSKNDLSGEIPEFFADMKKLNVFICRNLSGNLGLNSTIPDSIQQRLDSKSLILIKTVTKTVTLKGKSKKVPMIPIVASVAGVFALLVILAIFFVVRRKNGESNKGTNPSIITKERRITYPEVLKMTNNFERVLGKGGFGTVYHGNLEDTQVAVKMLSHSSAQGYKEFKAEVELLLRVHHRNLVGLVGYCDDGDNLALIYEYMANGDLKENMSGKRGGNVLTWENRMQIAVEAAQGLEYLHNGCTPPMVHRDVKTTNILLNERYGAKLADFGLSRSFPVDGESHVSTVVAGTPGYLDPEYYRTNWLSEKSDVYSFGVVLLEIVTNQPVTDKTRERTHINEWVGSMLTKGDIKSILDPKLMGDYDTNGAWKIVELALACVNPSSNRRPTMAHVVTELNECVALENARRQGREEMHTSGYVDFSRSSASEFSPGAR

SEQ ID NO: 97473 - protein, 717 aa, Arabidopsis thaliana
  peptide (1)..(717): Ceres Seq. ID no. 12737659
  misc_feature (1)..(717): Homolog of NCBI NO: 25405505 NR Description: probable protein kinase [imported] - Arabidopsis >gi|9802788|gb|AAF99857.1|AC015448_7 Putative protein kinase
  misc_feature (1)..(498): Homolog of NCBI NO: 15218059 NR Description: light repressible receptor protein kinase,
  misc_feature (465)..(717): Homolog of NCBI NO: 15218059 NR Description: light repressible receptor protein kinase,
  misc_feature (1)..(717): Homolog of NCBI NO: 25405508 NR Description: probable protein kinase [imported] - Arabidopsis >gi|9802791|gb|AAF99860.1|AC015448_10 Putative protein kinase
  misc_feature (294)..(717): Homolog of NCBI NO: 15218075 NR Description: light repressible receptor protein kinase,
  misc_feature (1)..(207): Homolog of NCBI NO: 15218075 NR Description: light repressible receptor protein kinase,
  misc_feature (1)..(717): Homolog of NCBI NO: 15232537 NR Description: serine/threonine-specific protein kinase,
  misc_feature (1)..(717): Homolog of NCBI NO: 25387154 NR Description: protein F22G5.6 [imported] - Arabidopsis thaliana
  misc_feature (148)..(454): Homolog of NCBI NO: 15238490 NR Description: leucine-rich repeat transmembrane protein kinase,
  misc_feature (480)..(717): Homolog of NCBI NO: 15238490 NR Description: leucine-rich repeat transmembrane protein kinase,
MIHVLTQDRLQICLVKTGKGIPFISSLELRPLNNNTYLTQSGSLIGFARVFFSATPTFIRYDEDIHDRVWVRQFGNGLKSISTDLLVDTSNPYDVPQAVAKTACVPSNASQPLIFDWTLDNITSQSYVYMHFAEIQTLKDNDIREFNITYNGGQNVYSYLRPEKFEISTLFDSKPLSSPDGSFSLSFTKTGNSTLPPLINGLEIYKVLDLLELETDQDEGKFSIKKVSWQGDPCAPKSYQWEGLNCSYPNSDQPRIISLNLAENKLTGTITPEISKLTQLIELDLSKNDLSGEIPEFFADMKKLNVFICRNLSGNLGLNSTIPDSIQQRLDSKSLILIKTVTKTVTLKGKSKKVPMIPIVASVAGVFALLVILAIFFVVRRKNGESNKGTNPSIITKERRITYPEVLKMTNNFERVLGKGGFGTVYHGNLEDTQVAVKMLSHSSAQGYKEFKAEVELLLRVHHRNLVGLVGYCDDGDNLALIYEYMANGDLKENMSGKRGGNVLTWENRMQIAVEAAQGLEYLHNGCTPPMVHRDVKTTNILLNERYGAKLADFGLSRSFPVDGESHVSTVVAGTPGYLDPEYYRTNWLSEKSDVYSFGVVLLEIVTNQPVTDKTRERTHINEWVGSMLTKGDIKSILDPKLMGDYDTNGAWKIVELALACVNPSSNRRPTMAHVVTELNECVALENARRQGREEMHTSGYVDFSRSSASEFSPGAR

SEQ ID NO: 97474 - protein, 588 aa, Arabidopsis thaliana
  peptide (1)..(588): Ceres Seq. ID no. 12737660
  misc_feature (1)..(588): Homolog of NCBI NO: 25405505 NR Description: probable protein kinase [imported] - Arabidopsis >gi|9802788|gb|AAF99857.1|AC015448_7 Putative protein kinase
  misc_feature (1)..(369): Homolog of NCBI NO: 15218059 NR Description: light repressible receptor protein kinase,
  misc_feature (336)..(588): Homolog of NCBI NO: 15218059 NR Description: light repressible receptor protein kinase,
  misc_feature (1)..(588): Homolog of NCBI NO: 25405508 NR Description: probable protein kinase [imported] - Arabidopsis >gi|9802791|gb|AAF99860.1|AC015448_10 Putative protein kinase
  misc_feature (165)..(588): Homolog of NCBI NO: 15218075 NR Description: light repressible receptor protein kinase,
  misc_feature (1)..(78): Homolog of NCBI NO: 15218075 NR Description: light repressible receptor protein kinase,
  misc_feature (1)..(588): Homolog of NCBI NO: 15232537 NR Description: serine/threonine-specific protein kinase,
  misc_feature (1)..(588): Homolog of NCBI NO: 25387154 NR Description: protein F22G5.6 [imported] - Arabidopsis thaliana
  misc_feature (19)..(325): Homolog of NCBI NO: 15238490 NR Description: leucine-rich repeat transmembrane protein kinase,
  misc_feature (351)..(588): Homolog of NCBI NO: 15238490 NR Description: leucine-rich repeat transmembrane protein kinase,
MHFAEIQTLKDNDIREFNITYNGGQNVYSYLRPEKFEISTLFDSKPLSSPDGSFSLSFTKTGNSTLPPLINGLEIYKVLDLLELETDQDEGKFSIKKVSWQGDPCAPKSYQWEGLNCSYPNSDQPRIISLNLAENKLTGTITPEISKLTQLIELDLSKNDLSGEIPEFFADMKKLNVFICRNLSGNLGLNSTIPDSIQQRLDSKSLILIKTVTKTVTLKGKSKKVPMIPIVASVAGVFALLVILAIFFVVRRKNGESNKGTNPSIITKERRITYPEVLKMTNNFERVLGKGGFGTVYHGNLEDTQVAVKMLSHSSAQGYKEFKAEVELLLRVHHRNLVGLVGYCDDGDNLALIYEYMANGDLKENMSGKRGGNVLTWENRMQIAVEAAQGLEYLHNGCTPPMVHRDVKTTNILLNERYGAKLADFGLSRSFPVDGESHVSTVVAGTPGYLDPEYYRTNWLSEKSDVYSFGVVLLEIVTNQPVTDKTRERTHINEWVGSMLTKGDIKSILDPKLMGDYDTNGAWKIVELALACVNPSSNRRPTMAHVVTELNECVALENARRQGREEMHTSGYVDFSRSSASEFSPGAR

SEQ ID NO: 97475 - DNA, 2667 bp, Arabidopsis thaliana
  misc_feature (1)..(2667): Ceres Seq. ID no. 12737661
  misc_feature: MA Experiment ID: 20000171 Result: Down-regulated in Transcription
  misc_feature: MA Experiment 20000171 PARAMETER Experiment Name: At_42deg_Heat_P Parameter: Age (day) Value: 14
  misc_feature: MA Experiment 20000171 PARAMETER Experiment Name: At_42deg_Heat_P Parameter: Organism Value: A. thaliana
  misc_feature: MA Experiment 20000171 PARAMETER Experiment Name: At_42deg_Heat_P Parameter: Plant Line Value: WS
  misc_feature: MA Experiment 20000171 PARAMETER Experiment Name: At_42deg_Heat_P Parameter: Temperature (deg C) Value: 42 vs. 22
  misc_feature: MA Experiment 20000171 PARAMETER Experiment Name: At_42deg_Heat_P Parameter: Timepoint (hr) Value: 1
  misc_feature: MA Experiment 20000171 PARAMETER Experiment Name: At_42deg_Heat_P Parameter: Tissue Value: Aerial
  misc_feature: MA Experiment ID: 20000173 Result: Down-regulated in Transcription
  misc_feature: MA Experiment 20000173 PARAMETER Experiment Name: At_42deg_Heat_P Parameter: Age (day) Value: 14
  misc_feature: MA Experiment 20000173 PARAMETER Experiment Name: At_42deg_Heat_P Parameter: Organism Value: A. thaliana
  misc_feature: MA Experiment 20000173 PARAMETER Experiment Name: At_42deg_Heat_P Parameter: Plant Line Value: WS
  misc_feature: MA Experiment 20000173 PARAMETER Experiment Name: At_42deg_Heat_P Parameter: Temperature (deg C) Value: 42 vs. 22
  misc_feature: MA Experiment 20000173 PARAMETER Experiment Name: At_42deg_Heat_P Parameter: Timepoint (hr) Value: 6
  misc_feature: MA Experiment 20000173 PARAMETER Experiment Name: At_42deg_Heat_P Parameter: Tissue Value: Aerial
  misc_feature: MA Experiment ID: 20000182 Result: Up-regulated in Transcription
  misc_feature: MA Experiment 20000182 PARAMETER Experiment Name: At_2mM_SA_P Parameter: Age (day) Value: 14
  misc_feature: MA Experiment 20000182 PARAMETER Experiment Name: At_2mM_SA_P Parameter: Organism Value: A. thaliana
  misc_feature: MA Experiment 20000182 PARAMETER Experiment Name: At_2mM_SA_P Parameter: Plant Line Value: WS
  misc_feature: MA Experiment 20000182 PARAMETER Experiment Name: At_2mM_SA_P Parameter: Timepoint (hr) Value: 6
  misc_feature: MA Experiment 20000182 PARAMETER Experiment Name: At_2mM_SA_P Parameter: Tissue Value: Aerial
  misc_feature: MA Experiment 20000182 PARAMETER Experiment Name: At_2mM_SA_P Parameter: Treatment Value: 2mM SA vs. No Treatment
  misc_feature: MA Experiment ID: 20000184 Result: Down-regulated in Transcription
  misc_feature: MA Experiment 20000184 PARAMETER Experiment Name: At_Shoots__P Parameter: Age (day) Value: 7
  misc_feature: MA Experiment 20000184 PARAMETER Experiment Name: At_Shoots__P Parameter: Tissue Value: Shoots vs. Whole Plant
  misc_feature: MA Experiment ID: 20000227 Result: Down-regulated in Transcription
  misc_feature: MA Experiment 20000227 PARAMETER Experiment Name: At_Root-Tips-vs-Tops_P Parameter: Tissue Value: Root Tips vs. Root Tops
  misc_feature: MA Experiment ID: 20000451 Result: Down-regulated in Transcription
  misc_feature: MA Experiment 20000451 PARAMETER Experiment Name: At_CS6879_Shoots-Roots_P Parameter: Age (day) Value: 14
  misc_feature: MA Experiment 20000451 PARAMETER Experiment Name: At_CS6879_Shoots-Roots_P Parameter: Organism Value: A. thaliana
  misc_feature: MA Experiment 20000451 PARAMETER Experiment Name: At_CS6879_Shoots-Roots_P Parameter: Plant Line Value: CS6879 vs. WS
  misc_feature: MA Experiment 20000451 PARAMETER Experiment Name: At_CS6879_Shoots-Roots_P Parameter: Tissue Value: Roots
  misc_feature: MA Experiment ID: 20000456 Result: Up-regulated in Transcription
  misc_feature: MA Experiment 20000456 PARAMETER Experiment Name: At_100uM_BA_P Parameter: Age (day) Value: 14
  misc_feature: MA Experiment 20000456 PARAMETER Experiment Name: At_100uM_BA_P Parameter: Organism Value: A. thaliana
  misc_feature: MA Experiment 20000456 PARAMETER Experiment Name: At_100uM_BA_P Parameter: Plant Line Value: WS
  misc_feature: MA Experiment 20000456 PARAMETER Experiment Name: At_100uM_BA_P Parameter: Timepoint (hr) Value: 6
  misc_feature: MA Experiment 20000456 PARAMETER Experiment Name: At_100uM_BA_P Parameter: Tissue Value: Aerial
  misc_feature: MA Experiment 20000456 PARAMETER Experiment Name: At_100uM_BA_P Parameter: Treatment Value: 100uM BA vs. No Treatment
  misc_feature: MA Experiment ID: 20000460 Result: Down-regulated in Transcription
  misc_feature: MA Experiment 20000460 PARAMETER Experiment Name: At_10percent_PEG_P Parameter: Age (day) Value: 12
  misc_feature: MA Experiment 20000460 PARAMETER Experiment Name: At_10percent_PEG_P Parameter: Organism Value: A. thaliana
  misc_feature: MA Experiment 20000460 PARAMETER Experiment Name: At_10percent_PEG_P Parameter: Plant Line Value: WS
  misc_feature: MA Experiment 20000460 PARAMETER Experiment Name: At_10percent_PEG_P Parameter: Timepoint (day) Value: 12
  misc_feature: MA Experiment 20000460 PARAMETER Experiment Name: At_10percent_PEG_P Parameter: Tissue Value: Whole Plant
  misc_feature: MA Experiment 20000460 PARAMETER Experiment Name: At_10percent_PEG_P Parameter: Treatment Value: 10percent PEG vs. No Treatment
  misc_feature: MA Experiment ID: 20000527 Result: Down-regulated in Transcription
  misc_feature: MA Experiment 20000527 PARAMETER Experiment Name: At_10percent_PEG_P Parameter: Age (day) Value: 20
  misc_feature: MA Experiment 20000527 PARAMETER Experiment Name: At_10percent_PEG_P Parameter: Organism Value: A. thaliana
  misc_feature: MA Experiment 20000527 PARAMETER Experiment Name: At_10percent_PEG_P Parameter: Plant Line Value: WS
  misc_feature: MA Experiment 20000527 PARAMETER Experiment Name: At_10percent_PEG_P Parameter: Timepoint (day) Value: 20
  misc_feature: MA Experiment 20000527 PARAMETER Experiment Name: At_10percent_PEG_P Parameter: Tissue Value: Whole Plant
  misc_feature: MA Experiment 20000527 PARAMETER Experiment Name: At_10percent_PEG_P Parameter: Treatment Value: 10percent PEG vs. No Treatment
  misc_feature: MA Experiment ID: 20000573 Result: Up-regulated in Transcription
  misc_feature: MA Experiment 20000573 PARAMETER Experiment Name: At_100uM_ABA_Mutants__P Parameter: Organism Value: A. thaliana
  misc_feature: MA Experiment 20000573 PARAMETER Experiment Name: At_100uM_ABA_Mutants__P Parameter: Plant Line Value: CS22 vs. Ler wt
  misc_feature: MA Experiment 20000573 PARAMETER Experiment Name: At_100uM_ABA_Mutants__P Parameter: Timepoint (hr) Value: N/A
  misc_feature: MA Experiment 20000573 PARAMETER Experiment Name: At_100uM_ABA_Mutants__P Parameter: Tissue Value: Whole Plant
  misc_feature: MA Experiment 20000573 PARAMETER Experiment Name: At_100uM_ABA_Mutants__P Parameter: Treatment Value: None
  misc_feature: MA Experiment ID: 20000574 Result: Up-regulated in Transcription
  misc_feature: MA Experiment 20000574 PARAMETER Experiment Name: At_100uM_ABA_Mutants__P Parameter: Organism Value: A. thaliana
  misc_feature: MA Experiment 20000574 PARAMETER Experiment Name: At_100uM_ABA_Mutants__P Parameter: Plant Line Value: CS23 vs. Ler wt
  misc_feature: MA Experiment 20000574 PARAMETER Experiment Name: At_100uM_ABA_Mutants__P Parameter: Timepoint (hr) Value: N/A
  misc_feature: MA Experiment 20000574 PARAMETER Experiment Name: At_100uM_ABA_Mutants__P Parameter: Tissue Value: Whole Plant
  misc_feature: MA Experiment 20000574 PARAMETER Experiment Name: At_100uM_ABA_Mutants__P Parameter: Treatment Value: None
  misc_feature: MA Experiment ID: 20000709 Result: Down-regulated in Transcription
  misc_feature: MA Experiment 20000709 PARAMETER Experiment Name: At_15mM_NH4NO3_L-to-H_P Parameter: Age (hr) Value: 14
  misc_feature: MA Experiment 20000709 PARAMETER Experiment Name: At_15mM_NH4NO3_L-to-H_P Parameter: Organism Value: A. thaliana
  misc_feature: MA Experiment 20000709 PARAMETER Experiment Name: At_15mM_NH4NO3_L-to-H_P Parameter: Plant Line Value: WS
  misc_feature: MA Experiment 20000709 PARAMETER Experiment Name: At_15mM_NH4NO3_L-to-H_P Parameter: Timepoint (hr) Value: 4
  misc_feature: MA Experiment 20000709 PARAMETER Experiment Name: At_15mM_NH4NO3_L-to-H_P Parameter: Tissue Value: Aerial
  misc_feature: MA Experiment 20000709 PARAMETER Experiment Name: At_15mM_NH4NO3_L-to-H_P Parameter: Treatment Value: 15mM NH4NO3 vs. 30mM Mannitol
  misc_feature: MA Experiment ID: 20000794 Result: Down-regulated in Transcription
  misc_feature: MA Experiment 20000794 PARAMETER Experiment Name: At_Petals_P Parameter: Age (day) Value: 23-25 days
  misc_feature: MA Experiment 20000794 PARAMETER Experiment Name: At_Petals_P Parameter: Plant Line Value: WS
  misc_feature: MA Experiment 20000794 PARAMETER Experiment Name: At_Petals_P Parameter: Tissue Value: Petals vs. Whole plant
  misc_feature: MA Experiment ID: 20001556 Result: Down-regulated in Transcription
  misc_feature: MA Experiment 20001556 PARAMETER Experiment Name: At_Drought_Soil_Dry_P Parameter: Age (day) Value: 26
  misc_feature: MA Experiment 20001556 PARAMETER Experiment Name: At_Drought_Soil_Dry_P Parameter: Organism Value: A. thaliana
  misc_feature: MA Experiment 20001556 PARAMETER Experiment Name: At_Drought_Soil_Dry_P Parameter: Plant Line Value: WS
  misc_feature: MA Experiment 20001556 PARAMETER Experiment Name: At_Drought_Soil_Dry_P Parameter: Post Timepoint (hr) Value: None
  misc_feature: MA Experiment 20001556 PARAMETER Experiment Name: At_Drought_Soil_Dry_P Parameter: Post-Treatment Value: None
  misc_feature: MA Experiment 20001556 PARAMETER Experiment Name: At_Drought_Soil_Dry_P Parameter: Timepoint (day) Value: 12
  misc_feature: MA Experiment 20001556 PARAMETER Experiment Name: At_Drought_Soil_Dry_P Parameter: Treatment Value: Drought vs. No Drought
  misc_feature: MA Experiment ID: 20001560 Result: Down-regulated in Transcription
  misc_feature: MA Experiment 20001560 PARAMETER Experiment Name: At_Drought_Soil_Dry_P Parameter: Age (day) Value: 28
  misc_feature: MA Experiment 20001560 PARAMETER Experiment Name: At_Drought_Soil_Dry_P Parameter: Organism Value: A. thaliana
  misc_feature: MA Experiment 20001560 PARAMETER Experiment Name: At_Drought_Soil_Dry_P Parameter: Plant Line Value: WS
  misc_feature: MA Experiment 20001560 PARAMETER Experiment Name: At_Drought_Soil_Dry_P Parameter: Post Timepoint (hr) Value: None
  misc_feature: MA Experiment 20001560 PARAMETER Experiment Name: At_Drought_Soil_Dry_P Parameter: Post-Treatment Value: None
  misc_feature: MA Experiment 20001560 PARAMETER Experiment Name: At_Drought_Soil_Dry_P Parameter: Timepoint (day) Value: 14
  misc_feature: MA Experiment 20001560 PARAMETER Experiment Name: At_Drought_Soil_Dry_P Parameter: Treatment Value: Drought vs. No Drought
  misc_feature: MA Experiment ID: 20001904 Result: Down-regulated in Transcription
  misc_feature: MA Experiment 20001904 PARAMETER Experiment Name: At_Drought_Reproduction_P Parameter: Age (day) Value: 37
  misc_feature: MA Experiment 20001904 PARAMETER Experiment Name: At_Drought_Reproduction_P Parameter: Organism Value: A. thaliana
  misc_feature: MA Experiment 20001904 PARAMETER Experiment Name: At_Drought_Reproduction_P Parameter: Plant Line Value: WS
  misc_feature: MA Experiment 20001904 PARAMETER Experiment Name: At_Drought_Reproduction_P Parameter: Timepoint (day) Value: 7
  misc_feature: MA Experiment 20001904 PARAMETER Experiment Name: At_Drought_Reproduction_P Parameter: Tissue Value: Rosettes
  misc_feature: MA Experiment 20001904 PARAMETER Experiment Name: At_Drought_Reproduction_P Parameter: Treatment Value: Drought vs. No Drought
atgaggtttttgtctttcttgatcttcgttttcgcagttcttggattggttcaagctcaagaccaatcaggattcataagcttagattgtggtttggtgcctacggaaattacttatgtggaaaagtcgacgaatataacatacagatcagacgcaacttacatcgacagtggagttcccgggaagatcaatgaagtgtacagaacacagtttcagcaacaaatttgggccttgagaagcttccctgagggtcaaagaaattgttacaacttcagtctcaccgcaaaacgtaagtatctaatcagaggaacctttatctatgggaattatgacggtttgaatcaactcccgagctttgatctttacatcggtccaaacaaatggacctctgtttcgatccccggagtgagaaatggttcagtctccgagatgatccatgtcttaagacaagaccatcttcaaatttgtcttgtgaaaacaggagaaactacaccgtttatttcttcattggaacttcgtcctttgaacaataatacatacgtcacaaaaagtggatcgcttattgtggtcgcaagactttacttttcacccactccaccatttctcaggtatgatgaggacgtccatgaccgaatttggattccattcttagataacaaaaattccttgttaagcacggaactctctgttgatacaagtaacttctacaatgtgcctcaaactgtagcgaaaactgctgctgtccctttaaatgctactcagcctctgaaaataaattggagtctcgacgacatcacttcacagtcatatatatacatgcatttcgctgaaatcgagaatcttgaagctaatgagaccagagaattcaatattacttacaatggtggcgaaaattggttctcctattttagacctccaaagtttcgtataacaactgtatacaatccagcagctgtgagttctctagatgggaatttcaacttcactttctcgatgaccggtaactctactcatcctcctcttatcaacggccttgagatttatcaagttctagagcttccacagcttgatacataccaagatgaagtttccgctatgatgaatatcaagacaatatatggattgagcaaaaggtctagctggcaaggagatccatgtgctcctgagttatatagatgggaagttctaacttttggactctctattaggaacttgagtggaagcaatttgagtggtaccataacatctgatatatccaagctaacacatttgagagaactagatttatcaaacaatgacttatcaggagatattccatttgttttttctgatatgaagaatttgacactcataaacttgagtggaaacaagaatctaaatcgctcagttccagagactcttcagaagaggatagataacaaatctttaacactaattagagatgaaaccggaaaaaatagtacaaatgtagttgctatcgcagcatcagtggctagcgtgtttgctgtgctagttatcttggctatcgtttttgtcgtcataaggaaaaaacagagaactaatgaaggaccccgatcattcactactggcacggttaagagtgatgcaagatcatcgagttcatcaatcataacaaaggaacgcaagttcacttattcggaggtactaaagatgactaaaaactttgagagagttcttggtaaaggagggtttggaacagtgtatcatggtaacttggatgatactcaagtagctgtgaaaatgctttctcattcatcagctcaaggttataaagagttcaaagcagaggttgaacttcttttaagagttcatcacagacatttggtgggacttgttggttactgtgatgatggagacaacttagctctgatctatgaatatatggaaaaaggagacctgagggaaaatatgtcaggtaagcactttaatttagttgaatccatctccttagacagtttgaaacattcaaagcctggtacaggaaaacacagtgtcaatgtcctaagctgggaaacaagaatgcaaatagctgtagaggcagcacaaggattggagtatttgcataacggatgtaggcctcctatggtacatagagatgtgaaaccaaccaacattttattaaatgagcggtctcaagcaaaactagccgactttgggctatcgagatcttttcctgttgatggtgaatctcatgtcatgacagtcgttgcaggaacacctggttacttagatcctgagtattacagaacaaactggctaagcgagaagagtgatgtgtacagctttggtgtagtgcttttagagatagtcacaaaccagcctgtgatgaataaaaaccgagagagacctcatatcaatgaatgggttatgttcatgcttaccaatggggatatcaagagtattgtcgacccgaaactgaatgaagactatgacacaaacggtgtgtggaaggttgtagagttggctttagcttgtgtaaacccgtcttcaagccgtagaccgacaatgccacacgtggtgatggagctaaacgaatgtcttgctttggaaatagaaaggaaacaaggtagtcaagcgacgtacataaaggaatctgttgagtttagtccatcttctgcttctgatttttcccctttagctaggtaa

SEQ ID NO: 97476 - protein, 888 aa, Arabidopsis thaliana
  peptide (1)..(888): Ceres Seq. ID no. 12737662
  misc_feature (3)..(647): Homolog of NCBI NO: 25387105 NR Description: probable protein kinase [imported] - Arabidopsis >gi|9802789|gb|AAF99858.1|AC015448_8 Putative protein kinase
  misc_feature (627)..(888): Homolog of NCBI NO: 25387105 NR Description: probable protein kinase [imported] - Arabidopsis >gi|9802789|gb|AAF99858.1|AC015448_8 Putative protein kinase
  misc_feature (3)..(647): Homolog of NCBI NO: 15218056 NR Description: light repressible receptor protein kinase,
  misc_feature (627)..(888): Homolog of NCBI NO: 15218056 NR Description: light repressible receptor protein kinase,
  misc_feature (4)..(647): Homolog of NCBI NO: 25405505 NR Description: probable protein kinase [imported] - Arabidopsis >gi|9802788|gb|AAF99857.1|AC015448_7 Putative protein kinase
  misc_feature (668)..(888): Homolog of NCBI NO: 25405505 NR Description: probable protein kinase [imported] - Arabidopsis >gi|9802788|gb|AAF99857.1|AC015448_7 Putative protein kinase
  misc_feature (4)..(427): Homolog of NCBI NO: 15218054 NR Description: receptor-like protein kinase, putative; protein
  misc_feature (668)..(888): Homolog of NCBI NO: 15218054 NR Description: receptor-like protein kinase, putative; protein
  misc_feature (442)..(647): Homolog of NCBI NO: 15218054 NR Description: receptor-like protein kinase, putative; protein
  misc_feature (3)..(885): Homolog of NCBI NO: 25405508 NR Description: probable protein kinase [imported] - Arabidopsis >gi|9802791|gb|AAF99860.1|AC015448_10 Putative protein kinase
MRFLSFLIFVFAVLGLVQAQDQSGFISLDCGLVPTEITYVEKSTNITYRSDATYIDSGVPGKINEVYRTQFQQQIWALRSFPEGQRNCYNFSLTAKRKYLIRGTFIYGNYDGLNQLPSFDLYIGPNKWTSVSIPGVRNGSVSEMIHVLRQDHLQICLVKTGETTPFISSLELRPLNNNTYVTKSGSLIVVARLYFSPTPPFLRYDEDVHDRIWIPFLDNKNSLLSTELSVDTSNFYNVPQTVAKTAAVPLNATQPLKINWSLDDITSQSYIYMHFAEIENLEANETREFNITYNGGENWFSYFRPPKFRITTVYNPAAVSSLDGNFNFTFSMTGNSTHPPLINGLEIYQVLELPQLDTYQDEVSAMMNIKTIYGLSKRSSWQGDPCAPELYRWEVLTFGLSIRNLSGSNLSGTITSDISKLTHLRELDLSNNDLSGDIPFVFSDMKNLTLINLSGNKNLNRSVPETLQKRIDNKSLTLIRDETGKNSTNVVAIAASVASVFAVLVILAIVFVVIRKKQRTNEGPRSFTTGTVKSDARSSSSSIITKERKFTYSEVLKMTKNFERVLGKGGFGTVYHGNLDDTQVAVKMLSHSSAQGYKEFKAEVELLLRVHHRHLVGLVGYCDDGDNLALIYEYMEKGDLRENMSGKHFNLVESISLDSLKHSKPGTGKHSVNVLSWETRMQIAVEAAQGLEYLHNGCRPPMVHRDVKPTNILLNERSQAKLADFGLSRSFPVDGESHVMTVVAGTPGYLDPEYYRTNWLSEKSDVYSFGVVLLEIVTNQPVMNKNRERPHINEWVMFMLTNGDIKSIVDPKLNEDYDTNGVWKVVELALACVNPSSSRRPTMPHVVMELNECLALEIERKQGSQATYIKESVEFSPSSASDFSPLAR

SEQ ID NO: 97477 - protein, 745 aa, Arabidopsis thaliana
  peptide (1)..(745): Ceres Seq. ID no. 12737663
  misc_feature (1)..(504): Homolog of NCBI NO: 25387105 NR Description: probable protein kinase [imported] - Arabidopsis >gi|9802789|gb|AAF99858.1|AC015448_8 Putative protein kinase
  misc_feature (484)..(745): Homolog of NCBI NO: 25387105 NR Description: probable protein kinase [imported] - Arabidopsis >gi|9802789|gb|AAF99858.1|AC015448_8 Putative protein kinase
  misc_feature (1)..(504): Homolog of NCBI NO: 15218056 NR Description: light repressible receptor protein kinase,
  misc_feature (484)..(745): Homolog of NCBI NO: 15218056 NR Description: light repressible receptor protein kinase,
  misc_feature (1)..(504): Homolog of NCBI NO: 25405505 NR Description: probable protein kinase [imported] - Arabidopsis >gi|9802788|gb|AAF99857.1|AC015448_7 Putative protein kinase
  misc_feature (525)..(745): Homolog of NCBI NO: 25405505 NR Description: probable protein kinase [imported] - Arabidopsis >gi|9802788|gb|AAF99857.1|AC015448_7 Putative protein kinase
  misc_feature (1)..(284): Homolog of NCBI NO: 15218054 NR Description: receptor-like protein kinase, putative; protein
  misc_feature (525)..(745): Homolog of NCBI NO: 15218054 NR Description: receptor-like protein kinase, putative; protein
  misc_feature (299)..(504): Homolog of NCBI NO: 15218054 NR Description: receptor-like protein kinase, putative; protein
  misc_feature (1)..(742): Homolog of NCBI NO: 25405508 NR Description: probable protein kinase [imported] - Arabidopsis >gi|9802791|gb|AAF99860.1|AC015448_10 Putative protein kinase
MIHVLRQDHLQICLVKTGETTPFISSLELRPLNNNTYVTKSGSLIVVARLYFSPTPPFLRYDEDVHDRIWIPFLDNKNSLLSTELSVDTSNFYNVPQTVAKTAAVPLNATQPLKINWSLDDITSQSYIYMHFAEIENLEANETREFNITYNGGENWFSYFRPPKFRITTVYNPAAVSSLDGNFNFTFSMTGNSTHPPLINGLEIYQVLELPQLDTYQDEVSAMMNIKTIYGLSKRSSWQGDPCAPELYRWEVLTFGLSIRNLSGSNLSGTITSDISKLTHLRELDLSNNDLSGDIPFVFSDMKNLTLINLSGNKNLNRSVPETLQKRIDNKSLTLIRDETGKNSTNVVAIAASVASVFAVLVILAIVFVVIRKKQRTNEGPRSFTTGTVKSDARSSSSSIITKERKFTYSEVLKMTKNFERVLGKGGFGTVYHGNLDDTQVAVKMLSHSSAQGYKEFKAEVELLLRVHHRHLVGLVGYCDDGDNLALIYEYMEKGDLRENMSGKHFNLVESISLDSLKHSKPGTGKHSVNVLSWETRMQIAVEAAQGLEYLHNGCRPPMVHRDVKPTNILLNERSQAKLADFGLSRSFPVDGESHVMTVVAGTPGYLDPEYYRTNWLSEKSDVYSFGVVLLEIVTNQPVMNKNRERPHINEWVMFMLTNGDIKSIVDPKLNEDYDTNGVWKVVELALACVNPSSSRRPTMPHVVMELNECLALEIERKQGSQATYIKESVEFSPSSASDFSPLAR

SEQ ID NO: 97478 - protein, 616 aa, Arabidopsis thaliana
  peptide (1)..(616): Ceres Seq. ID no. 12737664
  misc_feature (1)..(375): Homolog of NCBI NO: 25387105 NR Description: probable protein kinase [imported] - Arabidopsis >gi|9802789|gb|AAF99858.1|AC015448_8 Putative protein kinase
  misc_feature (355)..(616): Homolog of NCBI NO: 25387105 NR Description: probable protein kinase [imported] - Arabidopsis >gi|9802789|gb|AAF99858.1|AC015448_8 Putative protein kinase
  misc_feature (1)..(375): Homolog of NCBI NO: 15218056 NR Description: light repressible receptor protein kinase,
  misc_feature (355)..(616): Homolog of NCBI NO: 15218056 NR Description: light repressible receptor protein kinase,
  misc_feature (1)..(375): Homolog of NCBI NO: 25405505 NR Description: probable protein kinase [imported] - Arabidopsis >gi|9802788|gb|AAF99857.1|AC015448_7 Putative protein kinase
  misc_feature (396)..(616): Homolog of NCBI NO: 25405505 NR Description: probable protein kinase [imported] - Arabidopsis >gi|9802788|gb|AAF99857.1|AC015448_7 Putative protein kinase
  misc_feature (1)..(155): Homolog of NCBI NO: 15218054 NR Description: receptor-like protein kinase, putative; protein
  misc_feature (396)..(616): Homolog of NCBI NO: 15218054 NR Description: receptor-like protein kinase, putative; protein
  misc_feature (170)..(375): Homolog of NCBI NO: 15218054 NR Description: receptor-like protein kinase, putative; protein
  misc_feature (1)..(613): Homolog of NCBI NO: 25405508 NR Description: probable protein kinase [imported] - Arabidopsis >gi|9802791|gb|AAF99860.1|AC015448_10 Putative protein kinase
MHFAEIENLEANETREFNITYNGGENWFSYFRPPKFRITTVYNPAAVSSLDGNFNFTFSMTGNSTHPPLINGLEIYQVLELPQLDTYQDEVSAMMNIKTIYGLSKRSSWQGDPCAPELYRWEVLTFGLSIRNLSGSNLSGTITSDISKLTHLRELDLSNNDLSGDIPFVFSDMKNLTLINLSGNKNLNRSVPETLQKRIDNKSLTLIRDETGKNSTNVVAIAASVASVFAVLVILAIVFVVIRKKQRTNEGPRSFTTGTVKSDARSSSSSIITKERKFTYSEVLKMTKNFERVLGKGGFGTVYHGNLDDTQVAVKMLSHSSAQGYKEFKAEVELLLRVHHRHLVGLVGYCDDGDNLALIYEYMEKGDLRENMSGKHFNLVESISLDSLKHSKPGTGKHSVNVLSWETRMQIAVEAAQGLEYLHNGCRPPMVHRDVKPTNILLNERSQAKLADFGLSRSFPVDGESHVMTVVAGTPGYLDPEYYRTNWLSEKSDVYSFGVVLLEIVTNQPVMNKNRERPHINEWVMFMLTNGDIKSIVDPKLNEDYDTNGVWKVVELALACVNPSSSRRPTMPHVVMELNECLALEIERKQGSQATYIKESVEFSPSSASDFSPLAR

SEQ ID NO: 97479 - DNA, 1953 bp, Arabidopsis thaliana
  misc_feature (1)..(1953): Ceres Seq. ID no. 12737671
  misc_feature: MA Experiment ID: 20000180 Result: Down-regulated in Transcription
  misc_feature: MA Experiment 20000180 PARAMETER Experiment Name: At_Germinating_Seeds_P Parameter: Age (hr) Value: 24 vs. 0
  misc_feature: MA Experiment 20000180 PARAMETER Experiment Name: At_Germinating_Seeds_P Parameter: Tissue Value: Germinating Seeds
  misc_feature: MA Experiment ID: 20000451 Result: Up-regulated in Transcription
  misc_feature: MA Experiment 20000451 PARAMETER Experiment Name: At_CS6879_Shoots-Roots_P Parameter: Age (day) Value: 14
  misc_feature: MA Experiment 20000451 PARAMETER Experiment Name: At_CS6879_Shoots-Roots_P Parameter: Organism Value: A. thaliana
  misc_feature: MA Experiment 20000451 PARAMETER Experiment Name: At_CS6879_Shoots-Roots_P Parameter: Plant Line Value: CS6879 vs. WS
  misc_feature: MA Experiment 20000451 PARAMETER Experiment Name: At_CS6879_Shoots-Roots_P Parameter: Tissue Value: Roots
atgaagcttctccgccgccgtttcttcaactccgtcaatacaatcaccagacctaaccgacgtcactatgccacaaagtatgtcgccaaagtcacttcatcatctccctccggccgatctctctccgccgaagtttctcttcctaatcctcttcccgccgacgtacgtggctaccctctacctcgccgtcatctaatctgccgagccacaaatctcatcaccggagcctctaatctctccgatgctttctctgatctctctgattacctctcttctctctcactctcactcacacccgacgaagcttcagagattctcaaatccctaaattcacctctcctcgccgtggaatttttcaaattagtcccttctctttgcccttactcacaaaatgaccctttcctttacaatcgtatcatcttaatcctctcaaggtcaaatcttccagacagattcgatcgtgttcgttcgattctcgattccatggtgaaatcaaacgtccatggaaacatatcaactgtgaatatcttaataggtttctttggtaacacggaagatttacaaatgtgtttaagattggtgaagaaatgggatttaaagatgaactctttcacttacaagtgtctccttcaagcttacttaagatctcgtgattattctaaagcttttgatgtgtattgtgagattagaagaggaggacataaacttgacatctttgcttacaatatgttgcttgatgctttagctaaagatgaaaaggcttgtcaagtttttgaagatatgaagaagaggcattgtagaagagatgagtatacttacacgattatgatcaggactatggggaggattgggaagtgtgatgaagctgttggtttatttaatgagatgattactgaagggcttacgcttaatgttgttggttataatactttgatgcaagttcttgcgaaaggcaaaatggttgataaggcgattcaggttttctctagaatggtggaaacgggttgtcggccgaatgagtatacgtatagtcttcttttgaatcttttagttgctgaaggtcagcttgtgaggttagatggagttgtggagatttcgaaaaggtatatgactcaggggatatattcttatttggttagaacgttgagcaagttagggcatgtaagtgaggctcacaggctgttttgtgatatgtggagcttccctgtgaaaggagagagagatagttacatgtcgatgcttgagagtttgtgtggtgcgggtaaaaccattgaagcgatagagatgttgagcaagattcatgagaaaggtgtggtaactgatactatgatgtataacactgtgttctcggcgctcgggaagctaaagcaaatatctcatattcatgatctctttgagaaaatgaaaaaggacggtccttctccggatatattcacctataatatacttatcgctagttttggccgggtaggagaagttgatgaggctattaacatatttgaggagcttgagaggagtgattgtaaacccgacattatttcttacaactctttgattaattgtttggggaagaacggtgatgttgatgaagcccatgtgagattcaaggagatgcaagaaaaaggattaaaccctgatgtggtcacatacagcactctgatggaatgttttgggaaaacagagagagtcgaaatggcgtatagtttgttcgaagagatgcttgttaaagggtgtcaaccaaacattgtaacgtacaacattttgcttgattgtctagagaagaacgggagaaccgcagaagcagttgatctatactcaaagatgaaacagcaaggactcacaccggattccattacctacactgtgcttgaacggttgcagtctgtctctcatggaaaatctcgtatccgtaggaagaatccgataacggggtgggttgtcagccctttgtag

SEQ ID NO: 97480 - protein, 650 aa, Arabidopsis thaliana
  peptide (1)..(650): Ceres Seq. ID no. 12737672
  misc_feature (373)..(407): Pfam Name: PPR repeat Pfam Description: PPR repeat
  misc_feature (86)..(623): Homolog of NCBI NO: 15242446 NR Description: putative protein; protein id: At5g39710.1
  misc_feature (78)..(623): Homolog of NCBI NO: 15231863 NR Description: putative protein; protein id: At3g53700.1, by cDNA: gi_15982930 [Arabidopsis thaliana]
  misc_feature (136)..(623): Homolog of NCBI NO: 15238505 NR Description: putative protein; protein id: At5g65560.1
  misc_feature (109)..(623): Homolog of NCBI NO: 15221635 NR Description: unknown protein; protein id: At1g62930.1
  misc_feature (109)..(623): Homolog of NCBI NO: 25404380 NR Description: hypothetical protein F16P17.7 [imported] - thaliana >gi|8493580|gb|AAF75803.1|AC011000_6 Contains weak to leaf protein from Ipomea nil gb|D85101 and contains a RepB
  misc_feature (70)..(623): Homolog of NCBI NO: 15239874 NR Description: putative protein; protein id: At5g12100.1 thaliana] >gi|9759377|dbj|BAB10028.1| to unknown protein [Arabidopsis thaliana]
  misc_feature (166)..(623): Homolog of NCBI NO: 15236546 NR Description: putative protein; protein id: At4g31850.1
  misc_feature (136)..(625): Homolog of NCBI NO: 15221549 NR Description: PPR-repeat protein; protein id: At1g62670.1
  misc_feature (116)..(636): Homolog of NCBI NO: 15233259 NR Description: hypothetical protein; protein id: At3g16010.1 thaliana] >gi|9294448|dbj|BAB02667.1|
  misc_feature (116)..(636): Homolog of NCBI NO: 28393724 NR Description: unknown protein [Arabidopsis thaliana]
MKLLRRRFFNSVNTITRPNRRHYATKYVAKVTSSSPSGRSLSAEVSLPNPLPADVRGYPLPRRHLICRATNLITGASNLSDAFSDLSDYLSSLSLSLTPDEASEILKSLNSPLLAVEFFKLVPSLCPYSQNDPFLYNRIILILSRSNLPDRFDRVRSILDSMVKSNVHGNISTVNILIGFFGNTEDLQMCLRLVKKWDLKMNSFTYKCLLQAYLRSRDYSKAFDVYCEIRRGGHKLDIFAYNMLLDALAKDEKACQVFEDMKKRHCRRDEYTYTIMIRTMGRIGKCDEAVGLFNEMITEGLTLNVVGYNTLMQVLAKGKMVDKAIQVFSRMVETGCRPNEYTYSLLLNLLVAEGQLVRLDGVVEISKRYMTQGIYSYLVRTLSKLGHVSEAHRLFCDMWSFPVKGERDSYMSMLESLCGAGKTIEAIEMLSKIHEKGVVTDTMMYNTVFSALGKLKQISHIHDLFEKMKKDGPSPDIFTYNILIASFGRVGEVDEAINIFEELERSDCKPDIISYNSLINCLGKNGDVDEAHVRFKEMQEKGLNPDVVTYSTLMECFGKTERVEMAYSLFEEMLVKGCQPNIVTYNILLDCLEKNGRTAEAVDLYSKMKQQGLTPDSITYTVLERLQSVSHGKSRIRRKNPITGWVVSPL

SEQ ID NO: 97481 - protein, 489 aa, Arabidopsis thaliana
  peptide (1)..(489): Ceres Seq. ID no. 12737673
  misc_feature (212)..(246): Pfam Name: PPR repeat Pfam Description: PPR repeat
  misc_feature (1)..(462): Homolog of NCBI NO: 15242446 NR Description: putative protein; protein id: At5g39710.1
  misc_feature (1)..(462): Homolog of NCBI NO: 15231863 NR Description: putative protein; protein id: At3g53700.1, by cDNA: gi_15982930 [Arabidopsis thaliana]
  misc_feature (1)..(462): Homolog of NCBI NO: 15238505 NR Description: putative protein; protein id: At5g65560.1
  misc_feature (1)..(462): Homolog of NCBI NO: 15221635 NR Description: unknown protein; protein id: At1g62930.1
  misc_feature (1)..(462): Homolog of NCBI NO: 25404380 NR Description: hypothetical protein F16P17.7 [imported] - thaliana >gi|8493580|gb|AAF75803.1|AC011000_6 Contains weak to leaf protein from Ipomea nil gb|D85101 and contains a RepB
  misc_feature (1)..(462): Homolog of NCBI NO: 15239874 NR Description: putative protein; protein id: At5g12100.1 thaliana] >gi|9759377|dbj|BAB10028.1| to unknown protein [Arabidopsis thaliana]
  misc_feature (5)..(462): Homolog of NCBI NO: 15236546 NR Description: putative protein; protein id: At4g31850.1
  misc_feature (1)..(464): Homolog of NCBI NO: 15221549 NR Description: PPR-repeat protein; protein id: At1g62670.1
  misc_feature (1)..(475): Homolog of NCBI NO: 15233259 NR Description: hypothetical protein; protein id: At3g16010.1 thaliana] >gi|9294448|dbj|BAB02667.1|
  misc_feature (1)..(475): Homolog of NCBI NO: 28393724 NR Description: unknown protein [Arabidopsis thaliana]
MVKSNVHGNISTVNILIGFFGNTEDLQMCLRLVKKWDLKMNSFTYKCLLQAYLRSRDYSKAFDVYCEIRRGGHKLDIFAYNMLLDALAKDEKACQVFEDMKKRHCRRDEYTYTIMIRTMGRIGKCDEAVGLFNEMITEGLTLNVVGYNTLMQVLAKGKMVDKAIQVFSRMVETGCRPNEYTYSLLLNLLVAEGQLVRLDGVVEISKRYMTQGIYSYLVRTLSKLGHVSEAHRLFCDMWSFPVKGERDSYMSMLESLCGAGKTIEAIEMLSKIHEKGVVTDTMMYNTVFSALGKLKQISHIHDLFEKMKKDGPSPDIFTYNILIASFGRVGEVDEAINIFEELERSDCKPDIISYNSLINCLGKNGDVDEAHVRFKEMQEKGLNPDVVTYSTLMECFGKTERVEMAYSLFEEMLVKGCQPNIVTYNILLDCLEKNGRTAEAVDLYSKMKQQGLTPDSITYTVLERLQSVSHGKSRIRRKNPITGWVVSPL

SEQ ID NO: 97482 - protein, 462 aa, Arabidopsis thaliana
  peptide (1)..(462): Ceres Seq. ID no. 12737674
  misc_feature (185)..(219): Pfam Name: PPR repeat Pfam Description: PPR repeat
  misc_feature (1)..(435): Homolog of NCBI NO: 15242446 NR Description: putative protein; protein id: At5g39710.1
  misc_feature (1)..(435): Homolog of NCBI NO: 15231863 NR Description: putative protein; protein id: At3g53700.1, by cDNA: gi_15982930 [Arabidopsis thaliana]
  misc_feature (1)..(435): Homolog of NCBI NO: 15238505 NR Description: putative protein; protein id: At5g65560.1
  misc_feature (1)..(435): Homolog of NCBI NO: 15221635 NR Description: unknown protein; protein id: At1g62930.1
  misc_feature (1)..(435): Homolog of NCBI NO: 25404380 NR Description: hypothetical protein F16P17.7 [imported] - thaliana >gi|8493580|gb|AAF75803.1|AC011000_6 Contains weak to leaf protein from Ipomea nil gb|D85101 and contains a RepB
  misc_feature (1)..(435): Homolog of NCBI NO: 15239874 NR Description: putative protein; protein id: At5g12100.1 thaliana] >gi|9759377|dbj|BAB10028.1| to unknown protein [Arabidopsis thaliana]
  misc_feature (1)..(435): Homolog of NCBI NO: 15236546 NR Description: putative protein; protein id: At4g31850.1
  misc_feature (1)..(437): Homolog of NCBI NO: 15221549 NR Description: PPR-repeat protein; protein id: At1g62670.1
  misc_feature (1)..(448): Homolog of NCBI NO: 15233259 NR Description: hypothetical protein; protein id: At3g16010.1 thaliana] >gi|9294448|dbj|BAB02667.1|
  misc_feature (1)..(448): Homolog of NCBI NO: 28393724 NR Description: unknown protein [Arabidopsis thaliana]
MCLRLVKKWDLKMNSFTYKCLLQAYLRSRDYSKAFDVYCEIRRGGHKLDIFAYNMLLDALAKDEKACQVFEDMKKRHCRRDEYTYTIMIRTMGRIGKCDEAVGLFNEMITEGLTLNVVGYNTLMQVLAKGKMVDKAIQVFSRMVETGCRPNEYTYSLLLNLLVAEGQLVRLDGVVEISKRYMTQGIYSYLVRTLSKLGHVSEAHRLFCDMWSFPVKGERDSYMSMLESLCGAGKTIEAIEMLSKIHEKGVVTDTMMYNTVFSALGKLKQISHIHDLFEKMKKDGPSPDIFTYNILIASFGRVGEVDEAINIFEELERSDCKPDIISYNSLINCLGKNGDVDEAHVRFKEMQEKGLNPDVVTYSTLMECFGKTERVEMAYSLFEEMLVKGCQPNIVTYNILLDCLEKNGRTAEAVDLYSKMKQQGLTPDSITYTVLERLQSVSHGKSRIRRKNPITGWVVSPL

SEQ ID NO: 97483 - DNA, 1620 bp, Arabidopsis thaliana
  misc_feature (1)..(1620): Ceres Seq. ID no. 12737701
  misc_feature: MA Experiment ID: 20000180 Result: Up-regulated in Transcription
  misc_feature: MA Experiment 20000180 PARAMETER Experiment Name: At_Germinating_Seeds_P Parameter: Age (hr) Value: 24 vs. 0
  misc_feature: MA Experiment 20000180 PARAMETER Experiment Name: At_Germinating_Seeds_P Parameter: Tissue Value: Germinating Seeds
  misc_feature: MA Experiment ID: 20000227 Result: Up-regulated in Transcription
  misc_feature: MA Experiment 20000227 PARAMETER Experiment Name: At_Root-Tips-vs-Tops_P Parameter: Tissue Value: Root Tips vs. Root Tops
  misc_feature: MA Experiment ID: 20001757 Result: Down-regulated in Transcription
  misc_feature: MA Experiment 20001757 PARAMETER Experiment Name: At_50mM_NH4NO3_L-to-H_P Parameter: Timepoint (hr) Value: 6
  misc_feature: MA Experiment 20001757 PARAMETER Experiment Name: At_50mM_NH4NO3_L-to-H_P Parameter: Tissue Value: Leaf
  misc_feature: MA Experiment 20001757 PARAMETER Experiment Name: At_50mM_NH4NO3_L-to-H_P Parameter: Treatment Value: 50mM NH4NO3 vs 100mM Mannitol
  misc_feature: MA Experiment ID: 20001910 Result: Up-regulated in Transcription
  misc_feature: MA Experiment 20001910 PARAMETER Experiment Name: At_Drought_Reproduction_P Parameter: Age (day) Value: 37
  misc_feature: MA Experiment 20001910 PARAMETER Experiment Name: At_Drought_Reproduction_P Parameter: Organism Value: A. thaliana
  misc_feature: MA Experiment 20001910 PARAMETER Experiment Name: At_Drought_Reproduction_P Parameter: Plant Line Value: WS
  misc_feature: MA Experiment 20001910 PARAMETER Experiment Name: At_Drought_Reproduction_P Parameter: Timepoint (day) Value: 7
  misc_feature: MA Experiment 20001910 PARAMETER Experiment Name: At_Drought_Reproduction_P Parameter: Tissue Value: Flowers
  misc_feature: MA Experiment 20001910 PARAMETER Experiment Name: At_Drought_Reproduction_P Parameter: Treatment Value: Drought vs. No Drought
atggagcaagaacaagagacttacaaatcaagattgtttcatttcaagaacatgaacgaaaactcagcttcaagacatgttaaaagctggagctcagattgtgcaatgagaatggatggttctgacaatttggatgatgatgataatgacatgatgatgtttaggagtcaacccggaaaatgtggcagcgttgaccgaccttctttgcctataggcggagtaacgcctaatcgcaatgacaagcttccgagagtctcttcatcggattccatggaggcactaataatattgcaagcagcaatggagcaaatgaaagagaaattttcgaaattgcttcttggagaagatatgtcaggaggaggaaaaggtgtttcatcggctttggctttatctaacgccattaccaatctcgcagcgtctgcgtttggagaacaacggcgtttagagccaatggcggtggatagaaaaacgcgttggaggagagaaattggatggcttatctctgtggctgattatatagttgaattcgctccaacacaacaaacaaacaaagatggtacttcaatggaagtcatgtcaacaagacaaagaacagatcttctctgtaacatccctgcacttaagaaactcgatgctatgcttctcgattgtcttgataaattcaaggatcaggatgagttttattatgttaaaaaagattctcctgattcttgcgagacaaggaacgatgagaaatggtggttaccggcagtaaaagtcccacctaacggcctctcagagatatcaagaaggtttctacagagccagaaggaatgtgtgaatcaagtccttaaagctgcaatggcgataaacgctcaagttctgtctgaaatggagattcctgaaagctaccttgagtcacttcctaagaatgggagagctagcttgggagatgtgatatacagaatgataacagtagagatgtttgatgcagatcaattcctaattgaaatggatttatcatctgagcacaagattcttgatctaaagaacagaatcgaagcatcgattgtgatatggaagaggaaaatggtgcagaaggacacaaagtctccttggggatcaacagtgagtattgagaaaagagaacagtttgaagaaagagctgaaaccatcttgctactattaaaacaagggtttcccggaatctcacagtcctcgctcgatatcagcaagattcaattcaacagagatgtaggacttgcgatattggagagttattcaagagtgcttgagagtttagctcacaccgtgatgtcgagaatagaagacgtgctttacgctgatcagcttactcaagaacctacaaataatgcaccttctaagaacagatatagcttgaaggagaatgagaaactaagagaggaaagactaagtttcacagaggatatggcttcaggaacactttctgatgttatgcaatggggtaacaaaaacaatgaaatgaagaaagaaagctttttcggagatagagagaaaccgttgttgtcgaaagtcacaggtataatgactaacaacaagaagagttcttatcttgataatcttggagctatgaggagtccaaccgcaagatactcctga

SEQ ID NO: 97484 - protein, 539 aa, Arabidopsis thaliana
  peptide (1)..(539): Ceres Seq. ID no. 12737702
  misc_feature (36)..(449): Pfam Name: Domain of unknown function (DUF315) Pfam Description: Domain of unknown function (DUF315)
  misc_feature (1)..(539): Homolog of NCBI NO: 25349303 NR Description: unknown protein [imported] - Arabidopsis thaliana
  misc_feature (1)..(410): Homolog of NCBI NO: 30695174 NR Description: expressed protein [Arabidopsis thaliana]
  misc_feature (2)..(538): Homolog of NCBI NO: 15220004 NR Description: hypothetical protein; protein id: At1g79860.1
  misc_feature (101)..(539): Homolog of NCBI NO: 9294460 NR Description: gb|AAF29411.1~gene_id:MSL1.17~strong similarity
  misc_feature (101)..(539): Homolog of NCBI NO: 15233289 NR Description: unknown protein; protein id: At3g16130.1
  misc_feature (98)..(538): Homolog of NCBI NO: 15230137 NR Description: hypothetical protein; protein id: At3g24620.1 thaliana] >gi|9294058|dbj|BAB02015.1|
  misc_feature (53)..(538): Homolog of NCBI NO: 15235630 NR Description: putative protein; protein id: At4g13240.1
  misc_feature (101)..(538): Homolog of NCBI NO: 34909732 NR Description: contains EST AU069857(E4450)~similar to
  misc_feature (101)..(538): Homolog of NCBI NO: 15239773 NR Description: putative protein; protein id: At5g19560.1
  misc_feature (70)..(529): Homolog of NCBI NO: 34911076 NR Description: P0485G01.25 [Oryza sativa (japonica
MEQEQETYKSRLFHFKNMNENSASRHVKSWSSDCAMRMDGSDNLDDDDNDMMMFRSQPGKCGSVDRPSLPIGGVTPNRNDKLPRVSSSDSMEALIILQAAMEQMKEKFSKLLLGEDMSGGGKGVSSALALSNAITNLAASAFGEQRRLEPMAVDRKTRWRREIGWLISVADYIVEFAPTQQTNKDGTSMEVMSTRQRTDLLCNIPALKKLDAMLLDCLDKFKDQDEFYYVKKDSPDSCETRNDEKWWLPAVKVPPNGLSEISRRFLQSQKECVNQVLKAAMAINAQVLSEMEIPESYLESLPKNGRASLGDVIYRMITVEMFDADQFLIEMDLSSEHKILDLKNRIEASIVIWKRKMVQKDTKSPWGSTVSIEKREQFEERAETILLLLKQGFPGISQSSLDISKIQFNRDVGLAILESYSRVLESLAHTVMSRIEDVLYADQLTQEPTNNAPSKNRYSLKENEKLREERLSFTEDMASGTLSDVMQWGNKNNEMKKESFFGDREKPLLSKVTGIMTNNKKSSYLDNLGAMRSPTARYS

SEQ ID NO: 97485 - protein, 522 aa, Arabidopsis thaliana
  peptide (1)..(522): Ceres Seq. ID no. 12737703
  misc_feature (19)..(432): Pfam Name: Domain of unknown function (DUF315) Pfam Description: Domain of unknown function (DUF315)
  misc_feature (1)..(522): Homolog of NCBI NO: 25349303 NR Description: unknown protein [imported] - Arabidopsis thaliana
  misc_feature (1)..(393): Homolog of NCBI NO: 30695174 NR Description: expressed protein [Arabidopsis thaliana]
  misc_feature (1)..(521): Homolog of NCBI NO: 15220004 NR Description: hypothetical protein; protein id: At1g79860.1
  misc_feature (84)..(522): Homolog of NCBI NO: 9294460 NR Description: gb|AAF29411.1~gene_id:MSL1.17~strong similarity
  misc_feature (84)..(522): Homolog of NCBI NO: 15233289 NR Description: unknown protein; protein id: At3g16130.1
  misc_feature (81)..(521): Homolog of NCBI NO: 15230137 NR Description: hypothetical protein; protein id: At3g24620.1 thaliana] >gi|9294058|dbj|BAB02015.1|
  misc_feature (36)..(521): Homolog of NCBI NO: 15235630 NR Description: putative protein; protein id: At4g13240.1
  misc_feature (84)..(521): Homolog of NCBI NO: 34909732 NR Description: contains EST AU069857(E4450)~similar to
  misc_feature (84)..(521): Homolog of NCBI NO: 15239773 NR Description: putative protein; protein id: At5g19560.1
  misc_feature (53)..(512): Homolog of NCBI NO: 34911076 NR Description: P0485G01.25 [Oryza sativa (japonica
MNENSASRHVKSWSSDCAMRMDGSDNLDDDDNDMMMFRSQPGKCGSVDRPSLPIGGVTPNRNDKLPRVSSSDSMEALIILQAAMEQMKEKFSKLLLGEDMSGGGKGVSSALALSNAITNLAASAFGEQRRLEPMAVDRKTRWRREIGWLISVADYIVEFAPTQQTNKDGTSMEVMSTRQRTDLLCNIPALKKLDAMLLDCLDKFKDQDEFYYVKKDSPDSCETRNDEKWWLPAVKVPPNGLSEISRRFLQSQKECVNQVLKAAMAINAQVLSEMEIPESYLESLPKNGRASLGDVIYRMITVEMFDADQFLIEMDLSSEHKILDLKNRIEASIVIWKRKMVQKDTKSPWGSTVSIEKREQFEERAETILLLLKQGFPGISQSSLDISKIQFNRDVGLAILESYSRVLESLAHTVMSRIEDVLYADQLTQEPTNNAPSKNRYSLKENEKLREERLSFTEDMASGTLSDVMQWGNKNNEMKKESFFGDREKPLLSKVTGIMTNNKKSSYLDNLGAMRSPTARYS

SEQ ID NO: 97486 - protein, 504 aa, Arabidopsis thaliana
  peptide (1)..(504): Ceres Seq. ID no. 12737704
  misc_feature (1)..(414): Pfam Name: Domain of unknown function (DUF315) Pfam Description: Domain of unknown function (DUF315)
  misc_feature (1)..(504): Homolog of NCBI NO: 25349303 NR Description: unknown protein [imported] - Arabidopsis thaliana
  misc_feature (1)..(375): Homolog of NCBI NO: 30695174 NR Description: expressed protein [Arabidopsis thaliana]
  misc_feature (1)..(503): Homolog of NCBI NO: 15220004 NR Description: hypothetical protein; protein id: At1g79860.1
  misc_feature (66)..(504): Homolog of NCBI NO: 9294460 NR Description: gb|AAF29411.1~gene_id:MSL1.17~strong similarity
  misc_feature (66)..(504): Homolog of NCBI NO: 15233289 NR Description: unknown protein; protein id: At3g16130.1
  misc_feature (63)..(503): Homolog of NCBI NO: 15230137 NR Description: hypothetical protein; protein id: At3g24620.1 thaliana] >gi|9294058|dbj|BAB02015.1|
  misc_feature (18)..(503): Homolog of NCBI NO: 15235630 NR Description: putative protein; protein id: At4g13240.1
  misc_feature (66)..(503): Homolog of NCBI NO: 34909732 NR Description: contains EST AU069857(E4450)~similar to
  misc_feature (66)..(503): Homolog of NCBI NO: 15239773 NR Description: putative protein; protein id: At5g19560.1
  misc_feature (35)..(494): Homolog of NCBI NO: 34911076 NR Description: P0485G01.25 [Oryza sativa (japonica
MRMDGSDNLDDDDNDMMMFRSQPGKCGSVDRPSLPIGGVTPNRNDKLPRVSSSDSMEALIILQAAMEQMKEKFSKLLLGEDMSGGGKGVSSALALSNAITNLAASAFGEQRRLEPMAVDRKTRWRREIGWLISVADYIVEFAPTQQTNKDGTSMEVMSTRQRTDLLCNIPALKKLDAMLLDCLDKFKDQDEFYYVKKDSPDSCETRNDEKWWLPAVKVPPNGLSEISRRFLQSQKECVNQVLKAAMAINAQVLSEMEIPESYLESLPKNGRASLGDVIYRMITVEMFDADQFLIEMDLSSEHKILDLKNRIEASIVIWKRKMVQKDTKSPWGSTVSIEKREQFEERAETILLLLKQGFPGISQSSLDISKIQFNRDVGLAILESYSRVLESLAHTVMSRIEDVLYADQLTQEPTNNAPSKNRYSLKENEKLREERLSFTEDMASGTLSDVMQWGNKNNEMKKESFFGDREKPLLSKVTGIMTNNKKSSYLDNLGAMRSPTARYS

SEQ ID NO: 97487 - DNA, 930 bp, Arabidopsis thaliana
  misc_feature (1)..(930): Ceres Seq. ID no. 12737781
  misc_feature: MA Experiment ID: 20000794 Result: Up-regulated in Transcription
  misc_feature: MA Experiment 20000794 PARAMETER Experiment Name: At_Petals_P Parameter: Age (day) Value: 23-25 days
  misc_feature: MA Experiment 20000794 PARAMETER Experiment Name: At_Petals_P Parameter: Plant Line Value: WS
  misc_feature: MA Experiment 20000794 PARAMETER Experiment Name: At_Petals_P Parameter: Tissue Value: Petals vs. Whole plant
  misc_feature: MA Experiment ID: 20001451 Result: Up-regulated in Transcription
  misc_feature: MA Experiment 20001451 PARAMETER Experiment Name: At_Far-red-induction_P Parameter: Age (day) Value: 7
  misc_feature: MA Experiment 20001451 PARAMETER Experiment Name: At_Far-red-induction_P Parameter: Light Value: Far-red vs. White
  misc_feature: MA Experiment 20001451 PARAMETER Experiment Name: At_Far-red-induction_P Parameter: Organism Value: A. thaliana
  misc_feature: MA Experiment 20001451 PARAMETER Experiment Name: At_Far-red-induction_P Parameter: Plant Line Value: Columbia
  misc_feature: MA Experiment 20001451 PARAMETER Experiment Name: At_Far-red-induction_P Parameter: Timepoint (hr) Value: 24
  misc_feature: MA Experiment 20001451 PARAMETER Experiment Name: At_Far-red-induction_P Parameter: Tissue Value: Whole Plant
atggggaagagaccgccgattccaccagatatcgaaaacggaccaccaccaccagcgcgaccacattttcgcccgcccattcccgtgccatgggttgcgtggcttgtgcctctcattttagcagccaacttcgtcacattcgctaccaccatgtatgtgaacgattgccctgcaagatcagatgagtgtctcttatttgatgtccttggaaggctttcgtttcaaccgattaaggagaatatgctactcggtccttctattcccacgctgagaaaactcggagctctcgaaaggagacttgtggaggaaggtgagagatggcgtctcatctcttgcatatggcttcatggtggtttccttcacttgatggctaacatgatcagcctcatgtgtatcggaatgcgccttgaacaagaatttggattcatgagaatcggagctttgtatgtgatctccgggcttggaggaagcctggtgtcttgcttaacagattcccaaggagaacgggtatcagtcggagcatctggtgctttgttcggattactcggtgcaatgctctcagagctcatcacaaactggacaatctatgaaaataagtgcaccgcacttatgacattaatcctgatcattgtactgaatctaagcgtcggattcttaccacgtgtggacaattctgctcattttggaggattcctagctggtttcttcctcgggttcgtccttcttctccgtccgcagtacggatacgtgaacccaaaatacattcctcctggttatgacatgaaacacaagaaatcaaaacacaagtgttatcaacacatcttcagatttacatctctagctatccttcttgcgggattcattgcgggatacactaagcttcttagagaacataccatacagagcatgccattcagagatttcaattag

SEQ ID NO: 97488 - protein, 309 aa, Arabidopsis thaliana
  peptide (1)..(309): Ceres Seq. ID no. 12737782
  misc_feature (1)..(309): Homolog of NCBI NO: 15219034 NR Description: membrane protein, putative; protein id:
  misc_feature (4)..(274): Homolog of NCBI NO: 34895778 NR Description: putative membrane protein [Oryza sativa (japonica group)] >gi|12328478|dbj|BAB21138.1| putative membrane protein
  misc_feature (31)..(296): Homolog of NCBI NO: 15221690 NR Description: membrane protein, putative; protein id: [Arabidopsis thaliana] >gi|25404407|pir||F96656 probable membrane
  misc_feature (31)..(296): Homolog of NCBI NO: 15240744 NR Description: membrane protein; protein id: At5g07250.1, by cDNA: gi_16648761, supported by cDNA: gi_20466142 [Arabidopsis
  misc_feature (31)..(294): Homolog of NCBI NO: 30693911 NR Description: membrane protein, Rhomboid family [Arabidopsis
  misc_feature (31)..(296): Homolog of NCBI NO: 294845 NR Description: membrane protein [Saccharum hybrid cultivar
  misc_feature (34)..(296): Homolog of NCBI NO: 38344377 NR Description: OSJNBb0032E06.11 [Oryza sativa (japonica
  misc_feature (31)..(294): Homolog of NCBI NO: 11357824 NR Description: hypothetical protein F5K20.80 - Arabidopsis >gi|7629998|emb|CAB88340.1| putative protein [Arabidopsis
  misc_feature (31)..(296): Homolog of NCBI NO: 37536172 NR Description: putative membrane protein [Oryza sativa (japonica group)] >gi|22122915|gb|AAM92298.1| putative membrane protein
  misc_feature (31)..(296): Homolog of NCBI NO: 15236387 NR Description: putative membrane protein; protein id: At4g23070.1
MGKRPPIPPDIENGPPPPARPHFRPPIPVPWVAWLVPLILAANFVTFATTMYVNDCPARSDECLLFDVLGRLSFQPIKENMLLGPSIPTLRKLGALERRLVEEGERWRLISCIWLHGGFLHLMANMISLMCIGMRLEQEFGFMRIGALYVISGLGGSLVSCLTDSQGERVSVGASGALFGLLGAMLSELITNWTIYENKCTALMTLILIIVLNLSVGFLPRVDNSAHFGGFLAGFFLGFVLLLRPQYGYVNPKYIPPGYDMKHKKSKHKCYQHIFRFTSLAILLAGFIAGYTKLLREHTIQSMPFRDFN

SEQ ID NO: 97489 - protein, 259 aa, Arabidopsis thaliana
  peptide (1)..(259): Ceres Seq. ID no. 12737783
  misc_feature (1)..(259): Homolog of NCBI NO: 15219034 NR Description: membrane protein, putative; protein id:
  misc_feature (1)..(224): Homolog of NCBI NO: 34895778 NR Description: putative membrane protein [Oryza sativa (japonica group)] >gi|12328478|dbj|BAB21138.1| putative membrane protein
  misc_feature (1)..(246): Homolog of NCBI NO: 15221690 NR Description: membrane protein, putative; protein id: [Arabidopsis thaliana] >gi|25404407|pir||F96656 probable membrane
  misc_feature (1)..(246): Homolog of NCBI NO: 15240744 NR Description: membrane protein; protein id: At5g07250.1, by cDNA: gi_16648761, supported by cDNA: gi_20466142 [Arabidopsis
  misc_feature (1)..(244): Homolog of NCBI NO: 30693911 NR Description: membrane protein, Rhomboid family [Arabidopsis
  misc_feature (1)..(246): Homolog of NCBI NO: 294845 NR Description: membrane protein [Saccharum hybrid cultivar
  misc_feature (1)..(246): Homolog of NCBI NO: 38344377 NR Description: OSJNBb0032E06.11 [Oryza sativa (japonica
  misc_feature (1)..(244): Homolog of NCBI NO: 11357824 NR Description: hypothetical protein F5K20.80 - Arabidopsis >gi|7629998|emb|CAB88340.1| putative protein [Arabidopsis
  misc_feature (1)..(246): Homolog of NCBI NO: 37536172 NR Description: putative membrane protein [Oryza sativa (japonica group)] >gi|22122915|gb|AAM92298.1| putative membrane protein
  misc_feature (1)..(246): Homolog of NCBI NO: 15236387 NR Description: putative membrane protein; protein id: At4g23070.1
MYVNDCPARSDECLLFDVLGRLSFQPIKENMLLGPSIPTLRKLGALERRLVEEGERWRLISCIWLHGGFLHLMANMISLMCIGMRLEQEFGFMRIGALYVISGLGGSLVSCLTDSQGERVSVGASGALFGLLGAMLSELITNWTIYENKCTALMTLILIIVLNLSVGFLPRVDNSAHFGGFLAGFFLGFVLLLRPQYGYVNPKYIPPGYDMKHKKSKHKCYQHIFRFTSLAILLAGFIAGYTKLLREHTIQSMPFRDFN

SEQ ID NO: 97490 - protein, 229 aa, Arabidopsis thaliana
  peptide (1)..(229): Ceres Seq. ID no. 12737784
  misc_feature (1)..(229): Homolog of NCBI NO: 15219034 NR Description: membrane protein, putative; protein id:
  misc_feature (1)..(194): Homolog of NCBI NO: 34895778 NR Description: putative membrane protein [Oryza sativa (japonica group)] >gi|12328478|dbj|BAB21138.1| putative membrane protein
  misc_feature (1)..(216): Homolog of NCBI NO: 15221690 NR Description: membrane protein, putative; protein id: [Arabidopsis thaliana] >gi|25404407|pir||F96656 probable membrane
  misc_feature (1)..(216): Homolog of NCBI NO: 15240744 NR Description: membrane protein; protein id: At5g07250.1, by cDNA: gi_16648761, supported by cDNA: gi_20466142 [Arabidopsis
  misc_feature (1)..(214): Homolog of NCBI NO: 30693911 NR Description: membrane protein, Rhomboid family [Arabidopsis
  misc_feature (1)..(216): Homolog of NCBI NO: 294845 NR Description: membrane protein [Saccharum hybrid cultivar
  misc_feature (1)..(216): Homolog of NCBI NO: 38344377 NR Description: OSJNBb0032E06.11 [Oryza sativa (japonica
  misc_feature (1)..(214): Homolog of NCBI NO: 11357824 NR Description: hypothetical protein F5K20.80 - Arabidopsis >gi|7629998|emb|CAB88340.1| putative protein [Arabidopsis
  misc_feature (1)..(216): Homolog of NCBI NO: 37536172 NR Description: putative membrane protein [Oryza sativa (japonica group)] >gi|22122915|gb|AAM92298.1| putative membrane protein
  misc_feature (1)..(216): Homolog of NCBI NO: 15236387 NR Description: putative membrane protein; protein id: At4g23070.1
MLLGPSIPTLRKLGALERRLVEEGERWRLISCIWLHGGFLHLMANMISLMCIGMRLEQEFGFMRIGALYVISGLGGSLVSCLTDSQGERVSVGASGALFGLLGAMLSELITNWTIYENKCTALMTLILIIVLNLSVGFLPRVDNSAHFGGFLAGFFLGFVLLLRPQYGYVNPKYIPPGYDMKHKKSKHKCYQHIFRFTSLAILLAGFIAGYTKLLREHTIQSMPFRDFN

SEQ ID NO: 97491 - DNA, 1961 bp, Arabidopsis thaliana
  misc_feature (1)..(1961): Ceres Seq. ID no. 12737805
  misc_feature: MA Experiment ID: 20000347 Result: Down-regulated in Transcription
  misc_feature: MA Experiment 20000347 PARAMETER Experiment Name: At_2mM_SA_Sub_P Parameter: Age (day) Value: 14
  misc_feature: MA Experiment 20000347 PARAMETER Experiment Name: At_2mM_SA_Sub_P Parameter: Organism Value: A. thaliana
  misc_feature: MA Experiment 20000347 PARAMETER Experiment Name: At_2mM_SA_Sub_P Parameter: Plant Line Value: WS
  misc_feature: MA Experiment 20000347 PARAMETER Experiment Name: At_2mM_SA_Sub_P Parameter: Timepoint (hr) Value: 6
  misc_feature: MA Experiment 20000347 PARAMETER Experiment Name: At_2mM_SA_Sub_P Parameter: Tissue Value: Aerial
  misc_feature: MA Experiment 20000347 PARAMETER Experiment Name: At_2mM_SA_Sub_P Parameter: Treatment Value: 2mM SA vs. No Treatment
attgaaacaggtctctcttggttatgtgaagacacaagattagcttatggtctgtatcttgaaacagtaatgttatcttcctttggagggattcttcttcttttggttaaaacttgtgttttcactgtgaattctactcttgaggaggctaaggtctatcacctcaagatctcatggggaatgccggttttgttactatcttctgcggttttcggtctagctcatgtcgtggtagcttatcgaaaaagctgtggagcaagaaggaagctaatgtaccacaagattgaccaagaagctgttctctcatgtaaatcgggtttttctggttacaagaaggctcatcgtcaatctttcactcgatcaaactgcaaaatattaacttttgccggtgaatttagacaaaaatctttcaggggaacatctttggatagagaagagctgctacaaccaagactacttgcaaatgcagacagtttattcatcaagattcaaggcttatatgtccattacaagcagcgtacctcaccgtctgtatcttccttcgttattataagcgattctgcagcggagatgaatgcgagaagatcaagactattagacaagcagatgtcaaacttaacctcccaaactcagaacagtcattttcatcgaagctacactattcagcccgatagatcatcgttatatgatcctctcttagctagtcacaacactacacccattagcttgtttgataaggatggtgtgaatcaaataaattctatcaaactcggggacgatatggaaaaggatgagaatactggtatagttctagtccatggatttggaggaggagttttctcatggaggcatgtaatgggagagttgtctcttcagctcggttgcagagtcgttgcttatgaccggcctggttggggattaacctctagacttatccggaaagattgggagaagagaaatctagctaacccttacaagcttgaaagccaagttgatctactactttcattttgttctgagatggggttttcttcggtgatactcgttggccatgacgatggtggtttacttgctctcaaggccgctgaaagaatgcaagcatctacctcgaaacacaatatcacaatcaaaggggtggttttgataaacgttagcttatcaagagaagtagttcctgcctttgcaaggatactacttcatacttcacttaggaagaagcacttggtccgtcctttattgcgaaccgagattacccaattggtgaaccggcgtgcatggtgtgacaccaccaagctaactactgatatcacaatgctgtacaaggctcctctgtgtttagaagcttgggatgaagcactcaatgagataagcaagttatcatatgagatgatactttcacctcaaaacgcatcagctcttgtaaaatccataggagatcttccagttttagttgttgccggagctgaagatgctcttgttcctttgaaatcttcacaagttctggcttcaaaactcactaattctagactagtagagatctctggttgcggccatctgccacacgaggagtgtcctacaacacttgtttccgctctcggctccttcatttgcagactgatacctaaactaccaaactcctaaaaccacacaagaccatctcaaagaagagtttgatggaaacatctgcgagaacatcaggagctctctacacaagaatacgatttttcgtggttccatccatcagcgtaaatcaggcatcagtgtattcttaaagggattaaaactcccaccagatttgctacaaagaactttgcttcagaatcacatcgacgtcaactaggccaagtgaatattatcagcctaattttcttaaacacaaacctgtgatttttacttatgtatgatgtatatatgaattctatttagagataatacaaatccttcccaatgaatttgctttc

SEQ ID NO: 97492 - protein, 546 aa, Arabidopsis thaliana
  peptide (1)..(546): Ceres Seq. ID no. 12737806
  misc_feature (295)..(534): Pfam Name: alpha/beta hydrolase fold Pfam Description: alpha/beta hydrolase fold
  misc_feature (5)..(546): Homolog of NCBI NO: 25405595 NR Description: unknown protein, 18223-15857 [imported] -
  misc_feature (24)..(546): Homolog of NCBI NO: 22330208 NR Description: unknown protein; protein id: At1g52750.1, by cDNA: gi_19310417 [Arabidopsis thaliana] At1g52750/F14G24_2 [Arabidopsis thaliana]
  misc_feature (7)..(540): Homolog of NCBI NO: 15218212 NR Description: unknown protein; protein id: At1g15490.1, by cDNA: gi_17529297 [Arabidopsis thaliana] Contains PF|00561 alpha/beta hydrolase fold. [Arabidopsis
  misc_feature (54)..(540): Homolog of NCBI NO: 15220097 NR Description: unknown protein; protein id: At1g80280.1, by cDNA: gi_20466449 [Arabidopsis thaliana]
  misc_feature (7)..(540): Homolog of NCBI NO: 34911750 NR Description: P0038D11.18 [Oryza sativa (japonica
  misc_feature (8)..(247): Homolog of NCBI NO: 15220097 NR Description: unknown protein; protein id: At1g80280.1, by cDNA: gi_20466449 [Arabidopsis thaliana]
  misc_feature (376)..(536): Homolog of NCBI NO: 6630546 NR Description: putative alpha/beta hydrolase [Arabidopsis
  misc_feature (269)..(361): Homolog of NCBI NO: 6630546 NR Description: putative alpha/beta hydrolase [Arabidopsis
  misc_feature (376)..(536): Homolog of NCBI NO: 30681503 NR Description: hydrolase, alpha/beta fold family [Arabidopsis >gi|26450364|dbj|BAC42298.1| putative alpha/beta hydrolase
  misc_feature (269)..(361): Homolog of NCBI NO: 30681503 NR Description: hydrolase, alpha/beta fold family [Arabidopsis >gi|26450364|dbj|BAC42298.1| putative alpha/beta hydrolase
IETGLSWLCEDTRLAYGLYLETVMLSSFGGILLLLVKTCVFTVNSTLEEAKVYHLKISWGMPVLLLSSAVFGLAHVVVAYRKSCGARRKLMYHKIDQEAVLSCKSGFSGYKKAHRQSFTRSNCKILTFAGEFRQKSFRGTSLDREELLQPRLLANADSLFIKIQGLYVHYKQRTSPSVSSFVIISDSAAEMNARRSRLLDKQMSNLTSQTQNSHFHRSYTIQPDRSSLYDPLLASHNTTPISLFDKDGVNQINSIKLGDDMEKDENTGIVLVHGFGGGVFSWRHVMGELSLQLGCRVVAYDRPGWGLTSRLIRKDWEKRNLANPYKLESQVDLLLSFCSEMGFSSVILVGHDDGGLLALKAAERMQASTSKHNITIKGVVLINVSLSREVVPAFARILLHTSLRKKHLVRPLLRTEITQLVNRRAWCDTTKLTTDITMLYKAPLCLEAWDEALNEISKLSYEMILSPQNASALVKSIGDLPVLVVAGAEDALVPLKSSQVLASKLTNSRLVEISGCGHLPHEECPTTLVSALGSFICRLIPKLPNS

SEQ ID NO: 97493 - protein, 523 aa, Arabidopsis thaliana
  peptide (1)..(523): Ceres Seq. ID no. 12737807
  misc_feature (272)..(511): Pfam Name: alpha/beta hydrolase fold Pfam Description: alpha/beta hydrolase fold
  misc_feature (1)..(523): Homolog of NCBI NO: 25405595 NR Description: unknown protein, 18223-15857 [imported] -
  misc_feature (1)..(523): Homolog of NCBI NO: 22330208 NR Description: unknown protein; protein id: At1g52750.1, by cDNA: gi_19310417 [Arabidopsis thaliana] At1g52750/F14G24_2 [Arabidopsis thaliana]
  misc_feature (1)..(517): Homolog of NCBI NO: 15218212 NR Description: unknown protein; protein id: At1g15490.1, by cDNA: gi_17529297 [Arabidopsis thaliana] Contains PF|00561 alpha/beta hydrolase fold. [Arabidopsis
  misc_feature (31)..(517): Homolog of NCBI NO: 15220097 NR Description: unknown protein; protein id: At1g80280.1, by cDNA: gi_20466449 [Arabidopsis thaliana]
  misc_feature (1)..(517): Homolog of NCBI NO: 34911750 NR Description: P0038D11.18 [Oryza sativa (japonica
  misc_feature (1)..(224): Homolog of NCBI NO: 15220097 NR Description: unknown protein; protein id: At1g80280.1, by cDNA: gi_20466449 [Arabidopsis thaliana]
  misc_feature (353)..(513): Homolog of NCBI NO: 6630546 NR Description: putative alpha/beta hydrolase [Arabidopsis
  misc_feature (246)..(338): Homolog of NCBI NO: 6630546 NR Description: putative alpha/beta hydrolase [Arabidopsis
  misc_feature (353)..(513): Homolog of NCBI NO: 30681503 NR Description: hydrolase, alpha/beta fold family [Arabidopsis >gi|26450364|dbj|BAC42298.1| putative alpha/beta hydrolase
  misc_feature (246)..(338): Homolog of NCBI NO: 30681503 NR Description: hydrolase, alpha/beta fold family [Arabidopsis >gi|26450364|dbj|BAC42298.1| putative alpha/beta hydrolase
MLSSFGGILLLLVKTCVFTVNSTLEEAKVYHLKISWGMPVLLLSSAVFGLAHVVVAYRKSCGARRKLMYHKIDQEAVLSCKSGFSGYKKAHRQSFTRSNCKILTFAGEFRQKSFRGTSLDREELLQPRLLANADSLFIKIQGLYVHYKQRTSPSVSSFVIISDSAAEMNARRSRLLDKQMSNLTSQTQNSHFHRSYTIQPDRSSLYDPLLASHNTTPISLFDKDGVNQINSIKLGDDMEKDENTGIVLVHGFGGGVFSWRHVMGELSLQLGCRVVAYDRPGWGLTSRLIRKDWEKRNLANPYKLESQVDLLLSFCSEMGFSSVILVGHDDGGLLALKAAERMQASTSKHNITIKGVVLINVSLSREVVPAFARILLHTSLRKKHLVRPLLRTEITQLVNRRAWCDTTKLTTDITMLYKAPLCLEAWDEALNEISKLSYEMILSPQNASALVKSIGDLPVLVVAGAEDALVPLKSSQVLASKLTNSRLVEISGCGHLPHEECPTTLVSALGSFICRLIPKLPNS

SEQ ID NO: 97494 - protein, 486 aa, Arabidopsis thaliana
  peptide (1)..(486): Ceres Seq. ID no. 12737808
  misc_feature (235)..(474): Pfam Name: alpha/beta hydrolase fold Pfam Description: alpha/beta hydrolase fold
  misc_feature (1)..(486): Homolog of NCBI NO: 25405595 NR Description: unknown protein, 18223-15857 [imported] -
  misc_feature (1)..(486): Homolog of NCBI NO: 22330208 NR Description: unknown protein; protein id: At1g52750.1, by cDNA: gi_19310417 [Arabidopsis thaliana] At1g52750/F14G24_2 [Arabidopsis thaliana]
  misc_feature (1)..(480): Homolog of NCBI NO: 15218212 NR Description: unknown protein; protein id: At1g15490.1, by cDNA: gi_17529297 [Arabidopsis thaliana] Contains PF|00561 alpha/beta hydrolase fold. [Arabidopsis
  misc_feature (1)..(480): Homolog of NCBI NO: 15220097 NR Description: unknown protein; protein id: At1g80280.1, by cDNA: gi_20466449 [Arabidopsis thaliana]
  misc_feature (1)..(480): Homolog of NCBI NO: 34911750 NR Description: P0038D11.18 [Oryza sativa (japonica
  misc_feature (1)..(187): Homolog of NCBI NO: 15220097 NR Description: unknown protein; protein id: At1g80280.1, by cDNA: gi_20466449 [Arabidopsis thaliana]
  misc_feature (316)..(476): Homolog of NCBI NO: 6630546 NR Description: putative alpha/beta hydrolase [Arabidopsis
  misc_feature (209)..(301): Homolog of NCBI NO: 6630546 NR Description: putative alpha/beta hydrolase [Arabidopsis
  misc_feature (316)..(476): Homolog of NCBI NO: 30681503 NR Description: hydrolase, alpha/beta fold family [Arabidopsis >gi|26450364|dbj|BAC42298.1| putative alpha/beta hydrolase
  misc_feature (209)..(301): Homolog of NCBI NO: 30681503 NR Description: hydrolase, alpha/beta fold family [Arabidopsis >gi|26450364|dbj|BAC42298.1| putative alpha/beta hydrolase
MPVLLLSSAVFGLAHVVVAYRKSCGARRKLMYHKIDQEAVLSCKSGFSGYKKAHRQSFTRSNCKILTFAGEFRQKSFRGTSLDREELLQPRLLANADSLFIKIQGLYVHYKQRTSPSVSSFVIISDSAAEMNARRSRLLDKQMSNLTSQTQNSHFHRSYTIQPDRSSLYDPLLASHNTTPISLFDKDGVNQINSIKLGDDMEKDENTGIVLVHGFGGGVFSWRHVMGELSLQLGCRVVAYDRPGWGLTSRLIRKDWEKRNLANPYKLESQVDLLLSFCSEMGFSSVILVGHDDGGLLALKAAERMQASTSKHNITIKGVVLINVSLSREVVPAFARILLHTSLRKKHLVRPLLRTEITQLVNRRAWCDTTKLTTDITMLYKAPLCLEAWDEALNEISKLSYEMILSPQNASALVKSIGDLPVLVVAGAEDALVPLKSSQVLASKLTNSRLVEISGCGHLPHEECPTTLVSALGSFICRLIPKLPNS

SEQ ID NO: 97495 - DNA, 2640 bp, Arabidopsis thaliana
  misc_feature (1)..(2640): Ceres Seq. ID no. 12737864
  misc_feature: MA Experiment ID: 20000180 Result: Up-regulated in Transcription
  misc_feature: MA Experiment 20000180 PARAMETER Experiment Name: At_Germinating_Seeds_P Parameter: Age (hr) Value: 24 vs. 0
  misc_feature: MA Experiment 20000180 PARAMETER Experiment Name: At_Germinating_Seeds_P Parameter: Tissue Value: Germinating Seeds
  misc_feature: MA Experiment ID: 20000438 Result: Up-regulated in Transcription
  misc_feature: MA Experiment 20000438 PARAMETER Experiment Name: At_Shoots__P Parameter: Age (day) Value: 14
  misc_feature: MA Experiment 20000438 PARAMETER Experiment Name: At_Shoots__P Parameter: Tissue Value: Shoots vs. Whole Plant
  misc_feature: MA Experiment ID: 20000794 Result: Up-regulated in Transcription
  misc_feature: MA Experiment 20000794 PARAMETER Experiment Name: At_Petals_P Parameter: Age (day) Value: 23-25 days
  misc_feature: MA Experiment 20000794 PARAMETER Experiment Name: At_Petals_P Parameter: Plant Line Value: WS
  misc_feature: MA Experiment 20000794 PARAMETER Experiment Name: At_Petals_P Parameter: Tissue Value: Petals vs. Whole plant
  misc_feature: MA Experiment ID: 20001248 Result: Down-regulated in Transcription
  misc_feature: MA Experiment 20001248 PARAMETER Experiment Name: At_Far-red-induction_P Parameter: Age (day) Value: 7
  misc_feature: MA Experiment 20001248 PARAMETER Experiment Name: At_Far-red-induction_P Parameter: Light Value: Far-red vs. White
  misc_feature: MA Experiment 20001248 PARAMETER Experiment Name: At_Far-red-induction_P Parameter: Organism Value: A. thaliana
  misc_feature: MA Experiment 20001248 PARAMETER Experiment Name: At_Far-red-induction_P Parameter: Plant Line Value: Columbia
  misc_feature: MA Experiment 20001248 PARAMETER Experiment Name: At_Far-red-induction_P Parameter: Timepoint (hr) Value: 4
  misc_feature: MA Experiment 20001248 PARAMETER Experiment Name: At_Far-red-induction_P Parameter: Tissue Value: Whole Plant
  misc_feature: MA Experiment ID: 20001911 Result: Up-regulated in Transcription
  misc_feature: MA Experiment 20001911 PARAMETER Experiment Name: At_Drought_Reproduction_P Parameter: Age (day) Value: 40
  misc_feature: MA Experiment 20001911 PARAMETER Experiment Name: At_Drought_Reproduction_P Parameter: Organism Value: A. thaliana
  misc_feature: MA Experiment 20001911 PARAMETER Experiment Name: At_Drought_Reproduction_P Parameter: Plant Line Value: WS
  misc_feature: MA Experiment 20001911 PARAMETER Experiment Name: At_Drought_Reproduction_P Parameter: Timepoint (day) Value: 10
  misc_feature: MA Experiment 20001911 PARAMETER Experiment Name: At_Drought_Reproduction_P Parameter: Tissue Value: Flowers
  misc_feature: MA Experiment 20001911 PARAMETER Experiment Name: At_Drought_Reproduction_P Parameter: Treatment Value: Drought vs. No Drought
ctcgtgtttgtctctttatgtaatcaaagggcttttgggctgggatcatgaaatgaagtattgcagaatccagaggagtttgtttggtaatcaatgaagggttcttcagaatctagttccagaggattaaacaacacctctggtgtttcagagttttgtacagatggttctaagtctttgtctcacattgattatgtcagaagcttacttggttcacataaagaagctaacttgggaggacttgatgatgactctattgtcagagctttggaatgtgaggatgttagcttgcgtcagtggttagacaatccagaccgatccgttgatgcctttgagtgttttcatgttttcagacagattgttgagattgttaatgcagctcactctcaaggcattgttgttcataatgttaggccttcttgtttcgttatgtcttcgtttaacaatgtttcgtttatcgaatccgcttcttgttcggattccgggtctgatgaggatgcaacaacaaagtctcgagagattggtagctcgagacaagaggagattctatcagagagacgaagcaaacaacaagaggaagtaaagaagcaacctttccctatgaaacagatattagcaatggagatgagttggtatacaagtcatgaagaagataatggttctctgtgtaattgtgcttctgatatttaccgtcttggtgttcttctctttgagctattctgccctgtctcctcaagagaagagaagtcaagaactatgtctagtttaagacatcgtgttcttccccctcagatattactcaattggcctaaagaagcttccttttgcttgtggttactgcatcctgagcctagctgtcgaccatcgatgagtgagttgctacaaagtgagtttatcaacgaacctagagagaatttggaagaacgtgaagctgcaatggagctacgggatagaatcgaggaacaagagttattactcgagttcttgtttctgattcaacagaggaaacaagaagctgcagacaaattgcaggatacaatatcgcttctctcttctgatatcgatcaagtcgtaaagcgacagttggttttacagcaaaaagggagagatgtccgttcgttcttagcctcaagaaaacggattagacaaggagctgagaccactgcagcagaggaagaaaatgatgataatagcattgatgaggaatctaagcttgatgatactctagaaagtacacttcttgaaagctctagattaatgagaaatttgaagaaactggaatcagtctactttgcaacacgatacagacaaatcaaggctgctactgctgctgaaaaaccgttggctagatattattcggcattgagttgtaacggtagaagttcagaaaagagttcaatgagccaaccatcaaaagatcctatcaatgattctagacaaggcgggtggatcgatccattcctcgagggtttgtgcaagtatttgtcttttagtaagctaagagtgaaagcagatttgaagcaaggagacttgttgaactcgtctaaccttgtttgcgcaattgggtttgatcgtgatggagagtttttcgccacggcaggcgtcaacaaaaagatcaagatattcgaatgcgagtcgataataaaagatggccgggacattcattaccctgttgtggaacttgctagccggtctaagcttagtggtatatgttggaacagttacattaagagccaagtcgcatcaagtaactttgaaggcgtggttcaagtttgggatgttgcaagaaaccagttggttacagagatgaaggagcatgagaagcgtgtatggtccatcgattattcatcagcagatccaacattgttagctagtggtagtgatgatggttcggttaagctctggagtatcaatcagggggttagtattggaaccatcaagacaaaggcaaacatatgttgtgttcagtttccatcagagacgggtcggtctttagcatttggctcagcagatcacaaagtttactactatgatctaaggaaccccaagcttcctctttgcacaatgattggtcaccacaagaccgtgagttatgttagatttgtagattcatcaacacttgtttcttcttcgacggataacacgctgaagctatgggacttatcaatgtctatttccggtattaatgaaacgcctcttcactcattcatgggacacactaatgttaagaactttgttggattatcagtctctgacgggtatatagcaacaggctctgagactaacgaggtttttgtgtaccacaaggcatttccaatgccggttttgtcgtacaagttcaaaactatagaccctgtgtcggaactcgaagtagacgatgcctcgcagttcatatcctcagtctgctggcggggacagtcgtcgaccttagttgctgcaaactccaccggcaatatcaagattttggagatggtatgaaccaatataaagtggctcagaagcaaaatggtaatattccagggtttggattggtataggaaacaatttttgggagagaaagtaggaaaagtgaaaacaatattgttgctactaaagaattgtgtatatagaaaaaatatatgatatctttctatttgttgt

SEQ ID NO: 97496 - protein, 794 aa, Arabidopsis thaliana
  peptide (1)..(794): Ceres Seq. ID no. 12737865
  misc_feature (179)..(268): Pfam Name: Protein kinase domain Pfam Description: Protein kinase domain
  misc_feature (130)..(794): Homolog of NCBI NO: 22331100 NR Description: similar to phytochrome A supressor spa1,
  misc_feature (1)..(163): Homolog of NCBI NO: 22331100 NR Description: similar to phytochrome A supressor spa1,
  misc_feature (248)..(794): Homolog of NCBI NO: 9294263 NR Description: photomorphogenesis repressor protein-like
  misc_feature (1)..(163): Homolog of NCBI NO: 9294263 NR Description: photomorphogenesis repressor protein-like
  misc_feature (569)..(733): Homolog of NCBI NO: 25405620 NR Description: hypothetical protein F8L10.5 [imported] - thaliana >gi|9454536|gb|AAF87859.1|AC022520_3 Unknown protein
  misc_feature (358)..(794): Homolog of NCBI NO: 30690337 NR Description: photomorphogenesis repressor protein -related thaliana] >gi|4809171|gb|AAD30124.1|AF135455_1 phytochrome A
  misc_feature (158)..(351): Homolog of NCBI NO: 30690337 NR Description: photomorphogenesis repressor protein -related thaliana] >gi|4809171|gb|AAD30124.1|AF135455_1 phytochrome A
  misc_feature (64)..(141): Homolog of NCBI NO: 30690337 NR Description: photomorphogenesis repressor protein -related thaliana] >gi|4809171|gb|AAD30124.1|AF135455_1 phytochrome A
  misc_feature (258)..(793): Homolog of NCBI NO: 34910754 NR Description: P0042A10.6 [Oryza sativa (japonica
  misc_feature (63)..(610): Homolog of NCBI NO: 34910754 NR Description: P0042A10.6 [Oryza sativa (japonica
MKGSSESSSRGLNNTSGVSEFCTDGSKSLSHIDYVRSLLGSHKEANLGGLDDDSIVRALECEDVSLRQWLDNPDRSVDAFECFHVFRQIVEIVNAAHSQGIVVHNVRPSCFVMSSFNNVSFIESASCSDSGSDEDATTKSREIGSSRQEEILSERRSKQQEEVKKQPFPMKQILAMEMSWYTSHEEDNGSLCNCASDIYRLGVLLFELFCPVSSREEKSRTMSSLRHRVLPPQILLNWPKEASFCLWLLHPEPSCRPSMSELLQSEFINEPRENLEEREAAMELRDRIEEQELLLEFLFLIQQRKQEAADKLQDTISLLSSDIDQVVKRQLVLQQKGRDVRSFLASRKRIRQGAETTAAEEENDDNSIDEESKLDDTLESTLLESSRLMRNLKKLESVYFATRYRQIKAATAAEKPLARYYSALSCNGRSSEKSSMSQPSKDPINDSRQGGWIDPFLEGLCKYLSFSKLRVKADLKQGDLLNSSNLVCAIGFDRDGEFFATAGVNKKIKIFECESIIKDGRDIHYPVVELASRSKLSGICWNSYIKSQVASSNFEGVVQVWDVARNQLVTEMKEHEKRVWSIDYSSADPTLLASGSDDGSVKLWSINQGVSIGTIKTKANICCVQFPSETGRSLAFGSADHKVYYYDLRNPKLPLCTMIGHHKTVSYVRFVDSSTLVSSSTDNTLKLWDLSMSISGINETPLHSFMGHTNVKNFVGLSVSDGYIATGSETNEVFVYHKAFPMPVLSYKFKTIDPVSELEVDDASQFISSVCWRGQSSTLVAANSTGNIKILEMV

SEQ ID NO: 97497 - protein, 682 aa, Arabidopsis thaliana
  peptide (1)..(682): Ceres Seq. ID no. 12737866
  misc_feature (67)..(156): Pfam Name: Protein kinase domain Pfam Description: Protein kinase domain
  misc_feature (18)..(682): Homolog of NCBI NO: 22331100 NR Description: similar to phytochrome A supressor spa1,
  misc_feature (1)..(51): Homolog of NCBI NO: 22331100 NR Description: similar to phytochrome A supressor spa1,
  misc_feature (136)..(682): Homolog of NCBI NO: 9294263 NR Description: photomorphogenesis repressor protein-like
  misc_feature (1)..(51): Homolog of NCBI NO: 9294263 NR Description: photomorphogenesis repressor protein-like
  misc_feature (457)..(621): Homolog of NCBI NO: 25405620 NR Description: hypothetical protein F8L10.5 [imported] - thaliana >gi|9454536|gb|AAF87859.1|AC022520_3 Unknown protein
  misc_feature (246)..(682): Homolog of NCBI NO: 30690337 NR Description: photomorphogenesis repressor protein -related thaliana] >gi|4809171|gb|AAD30124.1|AF135455_1 phytochrome A
  misc_feature (46)..(239): Homolog of NCBI NO: 30690337 NR Description: photomorphogenesis repressor protein -related thaliana] >gi|4809171|gb|AAD30124.1|AF135455_1 phytochrome A
  misc_feature (1)..(29): Homolog of NCBI NO: 30690337 NR Description: photomorphogenesis repressor protein -related thaliana] >gi|4809171|gb|AAD30124.1|AF135455_1 phytochrome A
  misc_feature (146)..(681): Homolog of NCBI NO: 34910754 NR Description: P0042A10.6 [Oryza sativa (japonica
  misc_feature (1)..(498): Homolog of NCBI NO: 34910754 NR Description: P0042A10.6 [Oryza sativa (japonica
MSSFNNVSFIESASCSDSGSDEDATTKSREIGSSRQEEILSERRSKQQEEVKKQPFPMKQILAMEMSWYTSHEEDNGSLCNCASDIYRLGVLLFELFCPVSSREEKSRTMSSLRHRVLPPQILLNWPKEASFCLWLLHPEPSCRPSMSELLQSEFINEPRENLEEREAAMELRDRIEEQELLLEFLFLIQQRKQEAADKLQDTISLLSSDIDQVVKRQLVLQQKGRDVRSFLASRKRIRQGAETTAAEEENDDNSIDEESKLDDTLESTLLESSRLMRNLKKLESVYFATRYRQIKAATAAEKPLARYYSALSCNGRSSEKSSMSQPSKDPINDSRQGGWIDPFLEGLCKYLSFSKLRVKADLKQGDLLNSSNLVCAIGFDRDGEFFATAGVNKKIKIFECESIIKDGRDIHYPVVELASRSKLSGICWNSYIKSQVASSNFEGVVQVWDVARNQLVTEMKEHEKRVWSIDYSSADPTLLASGSDDGSVKLWSINQGVSIGTIKTKANICCVQFPSETGRSLAFGSADHKVYYYDLRNPKLPLCTMIGHHKTVSYVRFVDSSTLVSSSTDNTLKLWDLSMSISGINETPLHSFMGHTNVKNFVGLSVSDGYIATGSETNEVFVYHKAFPMPVLSYKFKTIDPVSELEVDDASQFISSVCWRGQSSTLVAANSTGNIKILEMV

SEQ ID NO: 97498 - protein, 625 aa, Arabidopsis thaliana
  peptide (1)..(625): Ceres Seq. ID no. 12737867
  misc_feature (10)..(99): Pfam Name: Protein kinase domain Pfam Description: Protein kinase domain
  misc_feature (1)..(625): Homolog of NCBI NO: 22331100 NR Description: similar to phytochrome A supressor spa1,
  misc_feature (79)..(625): Homolog of NCBI NO: 9294263 NR Description: photomorphogenesis repressor protein-like
  misc_feature (400)..(564): Homolog of NCBI NO: 25405620 NR Description: hypothetical protein F8L10.5 [imported] - thaliana >gi|9454536|gb|AAF87859.1|AC022520_3 Unknown protein
  misc_feature (189)..(625): Homolog of NCBI NO: 30690337 NR Description: photomorphogenesis repressor protein -related thaliana] >gi|4809171|gb|AAD30124.1|AF135455_1 phytochrome A
  misc_feature (1)..(182): Homolog of NCBI NO: 30690337 NR Description: photomorphogenesis repressor protein -related thaliana] >gi|4809171|gb|AAD30124.1|AF135455_1 phytochrome A
  misc_feature (89)..(624): Homolog of NCBI NO: 34910754 NR Description: P0042A10.6 [Oryza sativa (japonica
  misc_feature (1)..(441): Homolog of NCBI NO: 34910754 NR Description: P0042A10.6 [Oryza sativa (japonica
  misc_feature (1)..(275): Homolog of NCBI NO: 9294263 NR Description: photomorphogenesis repressor protein-like
  misc_feature (189)..(625): Homolog of NCBI NO: 25408984 NR Description: probable photomorphogenesis repressor protein - Arabidopsis thaliana >gi|4559377|gb|AAD23037.1| putative
  misc_feature (218)..(442): Homolog of NCBI NO: 7486345 NR Description: hypothetical protein F2P3.13 - Arabidopsis
MKQILAMEMSWYTSHEEDNGSLCNCASDIYRLGVLLFELFCPVSSREEKSRTMSSLRHRVLPPQILLNWPKEASFCLWLLHPEPSCRPSMSELLQSEFINEPRENLEEREAAMELRDRIEEQELLLEFLFLIQQRKQEAADKLQDTISLLSSDIDQVVKRQLVLQQKGRDVRSFLASRKRIRQGAETTAAEEENDDNSIDEESKLDDTLESTLLESSRLMRNLKKLESVYFATRYRQIKAATAAEKPLARYYSALSCNGRSSEKSSMSQPSKDPINDSRQGGWIDPFLEGLCKYLSFSKLRVKADLKQGDLLNSSNLVCAIGFDRDGEFFATAGVNKKIKIFECESIIKDGRDIHYPVVELASRSKLSGICWNSYIKSQVASSNFEGVVQVWDVARNQLVTEMKEHEKRVWSIDYSSADPTLLASGSDDGSVKLWSINQGVSIGTIKTKANICCVQFPSETGRSLAFGSADHKVYYYDLRNPKLPLCTMIGHHKTVSYVRFVDSSTLVSSSTDNTLKLWDLSMSISGINETPLHSFMGHTNVKNFVGLSVSDGYIATGSETNEVFVYHKAFPMPVLSYKFKTIDPVSELEVDDASQFISSVCWRGQSSTLVAANSTGNIKILEMV

SEQ ID NO: 97499 - DNA, 1221 bp, Arabidopsis thaliana
  misc_feature (1)..(1221): Ceres Seq. ID no. 12737868
  misc_feature: MA Experiment ID: 20000169 Result: Up-regulated in Transcription
  misc_feature: MA Experiment 20000169 PARAMETER Experiment Name: At_100uM_ABA_P Parameter: Age (day) Value: 14
  misc_feature: MA Experiment 20000169 PARAMETER Experiment Name: At_100uM_ABA_P Parameter: Organism Value: A. thaliana
  misc_feature: MA Experiment 20000169 PARAMETER Experiment Name: At_100uM_ABA_P Parameter: Plant Line Value: WS
  misc_feature: MA Experiment 20000169 PARAMETER Experiment Name: At_100uM_ABA_P Parameter: Timepoint (hr) Value: 6
  misc_feature: MA Experiment 20000169 PARAMETER Experiment Name: At_100uM_ABA_P Parameter: Tissue Value: Aerial
  misc_feature: MA Experiment 20000169 PARAMETER Experiment Name: At_100uM_ABA_P Parameter: Treatment Value: 100uM ABA vs. No Treatment
  misc_feature: MA Experiment ID: 20000182 Result: Up-regulated in Transcription
  misc_feature: MA Experiment 20000182 PARAMETER Experiment Name: At_2mM_SA_P Parameter: Age (day) Value: 14
  misc_feature: MA Experiment 20000182 PARAMETER Experiment Name: At_2mM_SA_P Parameter: Organism Value: A. thaliana
  misc_feature: MA Experiment 20000182 PARAMETER Experiment Name: At_2mM_SA_P Parameter: Plant Line Value: WS
  misc_feature: MA Experiment 20000182 PARAMETER Experiment Name: At_2mM_SA_P Parameter: Timepoint (hr) Value: 6
  misc_feature: MA Experiment 20000182 PARAMETER Experiment Name: At_2mM_SA_P Parameter: Tissue Value: Aerial
  misc_feature: MA Experiment 20000182 PARAMETER Experiment Name: At_2mM_SA_P Parameter: Treatment Value: 2mM SA vs. No Treatment
  misc_feature: MA Experiment ID: 20000184 Result: Down-regulated in Transcription
  misc_feature: MA Experiment 20000184 PARAMETER Experiment Name: At_Shoots__P Parameter: Age (day) Value: 7
  misc_feature: MA Experiment 20000184 PARAMETER Experiment Name: At_Shoots__P Parameter: Tissue Value: Shoots vs. Whole Plant
  misc_feature: MA Experiment ID: 20000185 Result: Down-regulated in Transcription
  misc_feature: MA Experiment 20000185 PARAMETER Experiment Name: At_Roots__P Parameter: Age (day) Value: 7 vs. 21
  misc_feature: MA Experiment 20000185 PARAMETER Experiment Name: At_Roots__P Parameter: Organism Value: A. thaliana
  misc_feature: MA Experiment 20000185 PARAMETER Experiment Name: At_Roots__P Parameter: Tissue Value: Roots vs. Whole Plant
  misc_feature: MA Experiment ID: 20000227 Result: Down-regulated in Transcription
  misc_feature: MA Experiment 20000227 PARAMETER Experiment Name: At_Root-Tips-vs-Tops_P Parameter: Tissue Value: Root Tips vs. Root Tops
  misc_feature: MA Experiment ID: 20000234 Result: Down-regulated in Transcription
  misc_feature: MA Experiment 20000234 PARAMETER Experiment Name: At_Siliques_P Parameter: Age (day) Value: 21
  misc_feature: MA Experiment 20000234 PARAMETER Experiment Name: At_Siliques_P Parameter: Organism Value: A. thaliana
  misc_feature: MA Experiment 20000234 PARAMETER Experiment Name: At_Siliques_P Parameter: Plant Line Value: WS
  misc_feature: MA Experiment 20000234 PARAMETER Experiment Name: At_Siliques_P Parameter: Tissue Value: Less Than 5mm Siliques vs. Whole Plant
  misc_feature: MA Experiment ID: 20000235 Result: Down-regulated in Transcription
  misc_feature: MA Experiment 20000235 PARAMETER Experiment Name: At_Siliques_P Parameter: Age (day) Value: 21
  misc_feature: MA Experiment 20000235 PARAMETER Experiment Name: At_Siliques_P Parameter: Organism Value: A. thaliana
  misc_feature: MA Experiment 20000235 PARAMETER Experiment Name: At_Siliques_P Parameter: Plant Line Value: WS
  misc_feature: MA Experiment 20000235 PARAMETER Experiment Name: At_Siliques_P Parameter: Tissue Value: 5-10mm Siliques vs. Whole Plant
  misc_feature: MA Experiment ID: 20000264 Result: Down-regulated in Transcription
  misc_feature: MA Experiment 20000264 PARAMETER Experiment Name: At_Open_Flower_P Parameter: Age (day) Value: 21
  misc_feature: MA Experiment 20000264 PARAMETER Experiment Name: At_Open_Flower_P Parameter: Plant Line Value: WS
  misc_feature: MA Experiment 20000264 PARAMETER Experiment Name: At_Open_Flower_P Parameter: Tissue Value: Open Flower vs. Whole Plant
  misc_feature: MA Experiment ID: 20000265 Result: Down-regulated in Transcription
  misc_feature: MA Experiment 20000265 PARAMETER Experiment Name: At_Open_Flower_P Parameter: Age (day) Value: 21
  misc_feature: MA Experiment 20000265 PARAMETER Experiment Name: At_Open_Flower_P Parameter: Plant Line Value: WS
  misc_feature: MA Experiment 20000265 PARAMETER Experiment Name: At_Open_Flower_P Parameter: Tissue Value: Closed Flower vs. Whole Plant
  misc_feature: MA Experiment ID: 20000267 Result: Up-regulated in Transcription
  misc_feature: MA Experiment 20000267 PARAMETER Experiment Name: At_Drought_P Parameter: Age (day) Value: 7
  misc_feature: MA Experiment 20000267 PARAMETER Experiment Name: At_Drought_P Parameter: Organism Value: A. thaliana
  misc_feature: MA Experiment 20000267 PARAMETER Experiment Name: At_Drought_P Parameter: Plant Line Value: WS
  misc_feature: MA Experiment 20000267 PARAMETER Experiment Name: At_Drought_P Parameter: Timepoint (hr) Value: 6
  misc_feature: MA Experiment 20000267 PARAMETER Experiment Name: At_Drought_P Parameter: Tissue Value: Whole Plant
  misc_feature: MA Experiment 20000267 PARAMETER Experiment Name: At_Drought_P Parameter: Treatment Value: Drought vs. No Drought
  misc_feature: MA Experiment ID: 20000286 Result: Down-regulated in Transcription
  misc_feature: MA Experiment 20000286 PARAMETER Experiment Name: At_Open_Flower_P Parameter: Age (day) Value: 21
  misc_feature: MA Experiment 20000286 PARAMETER Experiment Name: At_Open_Flower_P Parameter: Plant Line Value: WS
  misc_feature: MA Experiment 20000286 PARAMETER Experiment Name: At_Open_Flower_P Parameter: Tissue Value: Half Open vs. Whole Plant
  misc_feature: MA Experiment ID: 20000436 Result: Up-regulated in Transcription
  misc_feature: MA Experiment 20000436 PARAMETER Experiment Name: At_Drought_P Parameter: Age (day) Value: 7
  misc_feature: MA Experiment 20000436 PARAMETER Experiment Name: At_Drought_P Parameter: Organism Value: A. thaliana
  misc_feature: MA Experiment 20000436 PARAMETER Experiment Name: At_Drought_P Parameter: Plant Line Value: WS
  misc_feature: MA Experiment 20000436 PARAMETER Experiment Name: At_Drought_P Parameter: Timepoint (hr) Value: 12
  misc_feature: MA Experiment 20000436 PARAMETER Experiment Name: At_Drought_P Parameter: Tissue Value: Whole Plant
  misc_feature: MA Experiment 20000436 PARAMETER Experiment Name: At_Drought_P Parameter: Treatment Value: Drought vs. No Drought
  misc_feature: MA Experiment ID: 20000437 Result: Up-regulated in Transcription
  misc_feature: MA Experiment 20000437 PARAMETER Experiment Name: At_Drought_P Parameter: Age (day) Value: 8
  misc_feature: MA Experiment 20000437 PARAMETER Experiment Name: At_Drought_P Parameter: Organism Value: A. thaliana
  misc_feature: MA Experiment 20000437 PARAMETER Experiment Name: At_Drought_P Parameter: Plant Line Value: WS
  misc_feature: MA Experiment 20000437 PARAMETER Experiment Name: At_Drought_P Parameter: Timepoint (hr) Value: 24
  misc_feature: MA Experiment 20000437 PARAMETER Experiment Name: At_Drought_P Parameter: Tissue Value: Whole Plant
  misc_feature: MA Experiment 20000437 PARAMETER Experiment Name: At_Drought_P Parameter: Treatment Value: Drought vs. No Drought
  misc_feature: MA Experiment ID: 20000438 Result: Down-regulated in Transcription
  misc_feature: MA Experiment 20000438 PARAMETER Experiment Name: At_Shoots__P Parameter: Age (day) Value: 14
  misc_feature: MA Experiment 20000438 PARAMETER Experiment Name: At_Shoots__P Parameter: Tissue Value: Shoots vs. Whole Plant
  misc_feature: MA Experiment ID: 20000453 Result: Up-regulated in Transcription
  misc_feature: MA Experiment 20000453 PARAMETER Experiment Name: At_100uM_ABA_P Parameter: Age (day) Value: 15
  misc_feature: MA Experiment 20000453 PARAMETER Experiment Name: At_100uM_ABA_P Parameter: Organism Value: A. thaliana
  misc_feature: MA Experiment 20000453 PARAMETER Experiment Name: At_100uM_ABA_P Parameter: Plant Line Value: WS
  misc_feature: MA Experiment 20000453 PARAMETER Experiment Name: At_100uM_ABA_P Parameter: Timepoint (hr) Value: 24
  misc_feature: MA Experiment 20000453 PARAMETER Experiment Name: At_100uM_ABA_P Parameter: Tissue Value: Aerial
  misc_feature: MA Experiment 20000453 PARAMETER Experiment Name: At_100uM_ABA_P Parameter: Treatment Value: 100uM ABA vs. No Treatment
  misc_feature: MA Experiment ID: 20000527 Result: Down-regulated in Transcription
  misc_feature: MA Experiment 20000527 PARAMETER Experiment Name: At_10percent_PEG_P Parameter: Age (day) Value: 20
  misc_feature: MA Experiment 20000527 PARAMETER Experiment Name: At_10percent_PEG_P Parameter: Organism Value: A. thaliana
  misc_feature: MA Experiment 20000527 PARAMETER Experiment Name: At_10percent_PEG_P Parameter: Plant Line Value: WS
  misc_feature: MA Experiment 20000527 PARAMETER Experiment Name: At_10percent_PEG_P Parameter: Timepoint (day) Value: 20
  misc_feature: MA Experiment 20000527 PARAMETER Experiment Name: At_10percent_PEG_P Parameter: Tissue Value: Whole Plant
  misc_feature: MA Experiment 20000527 PARAMETER Experiment Name: At_10percent_PEG_P Parameter: Treatment Value: 10percent PEG vs. No Treatment
  misc_feature: MA Experiment ID: 20000794 Result: Down-regulated in Transcription
  misc_feature: MA Experiment 20000794 PARAMETER Experiment Name: At_Petals_P Parameter: Age (day) Value: 23-25 days
  misc_feature: MA Experiment 20000794 PARAMETER Experiment Name: At_Petals_P Parameter: Plant Line Value: WS
  misc_feature: MA Experiment 20000794 PARAMETER Experiment Name: At_Petals_P Parameter: Tissue Value: Petals vs. Whole plant
  misc_feature: MA Experiment ID: 20001554 Result: Up-regulated in Transcription
  misc_feature: MA Experiment 20001554 PARAMETER Experiment Name: At_Drought_Soil_Dry_P Parameter: Age (day) Value: 21
  misc_feature: MA Experiment 20001554 PARAMETER Experiment Name: At_Drought_Soil_Dry_P Parameter: Organism Value: A. thaliana
  misc_feature: MA Experiment 20001554 PARAMETER Experiment Name: At_Drought_Soil_Dry_P Parameter: Plant Line Value: WS
  misc_feature: MA Experiment 20001554 PARAMETER Experiment Name: At_Drought_Soil_Dry_P Parameter: Post Timepoint (hr) Value: None
  misc_feature: MA Experiment 20001554 PARAMETER Experiment Name: At_Drought_Soil_Dry_P Parameter: Post-Treatment Value: None
  misc_feature: MA Experiment 20001554 PARAMETER Experiment Name: At_Drought_Soil_Dry_P Parameter: Timepoint (day) Value: 7
  misc_feature: MA Experiment 20001554 PARAMETER Experiment Name: At_Drought_Soil_Dry_P Parameter: Treatment Value: Drought vs. No Drought
  misc_feature: MA Experiment ID: 20001555 Result: Up-regulated in Transcription
  misc_feature: MA Experiment 20001555 PARAMETER Experiment Name: At_Drought_Soil_Dry_P Parameter: Age (day) Value: 24
  misc_feature: MA Experiment 20001555 PARAMETER Experiment Name: At_Drought_Soil_Dry_P Parameter: Organism Value: A. thaliana
  misc_feature: MA Experiment 20001555 PARAMETER Experiment Name: At_Drought_Soil_Dry_P Parameter: Plant Line Value: WS
  misc_feature: MA Experiment 20001555 PARAMETER Experiment Name: At_Drought_Soil_Dry_P Parameter: Post Timepoint (hr) Value: None
  misc_feature: MA Experiment 20001555 PARAMETER Experiment Name: At_Drought_Soil_Dry_P Parameter: Post-Treatment Value: None
  misc_feature: MA Experiment 20001555 PARAMETER Experiment Name: At_Drought_Soil_Dry_P Parameter: Timepoint (day) Value: 10
  misc_feature: MA Experiment 20001555 PARAMETER Experiment Name: At_Drought_Soil_Dry_P Parameter: Treatment Value: Drought vs. No Drought
  misc_feature: MA Experiment ID: 20001560 Result: Down-regulated in Transcription
  misc_feature: MA Experiment 20001560 PARAMETER Experiment Name: At_Drought_Soil_Dry_P Parameter: Age (day) Value: 28
  misc_feature: MA Experiment 20001560 PARAMETER Experiment Name: At_Drought_Soil_Dry_P Parameter: Organism Value: A. thaliana
  misc_feature: MA Experiment 20001560 PARAMETER Experiment Name: At_Drought_Soil_Dry_P Parameter: Plant Line Value: WS
  misc_feature: MA Experiment 20001560 PARAMETER Experiment Name: At_Drought_Soil_Dry_P Parameter: Post Timepoint (hr) Value: None
  misc_feature: MA Experiment 20001560 PARAMETER Experiment Name: At_Drought_Soil_Dry_P Parameter: Post-Treatment Value: None
  misc_feature: MA Experiment 20001560 PARAMETER Experiment Name: At_Drought_Soil_Dry_P Parameter: Timepoint (day) Value: 14
  misc_feature: MA Experiment 20001560 PARAMETER Experiment Name: At_Drought_Soil_Dry_P Parameter: Treatment Value: Drought vs. No Drought
  misc_feature: MA Experiment ID: 20001904 Result: Up-regulated in Transcription
  misc_feature: MA Experiment 20001904 PARAMETER Experiment Name: At_Drought_Reproduction_P Parameter: Age (day) Value: 37
  misc_feature: MA Experiment 20001904 PARAMETER Experiment Name: At_Drought_Reproduction_P Parameter: Organism Value: A. thaliana
  misc_feature: MA Experiment 20001904 PARAMETER Experiment Name: At_Drought_Reproduction_P Parameter: Plant Line Value: WS
  misc_feature: MA Experiment 20001904 PARAMETER Experiment Name: At_Drought_Reproduction_P Parameter: Timepoint (day) Value: 7
  misc_feature: MA Experiment 20001904 PARAMETER Experiment Name: At_Drought_Reproduction_P Parameter: Tissue Value: Rosettes
  misc_feature: MA Experiment 20001904 PARAMETER Experiment Name: At_Drought_Reproduction_P Parameter: Treatment Value: Drought vs. No Drought
  misc_feature: MA Experiment ID: 20001905 Result: Up-regulated in Transcription
  misc_feature: MA Experiment 20001905 PARAMETER Experiment Name: At_Drought_Reproduction_P Parameter: Age (day) Value: 40
  misc_feature: MA Experiment 20001905 PARAMETER Experiment Name: At_Drought_Reproduction_P Parameter: Organism Value: A. thaliana
  misc_feature: MA Experiment 20001905 PARAMETER Experiment Name: At_Drought_Reproduction_P Parameter: Plant Line Value: WS
  misc_feature: MA Experiment 20001905 PARAMETER Experiment Name: At_Drought_Reproduction_P Parameter: Timepoint (day) Value: 10
  misc_feature: MA Experiment 20001905 PARAMETER Experiment Name: At_Drought_Reproduction_P Parameter: Tissue Value: Rosettes
  misc_feature: MA Experiment 20001905 PARAMETER Experiment Name: At_Drought_Reproduction_P Parameter: Treatment Value: Drought vs. No Drought
  misc_feature: MA Experiment ID: 20001906 Result: Up-regulated in Transcription
  misc_feature: MA Experiment 20001906 PARAMETER Experiment Name: At_Drought_Reproduction_P Parameter: Age (day) Value: 35
  misc_feature: MA Experiment 20001906 PARAMETER Experiment Name: At_Drought_Reproduction_P Parameter: Organism Value: A. thaliana
  misc_feature: MA Experiment 20001906 PARAMETER Experiment Name: At_Drought_Reproduction_P Parameter: Plant Line Value: WS
  misc_feature: MA Experiment 20001906 PARAMETER Experiment Name: At_Drought_Reproduction_P Parameter: Timepoint (day) Value: 5
  misc_feature: MA Experiment 20001906 PARAMETER Experiment Name: At_Drought_Reproduction_P Parameter: Tissue Value: Siliques
  misc_feature: MA Experiment 20001906 PARAMETER Experiment Name: At_Drought_Reproduction_P Parameter: Treatment Value: Drought vs. No Drought
atggagaagaaatatgtattttcatttgttatcacatctcttgtctgcgttgttctccttgcaacttccttcaacattggtttaatgtcttcacttcgaccaccgattaatggaactttatcaagtttccccaaaaatgattcgaacgttgtaggaaaacaacctcgtgaagacgacaagctcccacgtttcgcttaccttgtttcaggatctaaaggagatcttgaaagcctttggagaactcttagagcattgtaccatccaagaaaccaatacattgttcacttggatcttgaatcaccggttgatgagagatcagagttagcttctcgcatttcaaacgatcctatgtattcaaaagcaggaaatgtatatatgataactaaagctaatcttgtgacttataccggaccaacaatggtggcgaatacgcttcacgcatgtgcgattcttcttaaaagaaccccggattgggattggtttatcaatcttagtgcttcggattatcccctcgtgactcaagatgatctgattcatacattttcgacattggaccggaaccttaactttatcgagcacacaagttccttaggctggaaatacaagaagcgggcaatgccattaataattgatcctggactctatatgttaaacaaatcaaacgttttattggttagacctaatcgaagtttaccttctgctttcaagttatttaccggatcagcttggatggctctatcgcacgcattcgtggagtatatcatatacggttgggacaatttaccaagaactttactcatgtactacaccaatttcgtttcttctcctgaaggttacttccatacagtcatatgtaacgtgcctgagttctccaaaaccgcggtgaaccatgatcttcactacatcgcatgggacaagccaccgaggcagcatcctcgtatgttgtctcaaagagacatgggaaagatgatttcgagcggatctgcatttggtcggaagttcagaagaaatgatactgttttggataagattgataaggaactgcttatacggataaacgaagacggttttactccaggcggttggtgcggtgggaaaccagagtgctcggttgtcgaagatgtggctaggatcaggcctagctcaggggctgtgaggctcaaggagcttgtagataggttagttacagaggctaaattaggtaagaatcaatgtgtataa

SEQ ID NO: 97500 - protein, 406 aa, Arabidopsis thaliana
  peptide (1)..(406): Ceres Seq. ID no. 12737869
  misc_feature (64)..(289): Pfam Name: Core-2/I-Branching enzyme Pfam Description: Core-2/I-Branching enzyme
  misc_feature (1)..(406): Homolog of NCBI NO: 15219202 NR Description: N-acetylglucosaminyltransferase family
  misc_feature (1)..(405): Homolog of NCBI NO: 18400725 NR Description: N-acetylglucosaminyltransferase family enzyme family); protein id: At3g15350.1, supported by cDNA:
  misc_feature (1)..(405): Homolog of NCBI NO: 15146308 NR Description: AT3g15350/K7L4_15 [Arabidopsis thaliana]
  misc_feature (2)..(405): Homolog of NCBI NO: 30687610 NR Description: N-acetylglucosaminyltransferase family
  misc_feature (37)..(405): Homolog of NCBI NO: 7486258 NR Description: hypothetical protein F27G19.80 - Arabidopsis >gi|4972073|emb|CAB43880.1| putative protein [Arabidopsis >gi|7269602|emb|CAB81398.1| putative protein [Arabidopsis
  misc_feature (2)..(405): Homolog of NCBI NO: 15242532 NR Description: N-acetylglucosaminyltransferase family
  misc_feature (63)..(405): Homolog of NCBI NO: 34903664 NR Description: B1015E06.17 [Oryza sativa (japonica
  misc_feature (1)..(405): Homolog of NCBI NO: 15242199 NR Description: N-acetylglucosaminyltransferase family enzyme family); protein id: At5g15050.1, supported by cDNA: supported by cDNA: gi_16209673 [Arabidopsis thaliana]
  misc_feature (2)..(405): Homolog of NCBI NO: 15236287 NR Description: N-acetylglucosaminyltransferase family
  misc_feature (2)..(405): Homolog of NCBI NO: 15218824 NR Description: N-acetylglucosaminyltransferase family enzyme family); protein id: At1g03520.1, supported by cDNA: supported by cDNA: gi_20465790 [Arabidopsis thaliana] thaliana
MEKKYVFSFVITSLVCVVLLATSFNIGLMSSLRPPINGTLSSFPKNDSNVVGKQPREDDKLPRFAYLVSGSKGDLESLWRTLRALYHPRNQYIVHLDLESPVDERSELASRISNDPMYSKAGNVYMITKANLVTYTGPTMVANTLHACAILLKRTPDWDWFINLSASDYPLVTQDDLIHTFSTLDRNLNFIEHTSSLGWKYKKRAMPLIIDPGLYMLNKSNVLLVRPNRSLPSAFKLFTGSAWMALSHAFVEYIIYGWDNLPRTLLMYYTNFVSSPEGYFHTVICNVPEFSKTAVNHDLHYIAWDKPPRQHPRMLSQRDMGKMISSGSAFGRKFRRNDTVLDKIDKELLIRINEDGFTPGGWCGGKPECSVVEDVARIRPSSGAVRLKELVDRLVTEAKLGKNQCV

SEQ ID NO: 97501 - protein, 378 aa, Arabidopsis thaliana
  peptide (1)..(378): Ceres Seq. ID no. 12737870
  misc_feature (36)..(261): Pfam Name: Core-2/I-Branching enzyme Pfam Description: Core-2/I-Branching enzyme
  misc_feature (1)..(378): Homolog of NCBI NO: 15219202 NR Description: N-acetylglucosaminyltransferase family
  misc_feature (1)..(377): Homolog of NCBI NO: 18400725 NR Description: N-acetylglucosaminyltransferase family enzyme family); protein id: At3g15350.1, supported by cDNA:
  misc_feature (1)..(377): Homolog of NCBI NO: 15146308 NR Description: AT3g15350/K7L4_15 [Arabidopsis thaliana]
  misc_feature (1)..(377): Homolog of NCBI NO: 30687610 NR Description: N-acetylglucosaminyltransferase family
  misc_feature (9)..(377): Homolog of NCBI NO: 7486258 NR Description: hypothetical protein F27G19.80 - Arabidopsis >gi|4972073|emb|CAB43880.1| putative protein [Arabidopsis >gi|7269602|emb|CAB81398.1| putative protein [Arabidopsis
  misc_feature (1)..(377): Homolog of NCBI NO: 15242532 NR Description: N-acetylglucosaminyltransferase family
  misc_feature (35)..(377): Homolog of NCBI NO: 34903664 NR Description: B1015E06.17 [Oryza sativa (japonica
  misc_feature (1)..(377): Homolog of NCBI NO: 15242199 NR Description: N-acetylglucosaminyltransferase family enzyme family); protein id: At5g15050.1, supported by cDNA: supported by cDNA: gi_16209673 [Arabidopsis thaliana]
  misc_feature (1)..(377): Homolog of NCBI NO: 15236287 NR Description: N-acetylglucosaminyltransferase family
  misc_feature (1)..(377): Homolog of NCBI NO: 15218824 NR Description: N-acetylglucosaminyltransferase family enzyme family); protein id: At1g03520.1, supported by cDNA: supported by cDNA: gi_20465790 [Arabidopsis thaliana] thaliana
MSSLRPPINGTLSSFPKNDSNVVGKQPREDDKLPRFAYLVSGSKGDLESLWRTLRALYHPRNQYIVHLDLESPVDERSELASRISNDPMYSKAGNVYMITKANLVTYTGPTMVANTLHACAILLKRTPDWDWFINLSASDYPLVTQDDLIHTFSTLDRNLNFIEHTSSLGWKYKKRAMPLIIDPGLYMLNKSNVLLVRPNRSLPSAFKLFTGSAWMALSHAFVEYIIYGWDNLPRTLLMYYTNFVSSPEGYFHTVICNVPEFSKTAVNHDLHYIAWDKPPRQHPRMLSQRDMGKMISSGSAFGRKFRRNDTVLDKIDKELLIRINEDGFTPGGWCGGKPECSVVEDVARIRPSSGAVRLKELVDRLVTEAKLGKNQCV

SEQ ID NO: 97502 - protein, 290 aa, Arabidopsis thaliana
  peptide (1)..(290): Ceres Seq. ID no. 12737871
  misc_feature (1)..(173): Pfam Name: Core-2/I-Branching enzyme Pfam Description: Core-2/I-Branching enzyme
  misc_feature (1)..(290): Homolog of NCBI NO: 15219202 NR Description: N-acetylglucosaminyltransferase family
  misc_feature (1)..(289): Homolog of NCBI NO: 18400725 NR Description: N-acetylglucosaminyltransferase family enzyme family); protein id: At3g15350.1, supported by cDNA:
  misc_feature (1)..(289): Homolog of NCBI NO: 15146308 NR Description: AT3g15350/K7L4_15 [Arabidopsis thaliana]
  misc_feature (1)..(289): Homolog of NCBI NO: 30687610 NR Description: N-acetylglucosaminyltransferase family
  misc_feature (1)..(289): Homolog of NCBI NO: 7486258 NR Description: hypothetical protein F27G19.80 - Arabidopsis >gi|4972073|emb|CAB43880.1| putative protein [Arabidopsis >gi|7269602|emb|CAB81398.1| putative protein [Arabidopsis
  misc_feature (1)..(289): Homolog of NCBI NO: 15242532 NR Description: N-acetylglucosaminyltransferase family
  misc_feature (1)..(289): Homolog of NCBI NO: 34903664 NR Description: B1015E06.17 [Oryza sativa (japonica
  misc_feature (1)..(289): Homolog of NCBI NO: 15242199 NR Description: N-acetylglucosaminyltransferase family enzyme family); protein id: At5g15050.1, supported by cDNA: supported by cDNA: gi_16209673 [Arabidopsis thaliana]
  misc_feature (1)..(289): Homolog of NCBI NO: 15236287 NR Description: N-acetylglucosaminyltransferase family
  misc_feature (1)..(289): Homolog of NCBI NO: 15218824 NR Description: N-acetylglucosaminyltransferase family enzyme family); protein id: At1g03520.1, supported by cDNA: supported by cDNA: gi_20465790 [Arabidopsis thaliana] thaliana
MYSKAGNVYMITKANLVTYTGPTMVANTLHACAILLKRTPDWDWFINLSASDYPLVTQDDLIHTFSTLDRNLNFIEHTSSLGWKYKKRAMPLIIDPGLYMLNKSNVLLVRPNRSLPSAFKLFTGSAWMALSHAFVEYIIYGWDNLPRTLLMYYTNFVSSPEGYFHTVICNVPEFSKTAVNHDLHYIAWDKPPRQHPRMLSQRDMGKMISSGSAFGRKFRRNDTVLDKIDKELLIRINEDGFTPGGWCGGKPECSVVEDVARIRPSSGAVRLKELVDRLVTEAKLGKNQCV

SEQ ID NO: 97503 - DNA, 2646 bp, Arabidopsis thaliana
  misc_feature (1)..(2646): Ceres Seq. ID no. 12737923
  misc_feature: MA Experiment ID: 20000314 Result: Up-regulated in Transcription
  misc_feature: MA Experiment 20000314 PARAMETER Experiment Name: At_14day_Shoots-Roots_Sub_P Parameter: Age (day) Value: 14
  misc_feature: MA Experiment 20000314 PARAMETER Experiment Name: At_14day_Shoots-Roots_Sub_P Parameter: Organism Value: A. thaliana
  misc_feature: MA Experiment 20000314 PARAMETER Experiment Name: At_14day_Shoots-Roots_Sub_P Parameter: Plant Line Value: WS
  misc_feature: MA Experiment 20000314 PARAMETER Experiment Name: At_14day_Shoots-Roots_Sub_P Parameter: Tissue Value: Roots vs. Whole Plant
  misc_feature: MA Experiment ID: 20000347 Result: Up-regulated in Transcription
  misc_feature: MA Experiment 20000347 PARAMETER Experiment Name: At_2mM_SA_Sub_P Parameter: Age (day) Value: 14
  misc_feature: MA Experiment 20000347 PARAMETER Experiment Name: At_2mM_SA_Sub_P Parameter: Organism Value: A. thaliana
  misc_feature: MA Experiment 20000347 PARAMETER Experiment Name: At_2mM_SA_Sub_P Parameter: Plant Line Value: WS
  misc_feature: MA Experiment 20000347 PARAMETER Experiment Name: At_2mM_SA_Sub_P Parameter: Timepoint (hr) Value: 6
  misc_feature: MA Experiment 20000347 PARAMETER Experiment Name: At_2mM_SA_Sub_P Parameter: Tissue Value: Aerial
  misc_feature: MA Experiment 20000347 PARAMETER Experiment Name: At_2mM_SA_Sub_P Parameter: Treatment Value: 2mM SA vs. No Treatment
  misc_feature: MA Experiment ID: 20000348 Result: Up-regulated in Transcription
  misc_feature: MA Experiment 20000348 PARAMETER Experiment Name: At_100uM_ABA_Sub_P Parameter: Age (day) Value: 14
  misc_feature: MA Experiment 20000348 PARAMETER Experiment Name: At_100uM_ABA_Sub_P Parameter: Organism Value: A. thaliana
  misc_feature: MA Experiment 20000348 PARAMETER Experiment Name: At_100uM_ABA_Sub_P Parameter: Plant Line Value: WS
  misc_feature: MA Experiment 20000348 PARAMETER Experiment Name: At_100uM_ABA_Sub_P Parameter: Timepoint (hr) Value: 1
  misc_feature: MA Experiment 20000348 PARAMETER Experiment Name: At_100uM_ABA_Sub_P Parameter: Tissue Value: Aerial
  misc_feature: MA Experiment 20000348 PARAMETER Experiment Name: At_100uM_ABA_Sub_P Parameter: Treatment Value: 100uM ABA vs. No Treatment
  misc_feature: MA Experiment ID: 20000352 Result: Up-regulated in Transcription
  misc_feature: MA Experiment 20000352 PARAMETER Experiment Name: At_Drought_Sub_P Parameter: Age (day) Value: 7
  misc_feature: MA Experiment 20000352 PARAMETER Experiment Name: At_Drought_Sub_P Parameter: Organism Value: A. thaliana
  misc_feature: MA Experiment 20000352 PARAMETER Experiment Name: At_Drought_Sub_P Parameter: Plant Line Value: WS
  misc_feature: MA Experiment 20000352 PARAMETER Experiment Name: At_Drought_Sub_P Parameter: Timepoint (hr) Value: 6
  misc_feature: MA Experiment 20000352 PARAMETER Experiment Name: At_Drought_Sub_P Parameter: Tissue Value: Whole Plant
  misc_feature: MA Experiment 20000352 PARAMETER Experiment Name: At_Drought_Sub_P Parameter: Treatment Value: Drought vs. No Drought
atggccgttgattcaactgatcaacggcgagattttgttgtaaggatcgacggtgaagacaatggtgactcagaaaagttttggagagagtcaagcattaacttctggcataatgataagagctctaaaccacccggaggtgaagaagacgacggaagctttgatttcatgcggcggagtagtgagaaatcggaggagccagatccaccgtcgaagcttataaatcaatttctcaacaagcaaaaagcttccggtgatgaaatctctctcgacatggaagctaacatgcctgagcttcaaaaaaatacggttcctcctctgtcgtcaacggcagtttccggttctgcttcaccagtaaccgcgccagtgacggcgagttatcgtaatggaaccggtgatgcgattagacggagacagaacagagtcacgctttctccgtctgttaaagatggtgatagtagtgaagatgaagaaaacagagtagatggatcagaggttgtgaagtgtacctctaatagatcgacgatgaggactaagactttgatgaagatgaagactagatctagattgatggatcctcctactccgacgtatccggatatggtttcgggtcggactccaaggtccgggaatctaaatcccgggtttagtgggagaaacactaaaccgggaactccaaaccaaggaggatccaaggatttggaagaagaggaagatcccttctcagaggaggatttacctgaaggtttaaggaaggagaagatttgtgtttgggttattatagaatggatatttctgattttgatcattgctagtttgatttgtagcctagtcataccttacttgcgtggcaagacactttgggacctagctctatggaaatgggaagtgatggttcttgtcttgatatgtgggagattggtttctagttggattgtgaagctattcgtttacttcgttgaaagcaattttctttggaggaaaaaggttttgtatttcgtttacgggattcgaaagccggtgcagaattgtctatggctagggcttgtgttgatcgcatggcatttcttgttcgacaagaaagttgaaagagagatgcgaagtactgtgcttaagtatgtgactaaagtattaatctgtttacttgttgctgttatcatctggctcataaagactttactggttaaagttcttgcttcctctttccatatgagtacttacttcgatcggattcaagaatcgttgtttactcaatacgtgattgagacgctctcgggacctcctcgtattgagattcatatagaagaggagaaagtagcaaatgatgttaaaaccttcgagatagttggacgtaagctatctcctctaggtccaaaggcggtttcttctccaccacaagtgactgttggaagcggaaggctgcagaagagtccaagcagagttgggaaaagtccggtgctttcgcggtctggttctaagaaagaaggaggggaagaagggatacggatcgatcatttgcagagaatgaacactaagaacgtttcagcttggaaaatgaagaaactgatgaatgttatcaaaaaaggaactctttctactttagatgaacagatacaagacacgacgactcaggaagatgataaggccacacagataagaagtgaattcgaagcaaaacttgcagcgaggaagatttttcagaatgttgctgagcctggatccaggtacatatatatggaagactttatgcgttttctgtccgaagatgagtctgaaagagcaatggatctatttgaaggagcttctgaatgtcacaaaatcagcaaatcttgtctgaagaattgggtggttaatgcctttagagaacgaagagcactagctttaacattaaacgatacaaaaacagcagtgaacaggcttcatcgaatcgttgatgtattggtcagcattgtgattttaatcatctggcttctcattctgggaatcgctacaaccaagttcttgcttgtcataagctctcagcttcttcttgtagtctttgtgtttggaaattcatgtaaaaccatctttgaagcggtcatcttcgtcttcgttatgcatccatttgatgtcggtgacaggtgtgaaatagacggtgtccagatgattgtggaagagatgaacattttgactactgtctttcttcgatttgataatcagaagattgtatatccaaacagtcttctcggaacaaaacctatcgctaactattaccgcagtcctgatatgcaagatgccattgaattctttgtccatatagcaactccacctgaaaagacaactgccttaagacagaggatactcagctatgtagataacaagaaggatcattggcatccatcgccgatgattgtgtttagagatatgtgtggattaaacagtgtgaagatcgcaatgtggccaacacataagatgaatcatcaaaatatgggagagagatatgtgaggagaggtcaattacttgaagagattggtagattatgcagagagttggatatcgaatatcggttatatcctcttaacatcaacgtaaaaagtcttcctgctgctactcccatcacttctgatcgcattcctcctagctggaatcaacaacgcagtgtttga

SEQ ID NO: 97504 - protein, 881 aa, Arabidopsis thaliana
  peptide (1)..(881): Ceres Seq. ID no. 12737924
  misc_feature (641)..(849): Pfam Name: Mechanosensitive ion channel Pfam Description: Mechanosensitive ion channel
  misc_feature (2)..(653): Homolog of NCBI NO: 15231928 NR Description: hypothetical protein; protein id: At3g14810.1
  misc_feature (671)..(879): Homolog of NCBI NO: 15231928 NR Description: hypothetical protein; protein id: At3g14810.1
  misc_feature (2)..(879): Homolog of NCBI NO: 11994592 NR Description: gb|AAD30575.1~gene_id:T21E2.7~strong similarity
  misc_feature (152)..(880): Homolog of NCBI NO: 15218429 NR Description: hypothetical protein; protein id: At1g78610.1
  misc_feature (1)..(133): Homolog of NCBI NO: 15218429 NR Description: hypothetical protein; protein id: At1g78610.1
  misc_feature (41)..(875): Homolog of NCBI NO: 38345847 NR Description: OSJNBa0084K11.11 [Oryza sativa (japonica
  misc_feature (159)..(877): Homolog of NCBI NO: 15227342 NR Description: hypothetical protein; protein id: At2g17000.1
  misc_feature (555)..(881): Homolog of NCBI NO: 12324039 NR Description: unknown protein, 5' partial; 111936-110607
  misc_feature (1)..(368): Homolog of NCBI NO: 30679840 NR Description: expressed protein [Arabidopsis thaliana]
  misc_feature (580)..(879): Homolog of NCBI NO: 30679840 NR Description: expressed protein [Arabidopsis thaliana]
MAVDSTDQRRDFVVRIDGEDNGDSEKFWRESSINFWHNDKSSKPPGGEEDDGSFDFMRRSSEKSEEPDPPSKLINQFLNKQKASGDEISLDMEANMPELQKNTVPPLSSTAVSGSASPVTAPVTASYRNGTGDAIRRRQNRVTLSPSVKDGDSSEDEENRVDGSEVVKCTSNRSTMRTKTLMKMKTRSRLMDPPTPTYPDMVSGRTPRSGNLNPGFSGRNTKPGTPNQGGSKDLEEEEDPFSEEDLPEGLRKEKICVWVIIEWIFLILIIASLICSLVIPYLRGKTLWDLALWKWEVMVLVLICGRLVSSWIVKLFVYFVESNFLWRKKVLYFVYGIRKPVQNCLWLGLVLIAWHFLFDKKVEREMRSTVLKYVTKVLICLLVAVIIWLIKTLLVKVLASSFHMSTYFDRIQESLFTQYVIETLSGPPRIEIHIEEEKVANDVKTFEIVGRKLSPLGPKAVSSPPQVTVGSGRLQKSPSRVGKSPVLSRSGSKKEGGEEGIRIDHLQRMNTKNVSAWKMKKLMNVIKKGTLSTLDEQIQDTTTQEDDKATQIRSEFEAKLAARKIFQNVAEPGSRYIYMEDFMRFLSEDESERAMDLFEGASECHKISKSCLKNWVVNAFRERRALALTLNDTKTAVNRLHRIVDVLVSIVILIIWLLILGIATTKFLLVISSQLLLVVFVFGNSCKTIFEAVIFVFVMHPFDVGDRCEIDGVQMIVEEMNILTTVFLRFDNQKIVYPNSLLGTKPIANYYRSPDMQDAIEFFVHIATPPEKTTALRQRILSYVDNKKDHWHPSPMIVFRDMCGLNSVKIAMWPTHKMNHQNMGERYVRRGQLLEEIGRLCRELDIEYRLYPLNINVKSLPAATPITSDRIPPSWNQQRSV

SEQ ID NO: 97505 - protein, 825 aa, Arabidopsis thaliana
  peptide (1)..(825): Ceres Seq. ID no. 12737925
  misc_feature (585)..(793): Pfam Name: Mechanosensitive ion channel Pfam Description: Mechanosensitive ion channel
  misc_feature (1)..(597): Homolog of NCBI NO: 15231928 NR Description: hypothetical protein; protein id: At3g14810.1
  misc_feature (615)..(823): Homolog of NCBI NO: 15231928 NR Description: hypothetical protein; protein id: At3g14810.1
  misc_feature (1)..(823): Homolog of NCBI NO: 11994592 NR Description: gb|AAD30575.1~gene_id:T21E2.7~strong similarity
  misc_feature (96)..(824): Homolog of NCBI NO: 15218429 NR Description: hypothetical protein; protein id: At1g78610.1
  misc_feature (1)..(77): Homolog of NCBI NO: 15218429 NR Description: hypothetical protein; protein id: At1g78610.1
  misc_feature (1)..(819): Homolog of NCBI NO: 38345847 NR Description: OSJNBa0084K11.11 [Oryza sativa (japonica
  misc_feature (103)..(821): Homolog of NCBI NO: 15227342 NR Description: hypothetical protein; protein id: At2g17000.1
  misc_feature (499)..(825): Homolog of NCBI NO: 12324039 NR Description: unknown protein, 5' partial; 111936-110607
  misc_feature (1)..(312): Homolog of NCBI NO: 30679840 NR Description: expressed protein [Arabidopsis thaliana]
  misc_feature (524)..(823): Homolog of NCBI NO: 30679840 NR Description: expressed protein [Arabidopsis thaliana]
MRRSSEKSEEPDPPSKLINQFLNKQKASGDEISLDMEANMPELQKNTVPPLSSTAVSGSASPVTAPVTASYRNGTGDAIRRRQNRVTLSPSVKDGDSSEDEENRVDGSEVVKCTSNRSTMRTKTLMKMKTRSRLMDPPTPTYPDMVSGRTPRSGNLNPGFSGRNTKPGTPNQGGSKDLEEEEDPFSEEDLPEGLRKEKICVWVIIEWIFLILIIASLICSLVIPYLRGKTLWDLALWKWEVMVLVLICGRLVSSWIVKLFVYFVESNFLWRKKVLYFVYGIRKPVQNCLWLGLVLIAWHFLFDKKVEREMRSTVLKYVTKVLICLLVAVIIWLIKTLLVKVLASSFHMSTYFDRIQESLFTQYVIETLSGPPRIEIHIEEEKVANDVKTFEIVGRKLSPLGPKAVSSPPQVTVGSGRLQKSPSRVGKSPVLSRSGSKKEGGEEGIRIDHLQRMNTKNVSAWKMKKLMNVIKKGTLSTLDEQIQDTTTQEDDKATQIRSEFEAKLAARKIFQNVAEPGSRYIYMEDFMRFLSEDESERAMDLFEGASECHKISKSCLKNWVVNAFRERRALALTLNDTKTAVNRLHRIVDVLVSIVILIIWLLILGIATTKFLLVISSQLLLVVFVFGNSCKTIFEAVIFVFVMHPFDVGDRCEIDGVQMIVEEMNILTTVFLRFDNQKIVYPNSLLGTKPIANYYRSPDMQDAIEFFVHIATPPEKTTALRQRILSYVDNKKDHWHPSPMIVFRDMCGLNSVKIAMWPTHKMNHQNMGERYVRRGQLLEEIGRLCRELDIEYRLYPLNINVKSLPAATPITSDRIPPSWNQQRSV

SEQ ID NO: 97506 - protein, 790 aa, Arabidopsis thaliana
  peptide (1)..(790): Ceres Seq. ID no. 12737926
  misc_feature (550)..(758): Pfam Name: Mechanosensitive ion channel Pfam Description: Mechanosensitive ion channel
  misc_feature (1)..(562): Homolog of NCBI NO: 15231928 NR Description: hypothetical protein; protein id: At3g14810.1
  misc_feature (580)..(788): Homolog of NCBI NO: 15231928 NR Description: hypothetical protein; protein id: At3g14810.1
  misc_feature (1)..(788): Homolog of NCBI NO: 11994592 NR Description: gb|AAD30575.1~gene_id:T21E2.7~strong similarity
  misc_feature (61)..(789): Homolog of NCBI NO: 15218429 NR Description: hypothetical protein; protein id: At1g78610.1
  misc_feature (1)..(42): Homolog of NCBI NO: 15218429 NR Description: hypothetical protein; protein id: At1g78610.1
  misc_feature (1)..(784): Homolog of NCBI NO: 38345847 NR Description: OSJNBa0084K11.11 [Oryza sativa (japonica
  misc_feature (68)..(786): Homolog of NCBI NO: 15227342 NR Description: hypothetical protein; protein id: At2g17000.1
  misc_feature (464)..(790): Homolog of NCBI NO: 12324039 NR Description: unknown protein, 5' partial; 111936-110607
  misc_feature (1)..(277): Homolog of NCBI NO: 30679840 NR Description: expressed protein [Arabidopsis thaliana]
  misc_feature (489)..(788): Homolog of NCBI NO: 30679840 NR Description: expressed protein [Arabidopsis thaliana]
MEANMPELQKNTVPPLSSTAVSGSASPVTAPVTASYRNGTGDAIRRRQNRVTLSPSVKDGDSSEDEENRVDGSEVVKCTSNRSTMRTKTLMKMKTRSRLMDPPTPTYPDMVSGRTPRSGNLNPGFSGRNTKPGTPNQGGSKDLEEEEDPFSEEDLPEGLRKEKICVWVIIEWIFLILIIASLICSLVIPYLRGKTLWDLALWKWEVMVLVLICGRLVSSWIVKLFVYFVESNFLWRKKVLYFVYGIRKPVQNCLWLGLVLIAWHFLFDKKVEREMRSTVLKYVTKVLICLLVAVIIWLIKTLLVKVLASSFHMSTYFDRIQESLFTQYVIETLSGPPRIEIHIEEEKVANDVKTFEIVGRKLSPLGPKAVSSPPQVTVGSGRLQKSPSRVGKSPVLSRSGSKKEGGEEGIRIDHLQRMNTKNVSAWKMKKLMNVIKKGTLSTLDEQIQDTTTQEDDKATQIRSEFEAKLAARKIFQNVAEPGSRYIYMEDFMRFLSEDESERAMDLFEGASECHKISKSCLKNWVVNAFRERRALALTLNDTKTAVNRLHRIVDVLVSIVILIIWLLILGIATTKFLLVISSQLLLVVFVFGNSCKTIFEAVIFVFVMHPFDVGDRCEIDGVQMIVEEMNILTTVFLRFDNQKIVYPNSLLGTKPIANYYRSPDMQDAIEFFVHIATPPEKTTALRQRILSYVDNKKDHWHPSPMIVFRDMCGLNSVKIAMWPTHKMNHQNMGERYVRRGQLLEEIGRLCRELDIEYRLYPLNINVKSLPAATPITSDRIPPSWNQQRSV

SEQ ID NO: 97507 - DNA, 1886 bp, Arabidopsis thaliana
  misc_feature (1)..(1886): Ceres Seq. ID no. 12737960
  misc_feature: MA Experiment ID: 20000307 Result: Up-regulated in Transcription
  misc_feature: MA Experiment 20000307 PARAMETER Experiment Name: At_Germinating_Seeds_Sub_P Parameter: Age (hr) Value: 24 vs. 0
  misc_feature: MA Experiment 20000307 PARAMETER Experiment Name: At_Germinating_Seeds_Sub_P Parameter: Organism Value: A. thaliana
  misc_feature: MA Experiment 20000307 PARAMETER Experiment Name: At_Germinating_Seeds_Sub_P Parameter: Plant Line Value: WS
  misc_feature: MA Experiment 20000307 PARAMETER Experiment Name: At_Germinating_Seeds_Sub_P Parameter: Tissue Value: Germinating Seeds
  misc_feature: MA Experiment ID: 20000314 Result: Up-regulated in Transcription
  misc_feature: MA Experiment 20000314 PARAMETER Experiment Name: At_14day_Shoots-Roots_Sub_P Parameter: Age (day) Value: 14
  misc_feature: MA Experiment 20000314 PARAMETER Experiment Name: At_14day_Shoots-Roots_Sub_P Parameter: Organism Value: A. thaliana
  misc_feature: MA Experiment 20000314 PARAMETER Experiment Name: At_14day_Shoots-Roots_Sub_P Parameter: Plant Line Value: WS
  misc_feature: MA Experiment 20000314 PARAMETER Experiment Name: At_14day_Shoots-Roots_Sub_P Parameter: Tissue Value: Roots vs. Whole Plant
  misc_feature: MA Experiment ID: 20000315 Result: Up-regulated in Transcription
  misc_feature: MA Experiment 20000315 PARAMETER Experiment Name: At_14day_Shoots-Roots_Sub_P Parameter: Age (day) Value: 14
  misc_feature: MA Experiment 20000315 PARAMETER Experiment Name: At_14day_Shoots-Roots_Sub_P Parameter: Organism Value: A. thaliana
  misc_feature: MA Experiment 20000315 PARAMETER Experiment Name: At_14day_Shoots-Roots_Sub_P Parameter: Plant Line Value: WS
  misc_feature: MA Experiment 20000315 PARAMETER Experiment Name: At_14day_Shoots-Roots_Sub_P Parameter: Tissue Value: Shoots vs. Whole Plant
  misc_feature: MA Experiment ID: 20000328 Result: Down-regulated in Transcription
  misc_feature: MA Experiment 20000328 PARAMETER Experiment Name: At_42deg_Heat_Sub_P Parameter: Age (day) Value: 14
  misc_feature: MA Experiment 20000328 PARAMETER Experiment Name: At_42deg_Heat_Sub_P Parameter: Organism Value: A. thaliana
  misc_feature: MA Experiment 20000328 PARAMETER Experiment Name: At_42deg_Heat_Sub_P Parameter: Plant Line Value: WS
  misc_feature: MA Experiment 20000328 PARAMETER Experiment Name: At_42deg_Heat_Sub_P Parameter: Temperature (deg C) Value: 42 vs. 22
  misc_feature: MA Experiment 20000328 PARAMETER Experiment Name: At_42deg_Heat_Sub_P Parameter: Timepoint (hr) Value: 6
  misc_feature: MA Experiment 20000328 PARAMETER Experiment Name: At_42deg_Heat_Sub_P Parameter: Tissue Value: Aerial
  misc_feature: MA Experiment ID: 20000347 Result: Down-regulated in Transcription
  misc_feature: MA Experiment 20000347 PARAMETER Experiment Name: At_2mM_SA_Sub_P Parameter: Age (day) Value: 14
  misc_feature: MA Experiment 20000347 PARAMETER Experiment Name: At_2mM_SA_Sub_P Parameter: Organism Value: A. thaliana
  misc_feature: MA Experiment 20000347 PARAMETER Experiment Name: At_2mM_SA_Sub_P Parameter: Plant Line Value: WS
  misc_feature: MA Experiment 20000347 PARAMETER Experiment Name: At_2mM_SA_Sub_P Parameter: Timepoint (hr) Value: 6
  misc_feature: MA Experiment 20000347 PARAMETER Experiment Name: At_2mM_SA_Sub_P Parameter: Tissue Value: Aerial
  misc_feature: MA Experiment 20000347 PARAMETER Experiment Name: At_2mM_SA_Sub_P Parameter: Treatment Value: 2mM SA vs. No Treatment
  misc_feature: MA Experiment ID: 20000349 Result: Up-regulated in Transcription
  misc_feature: MA Experiment 20000349 PARAMETER Experiment Name: At_100uM_ABA_Sub_P Parameter: Age (day) Value: 14
  misc_feature: MA Experiment 20000349 PARAMETER Experiment Name: At_100uM_ABA_Sub_P Parameter: Organism Value: A. thaliana
  misc_feature: MA Experiment 20000349 PARAMETER Experiment Name: At_100uM_ABA_Sub_P Parameter: Plant Line Value: WS
  misc_feature: MA Experiment 20000349 PARAMETER Experiment Name: At_100uM_ABA_Sub_P Parameter: Timepoint (hr) Value: 6
  misc_feature: MA Experiment 20000349 PARAMETER Experiment Name: At_100uM_ABA_Sub_P Parameter: Tissue Value: Aerial
  misc_feature: MA Experiment 20000349 PARAMETER Experiment Name: At_100uM_ABA_Sub_P Parameter: Treatment Value: 100uM ABA vs. No Treatment
  misc_feature: MA Experiment ID: 20000355 Result: Down-regulated in Transcription
  misc_feature: MA Experiment 20000355 PARAMETER Experiment Name: At_Siliques_Sub_P Parameter: Age (day) Value: 21
  misc_feature: MA Experiment 20000355 PARAMETER Experiment Name: At_Siliques_Sub_P Parameter: Organism Value: A. thaliana
  misc_feature: MA Experiment 20000355 PARAMETER Experiment Name: At_Siliques_Sub_P Parameter: Plant Line Value: WS
  misc_feature: MA Experiment 20000355 PARAMETER Experiment Name: At_Siliques_Sub_P Parameter: Tissue Value: Less Than 5mm Siliques vs. Whole Plant
  misc_feature: MA Experiment ID: 20000440 Result: Up-regulated in Transcription
  misc_feature: MA Experiment 20000440 PARAMETER Experiment Name: At_Closed-Flower__Sub_P Parameter: Tissue Value: Closed Flower vs. Whole Plant
cacaaacaacaacattgttaagaataatggcaccaatcaaagaattcatatccaaattctcagatttcaaaaacaacaagaaactcattctctcctccgccgcaatagccttgctattattggcctccatagtcggaatcgccgccacaacaacaaaccaaaacaaaaaccaaaaaatcacaactctatcttcgacatcacacgccattctaaaatctgtttgcagctcaacactatacccggagctctgtttttccgccgtggcagccaccggaggaaaagagctgacgtcacagaaagaagtcatcgaagcgtcacttaacctaactaccaaagccgtgaaacacaactacttcgctgtcaagaagctgatcgcgaagagaaaaggtttgacaccgcgtgaggtcacggcgcttcacgactgtttggagacaatcgacgagacgttagatgagctccacgtggcggtggaggatcttcatcagtatcctaagcaaaaatctctgaggaaacatgccgatgatctcaaaacactaatcagctcagccattactaatcaagggacttgccttgacggtttctcttacgacgacgccgataggaaagttcgtaaggcgttattgaagggtcaggtacacgtggagcacatgtgtagcaacgcattagcaatgatcaagaacatgacagaaaccgacatagccaactttgagctaagagataagtcttcaaccttcaccaacaacaacaaccgcaagctcaaggaggttaccggcgacttagacagtgatggatggccaaagtggttatccgttggagacagaaggcttcttcaagggtcaacaattaaagcagacgctacggtggcggatgacggaagcggtgactttacaacggtagccgcggctgtggctgcggcgccagagaagagtaacaagaggtttgtgatacatataaaggcaggagtttatagagagaatgtggaagtgacgaagaagaagacgaatataatgttcttgggagatggccgtggcaaaactattatcactggaagtagaaatgtcgtcgatggaagcaccactttccactccgctactgttgctgccgtcggcgagaggtttctagcgcgtgacatcacattccaaaacaccgccggtccgtcgaagcatcaagcggtggctctccgagtcggatcagatttttccgctttttaccaatgcgacatgtttgcttatcaagacacactttatgtccactcaaatcgtcaattctttgtgaaatgtcacataaccggaaccgtcgatttcatcttcggaaacgcagccgcggttttacaagactgcgatataaatgcacgcagaccaaattccggtcagaaaaacatggttaccgcccaaggacggtctgatccgaatcaaaacacggggattgtgatccagaattgtcgtattggtggcacgtcggatcttttggccgtgaaaggaacgttcccgacgtatcttggtcgtccttggaaggaatattcacggacggtgataatgcaatcggatatatccgacgtgatccgacccgaaggatggcatgagtggagcgggagttttgcgttggacactctaacttatagagagtatttgaatagaggaggaggggcaggaactgcaaatagagtgaagtggaagggctataaggtaattacaagtgatacagaagctcagccatttacggctggtcagtttattggtggtggaggctggttagcgtcgaccggttttcctttctcgttaagtctttgaaattaaaagattgacttattattttaataaacattgtatttctctatctacatgtatcattaaatcgatgttcatatatgattctcaagttgaacc

SEQ ID NO: 97508 - protein, 595 aa, Arabidopsis thaliana
  peptide (1)..(595): Ceres Seq. ID no. 12737961
  misc_feature (284)..(581): Pfam Name: Pectinesterase Pfam Description: Pectinesterase
  misc_feature (9)..(595): Homolog of NCBI NO: 15220955 NR Description: pectin methylesterase (PMEU1), putative; protein At1g53830.1, supported by cDNA: gi_13605622 [Arabidopsis >gi|17865767|sp|Q42534|PME2_ARATH Pectinesterase 2 precursor
  misc_feature (14)..(595): Homolog of NCBI NO: 2129667 NR Description: pectinesterase (EC 3.1.1.11) 2 precursor - thaliana (fragment) >gi|903894|gb|AAC50023.1| ATPME2 precursor
  misc_feature (9)..(595): Homolog of NCBI NO: 15231828 NR Description: putative pectin methylesterase; protein id: supported by cDNA: 13261., supported by cDNA: gi_14335009, by cDNA: gi_15529255, supported by cDNA: gi_16604544 [Arabidopsis
  misc_feature (9)..(595): Homolog of NCBI NO: 2895510 NR Description: putative pectin methylesterase [Arabidopsis
  misc_feature (23)..(595): Homolog of NCBI NO: 8671350 NR Description: pectin methylesterase [Nicotiana tabacum]
  misc_feature (21)..(595): Homolog of NCBI NO: 6689892 NR Description: pectin methyl esterase [Solanum tuberosum]
  misc_feature (23)..(595): Homolog of NCBI NO: 29602797 NR Description: pectin methyl-esterase [Nicotiana benthamiana]
  misc_feature (9)..(595): Homolog of NCBI NO: 6093740 NR Description: Pectinesterase U1 precursor (Pectin
  misc_feature (9)..(595): Homolog of NCBI NO: 2098711 NR Description: pectinesterase [Citrus sinensis]
  misc_feature (9)..(595): Homolog of NCBI NO: 6174912 NR Description: Pectinesterase 1.1 precursor (Pectin
QTTTLLRIMAPIKEFISKFSDFKNNKKLILSSAAIALLLLASIVGIAATTTNQNKNQKITTLSSTSHAILKSVCSSTLYPELCFSAVAATGGKELTSQKEVIEASLNLTTKAVKHNYFAVKKLIAKRKGLTPREVTALHDCLETIDETLDELHVAVEDLHQYPKQKSLRKHADDLKTLISSAITNQGTCLDGFSYDDADRKVRKALLKGQVHVEHMCSNALAMIKNMTETDIANFELRDKSSTFTNNNNRKLKEVTGDLDSDGWPKWLSVGDRRLLQGSTIKADATVADDGSGDFTTVAAAVAAAPEKSNKRFVIHIKAGVYRENVEVTKKKTNIMFLGDGRGKTIITGSRNVVDGSTTFHSATVAAVGERFLARDITFQNTAGPSKHQAVALRVGSDFSAFYQCDMFAYQDTLYVHSNRQFFVKCHITGTVDFIFGNAAAVLQDCDINARRPNSGQKNMVTAQGRSDPNQNTGIVIQNCRIGGTSDLLAVKGTFPTYLGRPWKEYSRTVIMQSDISDVIRPEGWHEWSGSFALDTLTYREYLNRGGGAGTANRVKWKGYKVITSDTEAQPFTAGQFIGGGGWLASTGFPFSLSL

SEQ ID NO: 97509 - protein, 587 aa, Arabidopsis thaliana
  peptide (1)..(587): Ceres Seq. ID no. 12737962
  misc_feature (276)..(573): Pfam Name: Pectinesterase Pfam Description: Pectinesterase
  misc_feature (1)..(587): Homolog of NCBI NO: 15220955 NR Description: pectin methylesterase (PMEU1), putative; protein At1g53830.1, supported by cDNA: gi_13605622 [Arabidopsis >gi|17865767|sp|Q42534|PME2_ARATH Pectinesterase 2 precursor
  misc_feature (6)..(587): Homolog of NCBI NO: 2129667 NR Description: pectinesterase (EC 3.1.1.11) 2 precursor - thaliana (fragment) >gi|903894|gb|AAC50023.1| ATPME2 precursor
  misc_feature (1)..(587): Homolog of NCBI NO: 15231828 NR Description: putative pectin methylesterase; protein id: supported by cDNA: 13261., supported by cDNA: gi_14335009, by cDNA: gi_15529255, supported by cDNA: gi_16604544 [Arabidopsis
  misc_feature (1)..(587): Homolog of NCBI NO: 2895510 NR Description: putative pectin methylesterase [Arabidopsis
  misc_feature (15)..(587): Homolog of NCBI NO: 8671350 NR Description: pectin methylesterase [Nicotiana tabacum]
  misc_feature (13)..(587): Homolog of NCBI NO: 6689892 NR Description: pectin methyl esterase [Solanum tuberosum]
  misc_feature (15)..(587): Homolog of NCBI NO: 29602797 NR Description: pectin methyl-esterase [Nicotiana benthamiana]
  misc_feature (1)..(587): Homolog of NCBI NO: 6093740 NR Description: Pectinesterase U1 precursor (Pectin
  misc_feature (1)..(587): Homolog of NCBI NO: 2098711 NR Description: pectinesterase [Citrus sinensis]
  misc_feature (1)..(587): Homolog of NCBI NO: 6174912 NR Description: Pectinesterase 1.1 precursor (Pectin
MAPIKEFISKFSDFKNNKKLILSSAAIALLLLASIVGIAATTTNQNKNQKITTLSSTSHAILKSVCSSTLYPELCFSAVAATGGKELTSQKEVIEASLNLTTKAVKHNYFAVKKLIAKRKGLTPREVTALHDCLETIDETLDELHVAVEDLHQYPKQKSLRKHADDLKTLISSAITNQGTCLDGFSYDDADRKVRKALLKGQVHVEHMCSNALAMIKNMTETDIANFELRDKSSTFTNNNNRKLKEVTGDLDSDGWPKWLSVGDRRLLQGSTIKADATVADDGSGDFTTVAAAVAAAPEKSNKRFVIHIKAGVYRENVEVTKKKTNIMFLGDGRGKTIITGSRNVVDGSTTFHSATVAAVGERFLARDITFQNTAGPSKHQAVALRVGSDFSAFYQCDMFAYQDTLYVHSNRQFFVKCHITGTVDFIFGNAAAVLQDCDINARRPNSGQKNMVTAQGRSDPNQNTGIVIQNCRIGGTSDLLAVKGTFPTYLGRPWKEYSRTVIMQSDISDVIRPEGWHEWSGSFALDTLTYREYLNRGGGAGTANRVKWKGYKVITSDTEAQPFTAGQFIGGGGWLASTGFPFSLSL

SEQ ID NO: 97510 - protein, 380 aa, Arabidopsis thaliana
  peptide (1)..(380): Ceres Seq. ID no. 12737963
  misc_feature (69)..(366): Pfam Name: Pectinesterase Pfam Description: Pectinesterase
  misc_feature (1)..(380): Homolog of NCBI NO: 15220955 NR Description: pectin methylesterase (PMEU1), putative; protein At1g53830.1, supported by cDNA: gi_13605622 [Arabidopsis >gi|17865767|sp|Q42534|PME2_ARATH Pectinesterase 2 precursor
  misc_feature (1)..(380): Homolog of NCBI NO: 2129667 NR Description: pectinesterase (EC 3.1.1.11) 2 precursor - thaliana (fragment) >gi|903894|gb|AAC50023.1| ATPME2 precursor
  misc_feature (1)..(380): Homolog of NCBI NO: 15231828 NR Description: putative pectin methylesterase; protein id: supported by cDNA: 13261., supported by cDNA: gi_14335009, by cDNA: gi_15529255, supported by cDNA: gi_16604544 [Arabidopsis
  misc_feature (1)..(380): Homolog of NCBI NO: 2895510 NR Description: putative pectin methylesterase [Arabidopsis
  misc_feature (1)..(380): Homolog of NCBI NO: 8671350 NR Description: pectin methylesterase [Nicotiana tabacum]
  misc_feature (1)..(380): Homolog of NCBI NO: 6689892 NR Description: pectin methyl esterase [Solanum tuberosum]
  misc_feature (1)..(380): Homolog of NCBI NO: 29602797 NR Description: pectin methyl-esterase [Nicotiana benthamiana]
  misc_feature (1)..(380): Homolog of NCBI NO: 6093740 NR Description: Pectinesterase U1 precursor (Pectin
  misc_feature (1)..(380): Homolog of NCBI NO: 2098711 NR Description: pectinesterase [Citrus sinensis]
  misc_feature (1)..(380): Homolog of NCBI NO: 6174912 NR Description: Pectinesterase 1.1 precursor (Pectin
MCSNALAMIKNMTETDIANFELRDKSSTFTNNNNRKLKEVTGDLDSDGWPKWLSVGDRRLLQGSTIKADATVADDGSGDFTTVAAAVAAAPEKSNKRFVIHIKAGVYRENVEVTKKKTNIMFLGDGRGKTIITGSRNVVDGSTTFHSATVAAVGERFLARDITFQNTAGPSKHQAVALRVGSDFSAFYQCDMFAYQDTLYVHSNRQFFVKCHITGTVDFIFGNAAAVLQDCDINARRPNSGQKNMVTAQGRSDPNQNTGIVIQNCRIGGTSDLLAVKGTFPTYLGRPWKEYSRTVIMQSDISDVIRPEGWHEWSGSFALDTLTYREYLNRGGGAGTANRVKWKGYKVITSDTEAQPFTAGQFIGGGGWLASTGFPFSLSL

SEQ ID NO: 97511 - DNA, 939 bp, Arabidopsis thaliana
  misc_feature (1)..(939): Ceres Seq. ID no. 12737980
  misc_feature: MA Experiment ID: 108462 Result: Up-regulated in Transcription
  misc_feature: MA Experiment 108462 PARAMETER Experiment Name: At_Germinating_Seeds_cDNA_P Parameter: Age (day) Value: 2 vs. 0
  misc_feature: MA Experiment 108462 PARAMETER Experiment Name: At_Germinating_Seeds_cDNA_P Parameter: Tissue Value: Germinating Seeds
  misc_feature: MA Experiment ID: 108464 Result: Up-regulated in Transcription
  misc_feature: MA Experiment 108464 PARAMETER Experiment Name: At_Germinating_Seeds_cDNA_P Parameter: Age (day) Value: 4 vs. 0
  misc_feature: MA Experiment 108464 PARAMETER Experiment Name: At_Germinating_Seeds_cDNA_P Parameter: Tissue Value: Germinating Seeds
  misc_feature: MA Experiment ID: 108488 Result: Down-regulated in Transcription
  misc_feature: MA Experiment ID: 108572 Result: Up-regulated in Transcription
  misc_feature: MA Experiment 108572 PARAMETER Experiment Name: At_Drought_cDNA_P Parameter: Timepoint (hr) Value: 1
  misc_feature: MA Experiment 108572 PARAMETER Experiment Name: At_Drought_cDNA_P Parameter: Tissue Value: Aerial
  misc_feature: MA Experiment 108572 PARAMETER Experiment Name: At_Drought_cDNA_P Parameter: Treatment Value: Drought vs. No Drought
  misc_feature: MA Experiment ID: 108573 Result: Up-regulated in Transcription
  misc_feature: MA Experiment 108573 PARAMETER Experiment Name: At_Drought_cDNA_P Parameter: Timepoint (hr) Value: 6
  misc_feature: MA Experiment 108573 PARAMETER Experiment Name: At_Drought_cDNA_P Parameter: Tissue Value: Aerial
  misc_feature: MA Experiment 108573 PARAMETER Experiment Name: At_Drought_cDNA_P Parameter: Treatment Value: Drought vs. No Drought
  misc_feature: MA Experiment ID: 108577 Result: Up-regulated in Transcription
  misc_feature: MA Experiment 108577 PARAMETER Experiment Name: At_42deg_Heat_cDNA_P Parameter: Temperature (deg C) Value: 42 vs. 22
  misc_feature: MA Experiment 108577 PARAMETER Experiment Name: At_42deg_Heat_cDNA_P Parameter: Timepoint (hr) Value: 6
  misc_feature: MA Experiment 108577 PARAMETER Experiment Name: At_42deg_Heat_cDNA_P Parameter: Tissue Value: Aerial
  misc_feature: MA Experiment ID: 108608 Result: Up-regulated in Transcription
  misc_feature: MA Experiment 108608 PARAMETER Experiment Name: At_100uM_ABA_cDNA_P Parameter: Timepoint (hr) Value: 1
  misc_feature: MA Experiment 108608 PARAMETER Experiment Name: At_100uM_ABA_cDNA_P Parameter: Tissue Value: Aerial
  misc_feature: MA Experiment 108608 PARAMETER Experiment Name: At_100uM_ABA_cDNA_P Parameter: Treatment Value: 100uM ABA vs. No Treatment
  misc_feature: MA Experiment ID: 20000069 Result: Up-regulated in Transcription
  misc_feature: MA Experiment 20000069 PARAMETER Experiment Name: At_100uM_ABA_Mutants_cDNA_P Parameter: Plant Line Value: CS23
  misc_feature: MA Experiment 20000069 PARAMETER Experiment Name: At_100uM_ABA_Mutants_cDNA_P Parameter: Timepoint (hr) Value: 6
  misc_feature: MA Experiment 20000069 PARAMETER Experiment Name: At_100uM_ABA_Mutants_cDNA_P Parameter: Tissue Value: Aerial
  misc_feature: MA Experiment 20000069 PARAMETER Experiment Name: At_100uM_ABA_Mutants_cDNA_P Parameter: Treatment Value: 100uM ABA vs. No Treatment
  misc_feature: MA Experiment ID: 20000070 Result: Up-regulated in Transcription
  misc_feature: MA Experiment 20000070 PARAMETER Experiment Name: At_100uM_ABA_Mutants_cDNA_P Parameter: Plant Line Value: CS24
  misc_feature: MA Experiment 20000070 PARAMETER Experiment Name: At_100uM_ABA_Mutants_cDNA_P Parameter: Timepoint (hr) Value: 6
  misc_feature: MA Experiment 20000070 PARAMETER Experiment Name: At_100uM_ABA_Mutants_cDNA_P Parameter: Tissue Value: Aerial
  misc_feature: MA Experiment 20000070 PARAMETER Experiment Name: At_100uM_ABA_Mutants_cDNA_P Parameter: Treatment Value: 100uM ABA vs. No Treatment
  misc_feature: MA Experiment ID: 20000071 Result: Up-regulated in Transcription
  misc_feature: MA Experiment 20000071 PARAMETER Experiment Name: At_100uM_ABA_Mutants_cDNA_P Parameter: Plant Line Value: CS8104
  misc_feature: MA Experiment 20000071 PARAMETER Experiment Name: At_100uM_ABA_Mutants_cDNA_P Parameter: Timepoint (hr) Value: 6
  misc_feature: MA Experiment 20000071 PARAMETER Experiment Name: At_100uM_ABA_Mutants_cDNA_P Parameter: Tissue Value: Aerial
  misc_feature: MA Experiment 20000071 PARAMETER Experiment Name: At_100uM_ABA_Mutants_cDNA_P Parameter: Treatment Value: 100uM ABA vs. No Treatment
  misc_feature: MA Experiment ID: 20000072 Result: Up-regulated in Transcription
  misc_feature: MA Experiment 20000072 PARAMETER Experiment Name: At_100uM_ABA_Mutants_cDNA_P Parameter: Plant Line Value: CS8105
  misc_feature: MA Experiment 20000072 PARAMETER Experiment Name: At_100uM_ABA_Mutants_cDNA_P Parameter: Timepoint (hr) Value: 6
  misc_feature: MA Experiment 20000072 PARAMETER Experiment Name: At_100uM_ABA_Mutants_cDNA_P Parameter: Tissue Value: Aerial
  misc_feature: MA Experiment 20000072 PARAMETER Experiment Name: At_100uM_ABA_Mutants_cDNA_P Parameter: Treatment Value: 100uM ABA vs. No Treatment
  misc_feature: MA Experiment ID: 20000086 Result: Up-regulated in Transcription
  misc_feature: MA Experiment 20000086 PARAMETER Experiment Name: At_100uM_ABA_Mutants_cDNA_P Parameter: Plant Line Value: CS22
  misc_feature: MA Experiment 20000086 PARAMETER Experiment Name: At_100uM_ABA_Mutants_cDNA_P Parameter: Timepoint (hr) Value: 6
  misc_feature: MA Experiment 20000086 PARAMETER Experiment Name: At_100uM_ABA_Mutants_cDNA_P Parameter: Tissue Value: Aerial
  misc_feature: MA Experiment 20000086 PARAMETER Experiment Name: At_100uM_ABA_Mutants_cDNA_P Parameter: Treatment Value: 100uM ABA vs. No Treatment
  misc_feature: MA Experiment ID: 20000087 Result: Up-regulated in Transcription
  misc_feature: MA Experiment 20000087 PARAMETER Experiment Name: At_100uM_ABA_Mutants_cDNA_P Parameter: Plant Line Value: WS
  misc_feature: MA Experiment 20000087 PARAMETER Experiment Name: At_100uM_ABA_Mutants_cDNA_P Parameter: Timepoint (hr) Value: 6
  misc_feature: MA Experiment 20000087 PARAMETER Experiment Name: At_100uM_ABA_Mutants_cDNA_P Parameter: Tissue Value: Aerial
  misc_feature: MA Experiment 20000087 PARAMETER Experiment Name: At_100uM_ABA_Mutants_cDNA_P Parameter: Treatment Value: 100uM ABA vs. No Treatment
  misc_feature: MA Experiment ID: 20000088 Result: Up-regulated in Transcription
  misc_feature: MA Experiment 20000088 PARAMETER Experiment Name: At_100uM_ABA_Mutants_cDNA_P Parameter: Plant Line Value: Landsberg
  misc_feature: MA Experiment 20000088 PARAMETER Experiment Name: At_100uM_ABA_Mutants_cDNA_P Parameter: Timepoint (hr) Value: 6
  misc_feature: MA Experiment 20000088 PARAMETER Experiment Name: At_100uM_ABA_Mutants_cDNA_P Parameter: Tissue Value: Aerial
  misc_feature: MA Experiment 20000088 PARAMETER Experiment Name: At_100uM_ABA_Mutants_cDNA_P Parameter: Treatment Value: 100uM ABA vs. No Treatment
  misc_feature: MA Experiment ID: 20000117 Result: Up-regulated in Transcription
  misc_feature: MA Experiment 20000117 PARAMETER Experiment Name: At_100uM_ABA_Mutants_cDNA_P Parameter: Plant Line Value: Columbia
  misc_feature: MA Experiment 20000117 PARAMETER Experiment Name: At_100uM_ABA_Mutants_cDNA_P Parameter: Timepoint (hr) Value: 6
  misc_feature: MA Experiment 20000117 PARAMETER Experiment Name: At_100uM_ABA_Mutants_cDNA_P Parameter: Tissue Value: Aerial
  misc_feature: MA Experiment 20000117 PARAMETER Experiment Name: At_100uM_ABA_Mutants_cDNA_P Parameter: Treatment Value: 100uM ABA vs. No Treatment
  misc_feature: MA Experiment ID: 20000166 Result: Up-regulated in Transcription
  misc_feature: MA Experiment 20000166 PARAMETER Experiment Name: At_100uM_ABA_P Parameter: Age (day) Value: 14
  misc_feature: MA Experiment 20000166 PARAMETER Experiment Name: At_100uM_ABA_P Parameter: Organism Value: A. thaliana
  misc_feature: MA Experiment 20000166 PARAMETER Experiment Name: At_100uM_ABA_P Parameter: Plant Line Value: WS
  misc_feature: MA Experiment 20000166 PARAMETER Experiment Name: At_100uM_ABA_P Parameter: Timepoint (hr) Value: 1
  misc_feature: MA Experiment 20000166 PARAMETER Experiment Name: At_100uM_ABA_P Parameter: Tissue Value: Aerial
  misc_feature: MA Experiment 20000166 PARAMETER Experiment Name: At_100uM_ABA_P Parameter: Treatment Value: 100uM ABA vs. No Treatment
  misc_feature: MA Experiment ID: 20000173 Result: Up-regulated in Transcription
  misc_feature: MA Experiment 20000173 PARAMETER Experiment Name: At_42deg_Heat_P Parameter: Age (day) Value: 14
  misc_feature: MA Experiment 20000173 PARAMETER Experiment Name: At_42deg_Heat_P Parameter: Organism Value: A. thaliana
  misc_feature: MA Experiment 20000173 PARAMETER Experiment Name: At_42deg_Heat_P Parameter: Plant Line Value: WS
  misc_feature: MA Experiment 20000173 PARAMETER Experiment Name: At_42deg_Heat_P Parameter: Temperature (deg C) Value: 42 vs. 22
  misc_feature: MA Experiment 20000173 PARAMETER Experiment Name: At_42deg_Heat_P Parameter: Timepoint (hr) Value: 6
  misc_feature: MA Experiment 20000173 PARAMETER Experiment Name: At_42deg_Heat_P Parameter: Tissue Value: Aerial
  misc_feature: MA Experiment ID: 20000184 Result: Down-regulated in Transcription
  misc_feature: MA Experiment 20000184 PARAMETER Experiment Name: At_Shoots__P Parameter: Age (day) Value: 7
  misc_feature: MA Experiment 20000184 PARAMETER Experiment Name: At_Shoots__P Parameter: Tissue Value: Shoots vs. Whole Plant
  misc_feature: MA Experiment ID: 20000234 Result: Down-regulated in Transcription
  misc_feature: MA Experiment 20000234 PARAMETER Experiment Name: At_Siliques_P Parameter: Age (day) Value: 21
  misc_feature: MA Experiment 20000234 PARAMETER Experiment Name: At_Siliques_P Parameter: Organism Value: A. thaliana
  misc_feature: MA Experiment 20000234 PARAMETER Experiment Name: At_Siliques_P Parameter: Plant Line Value: WS
  misc_feature: MA Experiment 20000234 PARAMETER Experiment Name: At_Siliques_P Parameter: Tissue Value: Less Than 5mm Siliques vs. Whole Plant
  misc_feature: MA Experiment ID: 20000437 Result: Up-regulated in Transcription
  misc_feature: MA Experiment 20000437 PARAMETER Experiment Name: At_Drought_P Parameter: Age (day) Value: 8
  misc_feature: MA Experiment 20000437 PARAMETER Experiment Name: At_Drought_P Parameter: Organism Value: A. thaliana
  misc_feature: MA Experiment 20000437 PARAMETER Experiment Name: At_Drought_P Parameter: Plant Line Value: WS
  misc_feature: MA Experiment 20000437 PARAMETER Experiment Name: At_Drought_P Parameter: Timepoint (hr) Value: 24
  misc_feature: MA Experiment 20000437 PARAMETER Experiment Name: At_Drought_P Parameter: Tissue Value: Whole Plant
  misc_feature: MA Experiment 20000437 PARAMETER Experiment Name: At_Drought_P Parameter: Treatment Value: Drought vs. No Drought
  misc_feature: MA Experiment ID: 20001557 Result: Down-regulated in Transcription
  misc_feature: MA Experiment 20001557 PARAMETER Experiment Name: At_Drought_Soil_Dry_P Parameter: Age (day) Value: 27
  misc_feature: MA Experiment 20001557 PARAMETER Experiment Name: At_Drought_Soil_Dry_P Parameter: Organism Value: A. thaliana
  misc_feature: MA Experiment 20001557 PARAMETER Experiment Name: At_Drought_Soil_Dry_P Parameter: Plant Line Value: WS
  misc_feature: MA Experiment 20001557 PARAMETER Experiment Name: At_Drought_Soil_Dry_P Parameter: Post Timepoint (hr) Value: 3
  misc_feature: MA Experiment 20001557 PARAMETER Experiment Name: At_Drought_Soil_Dry_P Parameter: Post-Treatment Value: Re-Water vs. No Drought
  misc_feature: MA Experiment 20001557 PARAMETER Experiment Name: At_Drought_Soil_Dry_P Parameter: Timepoint (day) Value: 13
  misc_feature: MA Experiment 20001557 PARAMETER Experiment Name: At_Drought_Soil_Dry_P Parameter: Treatment Value: Drought vs. No Drought
  misc_feature: MA Experiment ID: 20001558 Result: Down-regulated in Transcription
  misc_feature: MA Experiment 20001558 PARAMETER Experiment Name: At_Drought_Soil_Dry_P Parameter: Age (day) Value: 27
  misc_feature: MA Experiment 20001558 PARAMETER Experiment Name: At_Drought_Soil_Dry_P Parameter: Organism Value: A. thaliana
  misc_feature: MA Experiment 20001558 PARAMETER Experiment Name: At_Drought_Soil_Dry_P Parameter: Plant Line Value: WS
  misc_feature: MA Experiment 20001558 PARAMETER Experiment Name: At_Drought_Soil_Dry_P Parameter: Post Timepoint (hr) Value: 6
  misc_feature: MA Experiment 20001558 PARAMETER Experiment Name: At_Drought_Soil_Dry_P Parameter: Post-Treatment Value: Re-Water vs. No Drought
  misc_feature: MA Experiment 20001558 PARAMETER Experiment Name: At_Drought_Soil_Dry_P Parameter: Timepoint (day) Value: 13
  misc_feature: MA Experiment 20001558 PARAMETER Experiment Name: At_Drought_Soil_Dry_P Parameter: Treatment Value: Drought vs. No Drought
  misc_feature: MA Experiment ID: 20001560 Result: Down-regulated in Transcription
  misc_feature: MA Experiment 20001560 PARAMETER Experiment Name: At_Drought_Soil_Dry_P Parameter: Age (day) Value: 28
  misc_feature: MA Experiment 20001560 PARAMETER Experiment Name: At_Drought_Soil_Dry_P Parameter: Organism Value: A. thaliana
  misc_feature: MA Experiment 20001560 PARAMETER Experiment Name: At_Drought_Soil_Dry_P Parameter: Plant Line Value: WS
  misc_feature: MA Experiment 20001560 PARAMETER Experiment Name: At_Drought_Soil_Dry_P Parameter: Post Timepoint (hr) Value: None
  misc_feature: MA Experiment 20001560 PARAMETER Experiment Name: At_Drought_Soil_Dry_P Parameter: Post-Treatment Value: None
  misc_feature: MA Experiment 20001560 PARAMETER Experiment Name: At_Drought_Soil_Dry_P Parameter: Timepoint (day) Value: 14
  misc_feature: MA Experiment 20001560 PARAMETER Experiment Name: At_Drought_Soil_Dry_P Parameter: Treatment Value: Drought vs. No Drought
gttttggcataacgaagcatcttcttcttcttccttgtatttattatccatttccagagattctcccttgtgagataacaacgaagaacgaaagagagagagagagagagagatatgatggacggcgttgaaggcggcacggcgatgtacggtggtctcgagacggtgcaatacgtacggacgcatcatcaacatctgtgcagagaaaaccagtgtacctctgctcttgtcaaacacatcaaagctcctcttcatctcgtttggtcacttgtacggagatttgatcagccgcagaaatacaaaccgtttgtgagcagatgtacagtaatcggtgatcctgaaatcggcagtcttagagaagtcaatgttaaatctggtcttcctgcaacaacatctactgagagattagaacttcttgatgatgaagaacacatcctcggtatcaaaatcatcggtggtgatcacagacttaagaattactcgtcgattttgacggttcatccggagataatcgagggaagagcaggaacgatggtgattgaatcgtttgtagttgatgttcctcaaggtaacacaaaggatgagacttgctactttgttgaagcacttatcagatgtaatctcaagtcactagcagatgtttctgaaagattggcttctcaggacattactcagtgaactacataatcaatgaacaagggcattgaagtgaagtatcaattccagtttgtgatataatcaatattcttcaggatttttttggtttggcctagatatatatatagatatctatcctcggtaatgaccagtctaaaaagatgtacatattgtcccaatggtgaagttttgatgtaagatatctcctggtggtttgttatttgtagatatttttgtaaacaatgtaaatgtgaatggtttatgatgtataatatatagttc

SEQ ID NO: 97512 - protein, 187 aa, Arabidopsis thaliana
  peptide (1)..(187): Ceres Seq. ID no. 12737981
  misc_feature (32)..(171): Pfam Name: Pathogenesis-related protein Bet v I family Pfam Description: Pathogenesis-related protein Bet v I family
  misc_feature (1)..(187): Homolog of NCBI NO: 18378830 NR Description: expressed protein; protein id: At1g01360.1,
  misc_feature (2)..(187): Homolog of NCBI NO: 25348264 NR Description: hypothetical protein F6F3.16 - Arabidopsis >gi|9665155|gb|AAF97339.1|AC023628_20 Unknown protein
  misc_feature (2)..(187): Homolog of NCBI NO: 21593547 NR Description: unknown [Arabidopsis thaliana]
  misc_feature (1)..(186): Homolog of NCBI NO: 18411513 NR Description: Expressed protein; protein id: At4g01026.1,
  misc_feature (1)..(186): Homolog of NCBI NO: 21593105 NR Description: unknown [Arabidopsis thaliana]
  misc_feature (49)..(186): Homolog of NCBI NO: 7486358 NR Description: hypothetical protein F3I3.40 - Arabidopsis >gi|5262156|emb|CAB45785.1| putative protein [Arabidopsis >gi|7267599|emb|CAB80911.1| putative protein [Arabidopsis
  misc_feature (19)..(187): Homolog of NCBI NO: 15238661 NR Description: putative protein; protein id: At5g53160.1 thaliana] >gi|9757997|dbj|BAB08419.1| to unknown protein [Arabidopsis thaliana]
  misc_feature (19)..(185): Homolog of NCBI NO: 30687786 NR Description: expressed protein [Arabidopsis thaliana]
  misc_feature (19)..(185): Homolog of NCBI NO: 7486961 NR Description: hypothetical protein T13J8.30 - Arabidopsis >gi|4455351|emb|CAB36761.1| putative protein [Arabidopsis >gi|7269646|emb|CAB79594.1| putative protein [Arabidopsis
  misc_feature (25)..(183): Homolog of NCBI NO: 18404709 NR Description: expressed protein; protein id: At2g38310.1, by cDNA: 32244., supported by cDNA: gi_14517501, supported by gi_15809747 [Arabidopsis thaliana] >gi|7487162|pir||T02514
MMDGVEGGTAMYGGLETVQYVRTHHQHLCRENQCTSALVKHIKAPLHLVWSLVRRFDQPQKYKPFVSRCTVIGDPEIGSLREVNVKSGLPATTSTERLELLDDEEHILGIKIIGGDHRLKNYSSILTVHPEIIEGRAGTMVIESFVVDVPQGNTKDETCYFVEALIRCNLKSLADVSERLASQDITQ

SEQ ID NO: 97513 - protein, 186 aa, Arabidopsis thaliana
  peptide (1)..(186): Ceres Seq. ID no. 12737982
  misc_feature (31)..(170): Pfam Name: Pathogenesis-related protein Bet v I family Pfam Description: Pathogenesis-related protein Bet v I family
  misc_feature (1)..(186): Homolog of NCBI NO: 18378830 NR Description: expressed protein; protein id: At1g01360.1,
  misc_feature (1)..(186): Homolog of NCBI NO: 25348264 NR Description: hypothetical protein F6F3.16 - Arabidopsis >gi|9665155|gb|AAF97339.1|AC023628_20 Unknown protein
  misc_feature (1)..(186): Homolog of NCBI NO: 21593547 NR Description: unknown [Arabidopsis thaliana]
  misc_feature (1)..(185): Homolog of NCBI NO: 18411513 NR Description: Expressed protein; protein id: At4g01026.1,
  misc_feature (1)..(185): Homolog of NCBI NO: 21593105 NR Description: unknown [Arabidopsis thaliana]
  misc_feature (48)..(185): Homolog of NCBI NO: 7486358 NR Description: hypothetical protein F3I3.40 - Arabidopsis >gi|5262156|emb|CAB45785.1| putative protein [Arabidopsis >gi|7267599|emb|CAB80911.1| putative protein [Arabidopsis
  misc_feature (18)..(186): Homolog of NCBI NO: 15238661 NR Description: putative protein; protein id: At5g53160.1 thaliana] >gi|9757997|dbj|BAB08419.1| to unknown protein [Arabidopsis thaliana]
  misc_feature (18)..(184): Homolog of NCBI NO: 30687786 NR Description: expressed protein [Arabidopsis thaliana]
  misc_feature (18)..(184): Homolog of NCBI NO: 7486961 NR Description: hypothetical protein T13J8.30 - Arabidopsis >gi|4455351|emb|CAB36761.1| putative protein [Arabidopsis >gi|7269646|emb|CAB79594.1| putative protein [Arabidopsis
  misc_feature (24)..(182): Homolog of NCBI NO: 18404709 NR Description: expressed protein; protein id: At2g38310.1, by cDNA: 32244., supported by cDNA: gi_14517501, supported by gi_15809747 [Arabidopsis thaliana] >gi|7487162|pir||T02514
MDGVEGGTAMYGGLETVQYVRTHHQHLCRENQCTSALVKHIKAPLHLVWSLVRRFDQPQKYKPFVSRCTVIGDPEIGSLREVNVKSGLPATTSTERLELLDDEEHILGIKIIGGDHRLKNYSSILTVHPEIIEGRAGTMVIESFVVDVPQGNTKDETCYFVEALIRCNLKSLADVSERLASQDITQ

SEQ ID NO: 97514 - protein, 177 aa, Arabidopsis thaliana; identical to SEQ ID NO: 26833
  peptide (1)..(177): Ceres Seq. ID no. 12737983
  misc_feature (22)..(161): Pfam Name: Pathogenesis-related protein Bet v I family Pfam Description: Pathogenesis-related protein Bet v I family
  misc_feature (1)..(177): Homolog of NCBI NO: 18378830 NR Description: expressed protein; protein id: At1g01360.1,
  misc_feature (1)..(177): Homolog of NCBI NO: 25348264 NR Description: hypothetical protein F6F3.16 - Arabidopsis >gi|9665155|gb|AAF97339.1|AC023628_20 Unknown protein
  misc_feature (1)..(177): Homolog of NCBI NO: 21593547 NR Description: unknown [Arabidopsis thaliana]
  misc_feature (1)..(176): Homolog of NCBI NO: 18411513 NR Description: Expressed protein; protein id: At4g01026.1,
  misc_feature (1)..(176): Homolog of NCBI NO: 21593105 NR Description: unknown [Arabidopsis thaliana]
  misc_feature (39)..(176): Homolog of NCBI NO: 7486358 NR Description: hypothetical protein F3I3.40 - Arabidopsis >gi|5262156|emb|CAB45785.1| putative protein [Arabidopsis >gi|7267599|emb|CAB80911.1| putative protein [Arabidopsis
  misc_feature (9)..(177): Homolog of NCBI NO: 15238661 NR Description: putative protein; protein id: At5g53160.1 thaliana] >gi|9757997|dbj|BAB08419.1| to unknown protein [Arabidopsis thaliana]
  misc_feature (9)..(175): Homolog of NCBI NO: 30687786 NR Description: expressed protein [Arabidopsis thaliana]
  misc_feature (9)..(175): Homolog of NCBI NO: 7486961 NR Description: hypothetical protein T13J8.30 - Arabidopsis >gi|4455351|emb|CAB36761.1| putative protein [Arabidopsis >gi|7269646|emb|CAB79594.1| putative protein [Arabidopsis
  misc_feature (15)..(173): Homolog of NCBI NO: 18404709 NR Description: expressed protein; protein id: At2g38310.1, by cDNA: 32244., supported by cDNA: gi_14517501, supported by gi_15809747 [Arabidopsis thaliana] >gi|7487162|pir||T02514

SEQ ID NO: 97515 - DNA, 1418 bp, Arabidopsis thaliana
  misc_feature (1)..(1418): Ceres Seq. ID no. 12738006
  misc_feature: MA Experiment ID: 108434 Result: Up-regulated in Transcription
  misc_feature: MA Experiment 108434 PARAMETER Experiment Name: At_Root_Tips_cDNA_P Parameter: Tissue Value: Root Tips
  misc_feature: MA Experiment ID: 108577 Result: Down-regulated in Transcription
  misc_feature: MA Experiment 108577 PARAMETER Experiment Name: At_42deg_Heat_cDNA_P Parameter: Temperature (deg C) Value: 42 vs. 22
  misc_feature: MA Experiment 108577 PARAMETER Experiment Name: At_42deg_Heat_cDNA_P Parameter: Timepoint (hr) Value: 6
  misc_feature: MA Experiment 108577 PARAMETER Experiment Name: At_42deg_Heat_cDNA_P Parameter: Tissue Value: Aerial
  misc_feature: MA Experiment ID: 20000069 Result: Up-regulated in Transcription
  misc_feature: MA Experiment 20000069 PARAMETER Experiment Name: At_100uM_ABA_Mutants_cDNA_P Parameter: Plant Line Value: CS23
  misc_feature: MA Experiment 20000069 PARAMETER Experiment Name: At_100uM_ABA_Mutants_cDNA_P Parameter: Timepoint (hr) Value: 6
  misc_feature: MA Experiment 20000069 PARAMETER Experiment Name: At_100uM_ABA_Mutants_cDNA_P Parameter: Tissue Value: Aerial
  misc_feature: MA Experiment 20000069 PARAMETER Experiment Name: At_100uM_ABA_Mutants_cDNA_P Parameter: Treatment Value: 100uM ABA vs. No Treatment
  misc_feature: MA Experiment ID: 20000070 Result: Up-regulated in Transcription
  misc_feature: MA Experiment 20000070 PARAMETER Experiment Name: At_100uM_ABA_Mutants_cDNA_P Parameter: Plant Line Value: CS24
  misc_feature: MA Experiment 20000070 PARAMETER Experiment Name: At_100uM_ABA_Mutants_cDNA_P Parameter: Timepoint (hr) Value: 6
  misc_feature: MA Experiment 20000070 PARAMETER Experiment Name: At_100uM_ABA_Mutants_cDNA_P Parameter: Tissue Value: Aerial
  misc_feature: MA Experiment 20000070 PARAMETER Experiment Name: At_100uM_ABA_Mutants_cDNA_P Parameter: Treatment Value: 100uM ABA vs. No Treatment
  misc_feature: MA Experiment ID: 20000071 Result: Up-regulated in Transcription
  misc_feature: MA Experiment 20000071 PARAMETER Experiment Name: At_100uM_ABA_Mutants_cDNA_P Parameter: Plant Line Value: CS8104
  misc_feature: MA Experiment 20000071 PARAMETER Experiment Name: At_100uM_ABA_Mutants_cDNA_P Parameter: Timepoint (hr) Value: 6
  misc_feature: MA Experiment 20000071 PARAMETER Experiment Name: At_100uM_ABA_Mutants_cDNA_P Parameter: Tissue Value: Aerial
  misc_feature: MA Experiment 20000071 PARAMETER Experiment Name: At_100uM_ABA_Mutants_cDNA_P Parameter: Treatment Value: 100uM ABA vs. No Treatment
  misc_feature: MA Experiment ID: 20000072 Result: Up-regulated in Transcription
  misc_feature: MA Experiment 20000072 PARAMETER Experiment Name: At_100uM_ABA_Mutants_cDNA_P Parameter: Plant Line Value: CS8105
  misc_feature: MA Experiment 20000072 PARAMETER Experiment Name: At_100uM_ABA_Mutants_cDNA_P Parameter: Timepoint (hr) Value: 6
  misc_feature: MA Experiment 20000072 PARAMETER Experiment Name: At_100uM_ABA_Mutants_cDNA_P Parameter: Tissue Value: Aerial
  misc_feature: MA Experiment 20000072 PARAMETER Experiment Name: At_100uM_ABA_Mutants_cDNA_P Parameter: Treatment Value: 100uM ABA vs. No Treatment
  misc_feature: MA Experiment ID: 20000086 Result: Up-regulated in Transcription
  misc_feature: MA Experiment 20000086 PARAMETER Experiment Name: At_100uM_ABA_Mutants_cDNA_P Parameter: Plant Line Value: CS22
  misc_feature: MA Experiment 20000086 PARAMETER Experiment Name: At_100uM_ABA_Mutants_cDNA_P Parameter: Timepoint (hr) Value: 6
  misc_feature: MA Experiment 20000086 PARAMETER Experiment Name: At_100uM_ABA_Mutants_cDNA_P Parameter: Tissue Value: Aerial
  misc_feature: MA Experiment 20000086 PARAMETER Experiment Name: At_100uM_ABA_Mutants_cDNA_P Parameter: Treatment Value: 100uM ABA vs. No Treatment
  misc_feature: MA Experiment ID: 20000087 Result: Up-regulated in Transcription
  misc_feature: MA Experiment 20000087 PARAMETER Experiment Name: At_100uM_ABA_Mutants_cDNA_P Parameter: Plant Line Value: WS
  misc_feature: MA Experiment 20000087 PARAMETER Experiment Name: At_100uM_ABA_Mutants_cDNA_P Parameter: Timepoint (hr) Value: 6
  misc_feature: MA Experiment 20000087 PARAMETER Experiment Name: At_100uM_ABA_Mutants_cDNA_P Parameter: Tissue Value: Aerial
  misc_feature: MA Experiment 20000087 PARAMETER Experiment Name: At_100uM_ABA_Mutants_cDNA_P Parameter: Treatment Value: 100uM ABA vs. No Treatment
  misc_feature: MA Experiment ID: 20000088 Result: Up-regulated in Transcription
  misc_feature: MA Experiment 20000088 PARAMETER Experiment Name: At_100uM_ABA_Mutants_cDNA_P Parameter: Plant Line Value: Landsberg
  misc_feature: MA Experiment 20000088 PARAMETER Experiment Name: At_100uM_ABA_Mutants_cDNA_P Parameter: Timepoint (hr) Value: 6
  misc_feature: MA Experiment 20000088 PARAMETER Experiment Name: At_100uM_ABA_Mutants_cDNA_P Parameter: Tissue Value: Aerial
  misc_feature: MA Experiment 20000088 PARAMETER Experiment Name: At_100uM_ABA_Mutants_cDNA_P Parameter: Treatment Value: 100uM ABA vs. No Treatment
  misc_feature: MA Experiment ID: 20000089 Result: Up-regulated in Transcription
  misc_feature: MA Experiment ID: 20000090 Result: Up-regulated in Transcription
  misc_feature: MA Experiment ID: 20000111 Result: Down-regulated in Transcription
  misc_feature: MA Experiment 20000111 PARAMETER Experiment Name: At_42deg_Heat_cDNA_P Parameter: Temperature (deg C) Value: 42 vs. 22
  misc_feature: MA Experiment 20000111 PARAMETER Experiment Name: At_42deg_Heat_cDNA_P Parameter: Timepoint (hr) Value: 6
  misc_feature: MA Experiment 20000111 PARAMETER Experiment Name: At_42deg_Heat_cDNA_P Parameter: Tissue Value: Aerial
  misc_feature: MA Experiment ID: 20000112 Result: Down-regulated in Transcription
  misc_feature: MA Experiment 20000112 PARAMETER Experiment Name: At_42deg_Heat_cDNA_P Parameter: Temperature (deg C) Value: 42 vs. 22
  misc_feature: MA Experiment 20000112 PARAMETER Experiment Name: At_42deg_Heat_cDNA_P Parameter: Timepoint (hr) Value: 2
  misc_feature: MA Experiment 20000112 PARAMETER Experiment Name: At_42deg_Heat_cDNA_P Parameter: Tissue Value: Aerial
  misc_feature: MA Experiment ID: 20000113 Result: Down-regulated in Transcription
  misc_feature: MA Experiment 20000113 PARAMETER Experiment Name: At_42deg_Heat_cDNA_P Parameter: Temperature (deg C) Value: 42 vs. 22
  misc_feature: MA Experiment 20000113 PARAMETER Experiment Name: At_42deg_Heat_cDNA_P Parameter: Timepoint (hr) Value: 8
  misc_feature: MA Experiment 20000113 PARAMETER Experiment Name: At_42deg_Heat_cDNA_P Parameter: Tissue Value: Aerial
  misc_feature: MA Experiment ID: 20000117 Result: Up-regulated in Transcription
  misc_feature: MA Experiment 20000117 PARAMETER Experiment Name: At_100uM_ABA_Mutants_cDNA_P Parameter: Plant Line Value: Columbia
  misc_feature: MA Experiment 20000117 PARAMETER Experiment Name: At_100uM_ABA_Mutants_cDNA_P Parameter: Timepoint (hr) Value: 6
  misc_feature: MA Experiment 20000117 PARAMETER Experiment Name: At_100uM_ABA_Mutants_cDNA_P Parameter: Tissue Value: Aerial
  misc_feature: MA Experiment 20000117 PARAMETER Experiment Name: At_100uM_ABA_Mutants_cDNA_P Parameter: Treatment Value: 100uM ABA vs. No Treatment
  misc_feature: MA Experiment ID: 20000144 Result: Down-regulated in Transcription
  misc_feature: MA Experiment 20000144 PARAMETER Experiment Name: At_42deg_Heat_cDNA_P Parameter: Temperature (deg C) Value: 42 vs. 22
  misc_feature: MA Experiment 20000144 PARAMETER Experiment Name: At_42deg_Heat_cDNA_P Parameter: Timepoint (hr) Value: 1
  misc_feature: MA Experiment 20000144 PARAMETER Experiment Name: At_42deg_Heat_cDNA_P Parameter: Tissue Value: Aerial
  misc_feature: MA Experiment ID: 20000173 Result: Down-regulated in Transcription
  misc_feature: MA Experiment 20000173 PARAMETER Experiment Name: At_42deg_Heat_P Parameter: Age (day) Value: 14
  misc_feature: MA Experiment 20000173 PARAMETER Experiment Name: At_42deg_Heat_P Parameter: Organism Value: A. thaliana
  misc_feature: MA Experiment 20000173 PARAMETER Experiment Name: At_42deg_Heat_P Parameter: Plant Line Value: WS
  misc_feature: MA Experiment 20000173 PARAMETER Experiment Name: At_42deg_Heat_P Parameter: Temperature (deg C) Value: 42 vs. 22
  misc_feature: MA Experiment 20000173 PARAMETER Experiment Name: At_42deg_Heat_P Parameter: Timepoint (hr) Value: 6
  misc_feature: MA Experiment 20000173 PARAMETER Experiment Name: At_42deg_Heat_P Parameter: Tissue Value: Aerial
  misc_feature: MA Experiment ID: 20000184 Result: Down-regulated in Transcription
  misc_feature: MA Experiment 20000184 PARAMETER Experiment Name: At_Shoots__P Parameter: Age (day) Value: 7
  misc_feature: MA Experiment 20000184 PARAMETER Experiment Name: At_Shoots__P Parameter: Tissue Value: Shoots vs. Whole Plant
  misc_feature: MA Experiment ID: 20000794 Result: Down-regulated in Transcription
  misc_feature: MA Experiment 20000794 PARAMETER Experiment Name: At_Petals_P Parameter: Age (day) Value: 23-25 days
  misc_feature: MA Experiment 20000794 PARAMETER Experiment Name: At_Petals_P Parameter: Plant Line Value: WS
  misc_feature: MA Experiment 20000794 PARAMETER Experiment Name: At_Petals_P Parameter: Tissue Value: Petals vs. Whole plant
  misc_feature: MA Experiment ID: 20001248 Result: Up-regulated in Transcription
  misc_feature: MA Experiment 20001248 PARAMETER Experiment Name: At_Far-red-induction_P Parameter: Age (day) Value: 7
  misc_feature: MA Experiment 20001248 PARAMETER Experiment Name: At_Far-red-induction_P Parameter: Light Value: Far-red vs. White
  misc_feature: MA Experiment 20001248 PARAMETER Experiment Name: At_Far-red-induction_P Parameter: Organism Value: A. thaliana
  misc_feature: MA Experiment 20001248 PARAMETER Experiment Name: At_Far-red-induction_P Parameter: Plant Line Value: Columbia
  misc_feature: MA Experiment 20001248 PARAMETER Experiment Name: At_Far-red-induction_P Parameter: Timepoint (hr) Value: 4
  misc_feature: MA Experiment 20001248 PARAMETER Experiment Name: At_Far-red-induction_P Parameter: Tissue Value: Whole Plant
  misc_feature: Pfam Name: TPT Pfam Description: Triose-phosphate Transporter family
gtcagatatttttctcaacgtgaaagagagaaaagagaatctctcagaaggtgagcctccaacaaagcgtgaatctctctttctctctctatctctctatctccgagatcgcatcaccggaaatctccttctacggtggtggtggtgacagttgaccagagatggcggcggagaatgagagaaaatctccttcagcagtctccgatatgggagcttgggcaatgaatgtgataagctccgttggaatcatcatggcgaataaacaacttatgtcctcttctggattcgcatttagtttcgctacaactctcaccggtttccacttcgctttaaccgcattggtcggtatggtatcaaacgctaccggattctctgcttcgaagcatgtacctatgtgggagcttatttggttctccattgtcgctaatgtctctattgctgctatgaacttcagtctcatgctcaattccgttggcttctaccaaatctcgaagctgagcatgattcctgtggtatgtgtaatggaatggattctacatagcaagagatactcaagagaagtgaaaatatctgttgtggttgttgttgttggtgttggtatttgtactgtgactgatgttaaagttaatgccaaaggttttatctgtgcttgtgttgcgattttctcgtcatccttgcagcaaattttaataggttctctacagaagaaatattcaattgggtcctttgagttgttgagtaaaacagcgccgattcaagctttttcgcttcttgttgtcggtcctttagttgattatcttcttagtgggaagttcattatgaagtataatatgtcttccggttgctttctattcattcttctctcatgtggtctagctgtgttctgcaacataagccagtacctttgcatcgggcggttttcagcagtatcgttccaagttattggtcacatgaaaaccgtctgtatcctcacgcttggatggctcctatttgattctgcaatgactttcaaaaacgtagcggggatgattgttgcgattgttgggatggtaatctatagttgggcaatggaattggagaaacagtcgattattgcagcaaaggctttaaacagtgtgaaacatagcttaacagaggaagagtttgaacttttgaaggaaggtgtagaaactacacaatcaaaagatgttgaacttggccgcacaaaagattagagacagatggatagagaaagaaacatagtcttcaggtacaatttgttctgttataatttttgtatgttttgtgttatctaaaccaagagatcggatcctcggagattagtgtctaggcttcgatctaaagtttccttggttatacaaatgttttgtgttatttatatctttttacccaattccatggaaataacttcaatgacc

SEQ ID NO: 97516 - protein, 350 aa, Arabidopsis thaliana; identical to SEQ ID NO: 22526
  peptide (1)..(350): Ceres Seq. ID no. 12738007
  misc_feature: Pfam Name: TPT Pfam Description: Triose-phosphate Transporter family
  misc_feature (1)..(350): Homolog of NCBI NO: 15238957 NR Description: putative protein; protein id: At5g42420.1 thaliana] >gi|9759478|dbj|BAB10483.1|
  misc_feature (3)..(349): Homolog of NCBI NO: 18394949 NR Description: expressed protein; protein id: At1g21070.1, by cDNA: 108746. [Arabidopsis thaliana] >gi|25354485|pir||G86343
  misc_feature (3)..(349): Homolog of NCBI NO: 21536703 NR Description: unknown [Arabidopsis thaliana]
  misc_feature (4)..(349): Homolog of NCBI NO: 18411172 NR Description: expressed protein; protein id: At1g76670.1, by cDNA: gi_14532697, supported by cDNA: gi_16604379, supported cDNA: gi_18491194 [Arabidopsis thaliana] >gi|25354481|pir||A96795
  misc_feature (37)..(349): Homolog of NCBI NO: 26450366 NR Description: unknown protein [Arabidopsis thaliana]
  misc_feature (42)..(349): Homolog of NCBI NO: 33146838 NR Description: transporter-related-like [Oryza sativa (japonica
  misc_feature (4)..(48): Homolog of NCBI NO: 33146838 NR Description: transporter-related-like [Oryza sativa (japonica
  misc_feature (2)..(299): Homolog of NCBI NO: 30313364 NR Description: putative transmembrane protein [Oryza sativa]
  misc_feature (6)..(299): Homolog of NCBI NO: 15234794 NR Description: hypothetical protein; protein id: At4g09810.1
  misc_feature (1)..(299): Homolog of NCBI NO: 18399097 NR Description: expressed protein; protein id: At1g34020.1, by cDNA: 7642. [Arabidopsis thaliana] >gi|25354483|pir||A86464

SEQ ID NO: 97517 - protein, 335 aa, Arabidopsis thaliana; identical to SEQ ID NO: 22527
  peptide (1)..(335): Ceres Seq. ID no. 12738008
  misc_feature: Pfam Name: TPT Pfam Description: Triose-phosphate Transporter family
  misc_feature (1)..(335): Homolog of NCBI NO: 15238957 NR Description: putative protein; protein id: At5g42420.1 thaliana] >gi|9759478|dbj|BAB10483.1|
  misc_feature (1)..(334): Homolog of NCBI NO: 18394949 NR Description: expressed protein; protein id: At1g21070.1, by cDNA: 108746. [Arabidopsis thaliana] >gi|25354485|pir||G86343
  misc_feature (1)..(334): Homolog of NCBI NO: 21536703 NR Description: unknown [Arabidopsis thaliana]
  misc_feature (1)..(334): Homolog of NCBI NO: 18411172 NR Description: expressed protein; protein id: At1g76670.1, by cDNA: gi_14532697, supported by cDNA: gi_16604379, supported cDNA: gi_18491194 [Arabidopsis thaliana] >gi|25354481|pir||A96795
  misc_feature (22)..(334): Homolog of NCBI NO: 26450366 NR Description: unknown protein [Arabidopsis thaliana]
  misc_feature (27)..(334): Homolog of NCBI NO: 33146838 NR Description: transporter-related-like [Oryza sativa (japonica
  misc_feature (1)..(33): Homolog of NCBI NO: 33146838 NR Description: transporter-related-like [Oryza sativa (japonica
  misc_feature (1)..(284): Homolog of NCBI NO: 30313364 NR Description: putative transmembrane protein [Oryza sativa]
  misc_feature (1)..(284): Homolog of NCBI NO: 15234794 NR Description: hypothetical protein; protein id: At4g09810.1
  misc_feature (1)..(284): Homolog of NCBI NO: 18399097 NR Description: expressed protein; protein id: At1g34020.1, by cDNA: 7642. [Arabidopsis thaliana] >gi|25354483|pir||A86464

SEQ ID NO: 97518 - protein, 330 aa, Arabidopsis thaliana; identical to SEQ ID NO: 22528
  peptide (1)..(330): Ceres Seq. ID no. 12738009
  misc_feature: Pfam Name: TPT Pfam Description: Triose-phosphate Transporter family
  misc_feature (1)..(330): Homolog of NCBI NO: 15238957 NR Description: putative protein; protein id: At5g42420.1 thaliana] >gi|9759478|dbj|BAB10483.1|
  misc_feature (1)..(329): Homolog of NCBI NO: 18394949 NR Description: expressed protein; protein id: At1g21070.1, by cDNA: 108746. [Arabidopsis thaliana] >gi|25354485|pir||G86343
  misc_feature (1)..(329): Homolog of NCBI NO: 21536703 NR Description: unknown [Arabidopsis thaliana]
  misc_feature (1)..(329): Homolog of NCBI NO: 18411172 NR Description: expressed protein; protein id: At1g76670.1, by cDNA: gi_14532697, supported by cDNA: gi_16604379, supported cDNA: gi_18491194 [Arabidopsis thaliana] >gi|25354481|pir||A96795
  misc_feature (17)..(329): Homolog of NCBI NO: 26450366 NR Description: unknown protein [Arabidopsis thaliana]
  misc_feature (22)..(329): Homolog of NCBI NO: 33146838 NR Description: transporter-related-like [Oryza sativa (japonica
  misc_feature (1)..(28): Homolog of NCBI NO: 33146838 NR Description: transporter-related-like [Oryza sativa (japonica
  misc_feature (1)..(279): Homolog of NCBI NO: 30313364 NR Description: putative transmembrane protein [Oryza sativa]
  misc_feature (1)..(279): Homolog of NCBI NO: 15234794 NR Description: hypothetical protein; protein id: At4g09810.1
  misc_feature (1)..(279): Homolog of NCBI NO: 18399097 NR Description: expressed protein; protein id: At1g34020.1, by cDNA: 7642. [Arabidopsis thaliana] >gi|25354483|pir||A86464

SEQ ID NO: 97519 - DNA, 833 bp, Arabidopsis thaliana
  misc_feature (1)..(833): Ceres Seq. ID no. 12738010
  misc_feature: MA Experiment ID: 108434 Result: Up-regulated in Transcription
  misc_feature: MA Experiment 108434 PARAMETER Experiment Name: At_Root_Tips_cDNA_P Parameter: Tissue Value: Root Tips
  misc_feature: MA Experiment ID: 108595 Result: Down-regulated in Transcription
  misc_feature: MA Experiment 108595 PARAMETER Experiment Name: At_Ler-pi_Ovule_cDNA_P Parameter: Plant Line Value: null
  misc_feature: MA Experiment ID: 20000069 Result: Up-regulated in Transcription
  misc_feature: MA Experiment 20000069 PARAMETER Experiment Name: At_100uM_ABA_Mutants_cDNA_P Parameter: Plant Line Value: CS23
  misc_feature: MA Experiment 20000069 PARAMETER Experiment Name: At_100uM_ABA_Mutants_cDNA_P Parameter: Timepoint (hr) Value: 6
  misc_feature: MA Experiment 20000069 PARAMETER Experiment Name: At_100uM_ABA_Mutants_cDNA_P Parameter: Tissue Value: Aerial
  misc_feature: MA Experiment 20000069 PARAMETER Experiment Name: At_100uM_ABA_Mutants_cDNA_P Parameter: Treatment Value: 100uM ABA vs. No Treatment
  misc_feature: MA Experiment ID: 20000070 Result: Up-regulated in Transcription
  misc_feature: MA Experiment 20000070 PARAMETER Experiment Name: At_100uM_ABA_Mutants_cDNA_P Parameter: Plant Line Value: CS24
  misc_feature: MA Experiment 20000070 PARAMETER Experiment Name: At_100uM_ABA_Mutants_cDNA_P Parameter: Timepoint (hr) Value: 6
  misc_feature: MA Experiment 20000070 PARAMETER Experiment Name: At_100uM_ABA_Mutants_cDNA_P Parameter: Tissue Value: Aerial
  misc_feature: MA Experiment 20000070 PARAMETER Experiment Name: At_100uM_ABA_Mutants_cDNA_P Parameter: Treatment Value: 100uM ABA vs. No Treatment
  misc_feature: MA Experiment ID: 20000071 Result: Up-regulated in Transcription
  misc_feature: MA Experiment 20000071 PARAMETER Experiment Name: At_100uM_ABA_Mutants_cDNA_P Parameter: Plant Line Value: CS8104
  misc_feature: MA Experiment 20000071 PARAMETER Experiment Name: At_100uM_ABA_Mutants_cDNA_P Parameter: Timepoint (hr) Value: 6
  misc_feature: MA Experiment 20000071 PARAMETER Experiment Name: At_100uM_ABA_Mutants_cDNA_P Parameter: Tissue Value: Aerial
  misc_feature: MA Experiment 20000071 PARAMETER Experiment Name: At_100uM_ABA_Mutants_cDNA_P Parameter: Treatment Value: 100uM ABA vs. No Treatment
  misc_feature: MA Experiment ID: 20000072 Result: Up-regulated in Transcription
  misc_feature: MA Experiment 20000072 PARAMETER Experiment Name: At_100uM_ABA_Mutants_cDNA_P Parameter: Plant Line Value: CS8105
  misc_feature: MA Experiment 20000072 PARAMETER Experiment Name: At_100uM_ABA_Mutants_cDNA_P Parameter: Timepoint (hr) Value: 6
  misc_feature: MA Experiment 20000072 PARAMETER Experiment Name: At_100uM_ABA_Mutants_cDNA_P Parameter: Tissue Value: Aerial
  misc_feature: MA Experiment 20000072 PARAMETER Experiment Name: At_100uM_ABA_Mutants_cDNA_P Parameter: Treatment Value: 100uM ABA vs. No Treatment
  misc_feature: MA Experiment ID: 20000086 Result: Up-regulated in Transcription
  misc_feature: MA Experiment 20000086 PARAMETER Experiment Name: At_100uM_ABA_Mutants_cDNA_P Parameter: Plant Line Value: CS22
  misc_feature: MA Experiment 20000086 PARAMETER Experiment Name: At_100uM_ABA_Mutants_cDNA_P Parameter: Timepoint (hr) Value: 6
  misc_feature: MA Experiment 20000086 PARAMETER Experiment Name: At_100uM_ABA_Mutants_cDNA_P Parameter: Tissue Value: Aerial
  misc_feature: MA Experiment 20000086 PARAMETER Experiment Name: At_100uM_ABA_Mutants_cDNA_P Parameter: Treatment Value: 100uM ABA vs. No Treatment
  misc_feature: MA Experiment ID: 20000087 Result: Up-regulated in Transcription
  misc_feature: MA Experiment 20000087 PARAMETER Experiment Name: At_100uM_ABA_Mutants_cDNA_P Parameter: Plant Line Value: WS
  misc_feature: MA Experiment 20000087 PARAMETER Experiment Name: At_100uM_ABA_Mutants_cDNA_P Parameter: Timepoint (hr) Value: 6
  misc_feature: MA Experiment 20000087 PARAMETER Experiment Name: At_100uM_ABA_Mutants_cDNA_P Parameter: Tissue Value: Aerial
  misc_feature: MA Experiment 20000087 PARAMETER Experiment Name: At_100uM_ABA_Mutants_cDNA_P Parameter: Treatment Value: 100uM ABA vs. No Treatment
  misc_feature: MA Experiment ID: 20000088 Result: Up-regulated in Transcription
  misc_feature: MA Experiment 20000088 PARAMETER Experiment Name: At_100uM_ABA_Mutants_cDNA_P Parameter: Plant Line Value: Landsberg
  misc_feature: MA Experiment 20000088 PARAMETER Experiment Name: At_100uM_ABA_Mutants_cDNA_P Parameter: Timepoint (hr) Value: 6
  misc_feature: MA Experiment 20000088 PARAMETER Experiment Name: At_100uM_ABA_Mutants_cDNA_P Parameter: Tissue Value: Aerial
  misc_feature: MA Experiment 20000088 PARAMETER Experiment Name: At_100uM_ABA_Mutants_cDNA_P Parameter: Treatment Value: 100uM ABA vs. No Treatment
  misc_feature: MA Experiment ID: 20000089 Result: Up-regulated in Transcription
  misc_feature: MA Experiment ID: 20000090 Result: Up-regulated in Transcription
  misc_feature: MA Experiment ID: 20000111 Result: Down-regulated in Transcription
  misc_feature: MA Experiment 20000111 PARAMETER Experiment Name: At_42deg_Heat_cDNA_P Parameter: Temperature (deg C) Value: 42 vs. 22
  misc_feature: MA Experiment 20000111 PARAMETER Experiment Name: At_42deg_Heat_cDNA_P Parameter: Timepoint (hr) Value: 6
  misc_feature: MA Experiment 20000111 PARAMETER Experiment Name: At_42deg_Heat_cDNA_P Parameter: Tissue Value: Aerial
  misc_feature: MA Experiment ID: 20000113 Result: Down-regulated in Transcription
  misc_feature: MA Experiment 20000113 PARAMETER Experiment Name: At_42deg_Heat_cDNA_P Parameter: Temperature (deg C) Value: 42 vs. 22
  misc_feature: MA Experiment 20000113 PARAMETER Experiment Name: At_42deg_Heat_cDNA_P Parameter: Timepoint (hr) Value: 8
  misc_feature: MA Experiment 20000113 PARAMETER Experiment Name: At_42deg_Heat_cDNA_P Parameter: Tissue Value: Aerial
  misc_feature: MA Experiment ID: 20000117 Result: Up-regulated in Transcription
  misc_feature: MA Experiment 20000117 PARAMETER Experiment Name: At_100uM_ABA_Mutants_cDNA_P Parameter: Plant Line Value: Columbia
  misc_feature: MA Experiment 20000117 PARAMETER Experiment Name: At_100uM_ABA_Mutants_cDNA_P Parameter: Timepoint (hr) Value: 6
  misc_feature: MA Experiment 20000117 PARAMETER Experiment Name: At_100uM_ABA_Mutants_cDNA_P Parameter: Tissue Value: Aerial
  misc_feature: MA Experiment 20000117 PARAMETER Experiment Name: At_100uM_ABA_Mutants_cDNA_P Parameter: Treatment Value: 100uM ABA vs. No Treatment
  misc_feature: MA Experiment ID: 20000173 Result: Down-regulated in Transcription
  misc_feature: MA Experiment 20000173 PARAMETER Experiment Name: At_42deg_Heat_P Parameter: Age (day) Value: 14
  misc_feature: MA Experiment 20000173 PARAMETER Experiment Name: At_42deg_Heat_P Parameter: Organism Value: A. thaliana
  misc_feature: MA Experiment 20000173 PARAMETER Experiment Name: At_42deg_Heat_P Parameter: Plant Line Value: WS
  misc_feature: MA Experiment 20000173 PARAMETER Experiment Name: At_42deg_Heat_P Parameter: Temperature (deg C) Value: 42 vs. 22
  misc_feature: MA Experiment 20000173 PARAMETER Experiment Name: At_42deg_Heat_P Parameter: Timepoint (hr) Value: 6
  misc_feature: MA Experiment 20000173 PARAMETER Experiment Name: At_42deg_Heat_P Parameter: Tissue Value: Aerial
  misc_feature: MA Experiment ID: 20000184 Result: Down-regulated in Transcription
  misc_feature: MA Experiment 20000184 PARAMETER Experiment Name: At_Shoots__P Parameter: Age (day) Value: 7
  misc_feature: MA Experiment 20000184 PARAMETER Experiment Name: At_Shoots__P Parameter: Tissue Value: Shoots vs. Whole Plant
  misc_feature: MA Experiment ID: 20000794 Result: Down-regulated in Transcription
  misc_feature: MA Experiment 20000794 PARAMETER Experiment Name: At_Petals_P Parameter: Age (day) Value: 23-25 days
  misc_feature: MA Experiment 20000794 PARAMETER Experiment Name: At_Petals_P Parameter: Plant Line Value: WS
  misc_feature: MA Experiment 20000794 PARAMETER Experiment Name: At_Petals_P Parameter: Tissue Value: Petals vs. Whole plant
  misc_feature: MA Experiment ID: 20001248 Result: Up-regulated in Transcription
  misc_feature: MA Experiment 20001248 PARAMETER Experiment Name: At_Far-red-induction_P Parameter: Age (day) Value: 7
  misc_feature: MA Experiment 20001248 PARAMETER Experiment Name: At_Far-red-induction_P Parameter: Light Value: Far-red vs. White
  misc_feature: MA Experiment 20001248 PARAMETER Experiment Name: At_Far-red-induction_P Parameter: Organism Value: A. thaliana
  misc_feature: MA Experiment 20001248 PARAMETER Experiment Name: At_Far-red-induction_P Parameter: Plant Line Value: Columbia
  misc_feature: MA Experiment 20001248 PARAMETER Experiment Name: At_Far-red-induction_P Parameter: Timepoint (hr) Value: 4
  misc_feature: MA Experiment 20001248 PARAMETER Experiment Name: At_Far-red-induction_P Parameter: Tissue Value: Whole Plant
atttttctcaacgtgaaagagagaaaagagaatctctcagaaggtgagcctccaacaaagcgtgaatctctctttctctctctatctctctatctccgagatcgcatcaccggaaatctccttctacggtggtggtggtgacagttgaccagagatggcggcggagaatgagagaaaatctccttcagcagtctccgatatgggagcttgggcaatgaatgtgataagctccgttggaatcatcatggcgaataaacaacttatgtcctcttctggattcgcatttagtttcgctacaactctcaccggtttccacttcgctttaaccgcattggtcggtatggtatcaaacgctaccggattctctgcttcgaagcatgtacctatgtgggagcttatttggttctccattgttgggatggtaatctatagttgggcaatggaattggagaaacagtcgattattgcagcaaaggctttaaacagtgtgaaacatagcttaacagaggaagagtttgaacttttgaaggaaggtgtagaaactacacaatcaaaagatgttgaacttggccgcacaaaagattagagacagatggatagagaaagaaacatagtcttcaggtacaatttgttctgttataatttttgtatgttttgtgttatctaaaccaagagatcggatcctcggagattagtgtctaggcttcgatctaaagtttccttggttatacaaatgttttgtgttatttatatctttttacccaattccatggaaataacttcaatgaccacatgttcttgttttacgtagcactcaaagagtatattccttt

SEQ ID NO: 97520 - protein, 143 aa, Arabidopsis thaliana; identical to SEQ ID NO: 40923
  peptide (1)..(143): Ceres Seq. ID no. 12738011
  misc_feature (1)..(90): Homolog of NCBI NO: 15238957 NR Description: putative protein; protein id: At5g42420.1 thaliana] >gi|9759478|dbj|BAB10483.1|
  misc_feature (85)..(143): Homolog of NCBI NO: 15238957 NR Description: putative protein; protein id: At5g42420.1 thaliana] >gi|9759478|dbj|BAB10483.1|
  misc_feature (3)..(90): Homolog of NCBI NO: 18394949 NR Description: expressed protein; protein id: At1g21070.1, by cDNA: 108746. [Arabidopsis thaliana] >gi|25354485|pir||G86343
  misc_feature (85)..(142): Homolog of NCBI NO: 18394949 NR Description: expressed protein; protein id: At1g21070.1, by cDNA: 108746. [Arabidopsis thaliana] >gi|25354485|pir||G86343
  misc_feature (3)..(90): Homolog of NCBI NO: 21536703 NR Description: unknown [Arabidopsis thaliana]
  misc_feature (85)..(142): Homolog of NCBI NO: 21536703 NR Description: unknown [Arabidopsis thaliana]
  misc_feature (4)..(90): Homolog of NCBI NO: 18411172 NR Description: expressed protein; protein id: At1g76670.1, by cDNA: gi_14532697, supported by cDNA: gi_16604379, supported cDNA: gi_18491194 [Arabidopsis thaliana] >gi|25354481|pir||A96795
  misc_feature (85)..(142): Homolog of NCBI NO: 18411172 NR Description: expressed protein; protein id: At1g76670.1, by cDNA: gi_14532697, supported by cDNA: gi_16604379, supported cDNA: gi_18491194 [Arabidopsis thaliana] >gi|25354481|pir||A96795
  misc_feature (85)..(142): Homolog of NCBI NO: 26450366 NR Description: unknown protein [Arabidopsis thaliana]
  misc_feature (37)..(90): Homolog of NCBI NO: 26450366 NR Description: unknown protein [Arabidopsis thaliana]

SEQ ID NO: 97521 - protein, 128 aa, Arabidopsis thaliana; identical to SEQ ID NO: 40924
  peptide (1)..(128): Ceres Seq. ID no. 12738012
  misc_feature (1)..(75): Homolog of NCBI NO: 15238957 NR Description: putative protein; protein id: At5g42420.1 thaliana] >gi|9759478|dbj|BAB10483.1|
  misc_feature (70)..(128): Homolog of NCBI NO: 15238957 NR Description: putative protein; protein id: At5g42420.1 thaliana] >gi|9759478|dbj|BAB10483.1|
  misc_feature (1)..(75): Homolog of NCBI NO: 18394949 NR Description: expressed protein; protein id: At1g21070.1, by cDNA: 108746. [Arabidopsis thaliana] >gi|25354485|pir||G86343
  misc_feature (70)..(127): Homolog of NCBI NO: 18394949 NR Description: expressed protein; protein id: At1g21070.1, by cDNA: 108746. [Arabidopsis thaliana] >gi|25354485|pir||G86343
  misc_feature (1)..(75): Homolog of NCBI NO: 21536703 NR Description: unknown [Arabidopsis thaliana]
  misc_feature (70)..(127): Homolog of NCBI NO: 21536703 NR Description: unknown [Arabidopsis thaliana]
  misc_feature (1)..(75): Homolog of NCBI NO: 18411172 NR Description: expressed protein; protein id: At1g76670.1, by cDNA: gi_14532697, supported by cDNA: gi_16604379, supported cDNA: gi_18491194 [Arabidopsis thaliana] >gi|25354481|pir||A96795
  misc_feature (70)..(127): Homolog of NCBI NO: 18411172 NR Description: expressed protein; protein id: At1g76670.1, by cDNA: gi_14532697, supported by cDNA: gi_16604379, supported cDNA: gi_18491194 [Arabidopsis thaliana] >gi|25354481|pir||A96795
  misc_feature (70)..(127): Homolog of NCBI NO: 26450366 NR Description: unknown protein [Arabidopsis thaliana]
  misc_feature (22)..(75): Homolog of NCBI NO: 26450366 NR Description: unknown protein [Arabidopsis thaliana]

SEQ ID NO: 97522 - protein, 123 aa, Arabidopsis thaliana; identical to SEQ ID NO: 40925
  peptide (1)..(123): Ceres Seq. ID no. 12738013
  misc_feature (1)..(70): Homolog of NCBI NO: 15238957 NR Description: putative protein; protein id: At5g42420.1 thaliana] >gi|9759478|dbj|BAB10483.1|
  misc_feature (65)..(123): Homolog of NCBI NO: 15238957 NR Description: putative protein; protein id: At5g42420.1 thaliana] >gi|9759478|dbj|BAB10483.1|
  misc_feature (1)..(70): Homolog of NCBI NO: 18394949 NR Description: expressed protein; protein id: At1g21070.1, by cDNA: 108746. [Arabidopsis thaliana] >gi|25354485|pir||G86343
  misc_feature (65)..(122): Homolog of NCBI NO: 18394949 NR Description: expressed protein; protein id: At1g21070.1, by cDNA: 108746. [Arabidopsis thaliana] >gi|25354485|pir||G86343
  misc_feature (1)..(70): Homolog of NCBI NO: 21536703 NR Description: unknown [Arabidopsis thaliana]
  misc_feature (65)..(122): Homolog of NCBI NO: 21536703 NR Description: unknown [Arabidopsis thaliana]
  misc_feature (1)..(70): Homolog of NCBI NO: 18411172 NR Description: expressed protein; protein id: At1g76670.1, by cDNA: gi_14532697, supported by cDNA: gi_16604379, supported cDNA: gi_18491194 [Arabidopsis thaliana] >gi|25354481|pir||A96795
  misc_feature (65)..(122): Homolog of NCBI NO: 18411172 NR Description: expressed protein; protein id: At1g76670.1, by cDNA: gi_14532697, supported by cDNA: gi_16604379, supported cDNA: gi_18491194 [Arabidopsis thaliana] >gi|25354481|pir||A96795
  misc_feature (65)..(122): Homolog of NCBI NO: 26450366 NR Description: unknown protein [Arabidopsis thaliana]
  misc_feature (17)..(70): Homolog of NCBI NO: 26450366 NR Description: unknown protein [Arabidopsis thaliana]

SEQ ID NO: 97523 - DNA, 1400 bp, Arabidopsis thaliana
  misc_feature (1)..(1400): Ceres Seq. ID no. 12738066
  misc_feature: MA Experiment ID: 20000182 Result: Up-regulated in Transcription
  misc_feature: MA Experiment 20000182 PARAMETER Experiment Name: At_2mM_SA_P Parameter: Age (day) Value: 14
  misc_feature: MA Experiment 20000182 PARAMETER Experiment Name: At_2mM_SA_P Parameter: Organism Value: A. thaliana
  misc_feature: MA Experiment 20000182 PARAMETER Experiment Name: At_2mM_SA_P Parameter: Plant Line Value: WS
  misc_feature: MA Experiment 20000182 PARAMETER Experiment Name: At_2mM_SA_P Parameter: Timepoint (hr) Value: 6
  misc_feature: MA Experiment 20000182 PARAMETER Experiment Name: At_2mM_SA_P Parameter: Tissue Value: Aerial
  misc_feature: MA Experiment 20000182 PARAMETER Experiment Name: At_2mM_SA_P Parameter: Treatment Value: 2mM SA vs. No Treatment
  misc_feature: MA Experiment ID: 20000227 Result: Down-regulated in Transcription
  misc_feature: MA Experiment 20000227 PARAMETER Experiment Name: At_Root-Tips-vs-Tops_P Parameter: Tissue Value: Root Tips vs. Root Tops
  misc_feature: MA Experiment ID: 20000436 Result: Up-regulated in Transcription
  misc_feature: MA Experiment 20000436 PARAMETER Experiment Name: At_Drought_P Parameter: Age (day) Value: 7
  misc_feature: MA Experiment 20000436 PARAMETER Experiment Name: At_Drought_P Parameter: Organism Value: A. thaliana
  misc_feature: MA Experiment 20000436 PARAMETER Experiment Name: At_Drought_P Parameter: Plant Line Value: WS
  misc_feature: MA Experiment 20000436 PARAMETER Experiment Name: At_Drought_P Parameter: Timepoint (hr) Value: 12
  misc_feature: MA Experiment 20000436 PARAMETER Experiment Name: At_Drought_P Parameter: Tissue Value: Whole Plant
  misc_feature: MA Experiment 20000436 PARAMETER Experiment Name: At_Drought_P Parameter: Treatment Value: Drought vs. No Drought
  misc_feature: MA Experiment ID: 20000437 Result: Up-regulated in Transcription
  misc_feature: MA Experiment 20000437 PARAMETER Experiment Name: At_Drought_P Parameter: Age (day) Value: 8
  misc_feature: MA Experiment 20000437 PARAMETER Experiment Name: At_Drought_P Parameter: Organism Value: A. thaliana
  misc_feature: MA Experiment 20000437 PARAMETER Experiment Name: At_Drought_P Parameter: Plant Line Value: WS
  misc_feature: MA Experiment 20000437 PARAMETER Experiment Name: At_Drought_P Parameter: Timepoint (hr) Value: 24
  misc_feature: MA Experiment 20000437 PARAMETER Experiment Name: At_Drought_P Parameter: Tissue Value: Whole Plant
  misc_feature: MA Experiment 20000437 PARAMETER Experiment Name: At_Drought_P Parameter: Treatment Value: Drought vs. No Drought
  misc_feature: MA Experiment ID: 20000453 Result: Up-regulated in Transcription
  misc_feature: MA Experiment 20000453 PARAMETER Experiment Name: At_100uM_ABA_P Parameter: Age (day) Value: 15
  misc_feature: MA Experiment 20000453 PARAMETER Experiment Name: At_100uM_ABA_P Parameter: Organism Value: A. thaliana
  misc_feature: MA Experiment 20000453 PARAMETER Experiment Name: At_100uM_ABA_P Parameter: Plant Line Value: WS
  misc_feature: MA Experiment 20000453 PARAMETER Experiment Name: At_100uM_ABA_P Parameter: Timepoint (hr) Value: 24
  misc_feature: MA Experiment 20000453 PARAMETER Experiment Name: At_100uM_ABA_P Parameter: Tissue Value: Aerial
  misc_feature: MA Experiment 20000453 PARAMETER Experiment Name: At_100uM_ABA_P Parameter: Treatment Value: 100uM ABA vs. No Treatment
  misc_feature: MA Experiment ID: 20000794 Result: Up-regulated in Transcription
  misc_feature: MA Experiment 20000794 PARAMETER Experiment Name: At_Petals_P Parameter: Age (day) Value: 23-25 days
  misc_feature: MA Experiment 20000794 PARAMETER Experiment Name: At_Petals_P Parameter: Plant Line Value: WS
  misc_feature: MA Experiment 20000794 PARAMETER Experiment Name: At_Petals_P Parameter: Tissue Value: Petals vs. Whole plant
  misc_feature: MA Experiment ID: 20001557 Result: Up-regulated in Transcription
  misc_feature: MA Experiment 20001557 PARAMETER Experiment Name: At_Drought_Soil_Dry_P Parameter: Age (day) Value: 27
  misc_feature: MA Experiment 20001557 PARAMETER Experiment Name: At_Drought_Soil_Dry_P Parameter: Organism Value: A. thaliana
  misc_feature: MA Experiment 20001557 PARAMETER Experiment Name: At_Drought_Soil_Dry_P Parameter: Plant Line Value: WS
  misc_feature: MA Experiment 20001557 PARAMETER Experiment Name: At_Drought_Soil_Dry_P Parameter: Post Timepoint (hr) Value: 3
  misc_feature: MA Experiment 20001557 PARAMETER Experiment Name: At_Drought_Soil_Dry_P Parameter: Post-Treatment Value: Re-Water vs. No Drought
  misc_feature: MA Experiment 20001557 PARAMETER Experiment Name: At_Drought_Soil_Dry_P Parameter: Timepoint (day) Value: 13
  misc_feature: MA Experiment 20001557 PARAMETER Experiment Name: At_Drought_Soil_Dry_P Parameter: Treatment Value: Drought vs. No Drought
  misc_feature: MA Experiment ID: 20001558 Result: Up-regulated in Transcription
  misc_feature: MA Experiment 20001558 PARAMETER Experiment Name: At_Drought_Soil_Dry_P Parameter: Age (day) Value: 27
  misc_feature: MA Experiment 20001558 PARAMETER Experiment Name: At_Drought_Soil_Dry_P Parameter: Organism Value: A. thaliana
  misc_feature: MA Experiment 20001558 PARAMETER Experiment Name: At_Drought_Soil_Dry_P Parameter: Plant Line Value: WS
  misc_feature: MA Experiment 20001558 PARAMETER Experiment Name: At_Drought_Soil_Dry_P Parameter: Post Timepoint (hr) Value: 6
  misc_feature: MA Experiment 20001558 PARAMETER Experiment Name: At_Drought_Soil_Dry_P Parameter: Post-Treatment Value: Re-Water vs. No Drought
  misc_feature: MA Experiment 20001558 PARAMETER Experiment Name: At_Drought_Soil_Dry_P Parameter: Timepoint (day) Value: 13
  misc_feature: MA Experiment 20001558 PARAMETER Experiment Name: At_Drought_Soil_Dry_P Parameter: Treatment Value: Drought vs. No Drought
  misc_feature: MA Experiment ID: 20001911 Result: Up-regulated in Transcription
  misc_feature: MA Experiment 20001911 PARAMETER Experiment Name: At_Drought_Reproduction_P Parameter: Age (day) Value: 40
  misc_feature: MA Experiment 20001911 PARAMETER Experiment Name: At_Drought_Reproduction_P Parameter: Organism Value: A. thaliana
  misc_feature: MA Experiment 20001911 PARAMETER Experiment Name: At_Drought_Reproduction_P Parameter: Plant Line Value: WS
  misc_feature: MA Experiment 20001911 PARAMETER Experiment Name: At_Drought_Reproduction_P Parameter: Timepoint (day) Value: 10
  misc_feature: MA Experiment 20001911 PARAMETER Experiment Name: At_Drought_Reproduction_P Parameter: Tissue Value: Flowers
  misc_feature: MA Experiment 20001911 PARAMETER Experiment Name: At_Drought_Reproduction_P Parameter: Treatment Value: Drought vs. No Drought
accattctttttctcaaagagcaagcataaaagaacataaaagctccatactttttaaatttattccatattgtcaatagcttttgtatattataaagcttctaggcgttgttgttgttttgtctcattgttgctctgtttcttgaggttttataaatggatcctggtactttaaactcggtgatcaataggttgcttgaagctagagaaaaaccaggaaagattgttcagttgtctgaaacagagatcaaacagctctgtttcgtctctagagatatcttcttgagacaaccaaatctcttggaacttgaagctcctgttaaaatatgtggggacattcatggacaatatccggatctcttgagactattcgaacatggcggataccctcctaattcaaactacttgtttcttggagattatgtcgatcgcggcaagcaaagcctcgaaacgatttgtcttttacttgcttacaagattaagttccctgaaaacttcttccttctcagaggaaaccatgaaagtgcatcaatcaatcgtatttacggcttctatgacgagtgtaaacgtagattcagtgtcaagatttggcgaatcttcactgattgcttcaactgtctccccgtcgctgcactcatcgatgagcggattttttgtatgcatggtgggctctccccggagctgctaagcttgaggcagattagggatattcgtcgtccaacggatattcctgatcgtggtttactctgtgatctcttgtggtctgatcctgataaagatgttagaggttgggggcctaacgatcgcggagtttcttacacttttggatcagatatagtttctggatttcttaaaagactcgatcttgacctcatttgtagggctcaccaggttgttgaagatggattcgagttctttgcgaataagcagctcgtaacgatattctctgcgccgaattactgtggggaatttgacaatgcaggtgcgatgatgagtgtgtctgaggatttgacctgctcttttcagatcttaaaatctaatgacaagaaatcaaagttcagtttcggaagcagaggtggtgctaaaactagcttcccttatcctaaagtgaagtcgattctgagttcgcaaaattcgaaagaatacaactgatgaagatttaaaactccgcataataactattagaaaccatgccaacgtaactcgactactatatgatgagaaattaaagaggattttgaatttcggaattttgggaagcttctgtttttgttatgttttgtgttgtctgctgctatcacttgtgtgtatgtgtttttatttttggttgttgttgttgtaaatttggtttgtagttgttggtggttaaatttgataataaaacatgatttccttcggac

SEQ ID NO: 97524 - protein, 331 aa, Arabidopsis thaliana
  peptide (1)..(331): Ceres Seq. ID no. 12738067
  misc_feature (1)..(331): Homolog of NCBI NO: 30694273 NR Description: serine/threonine protein phosphatase type [Arabidopsis thaliana] >gi|22531251|gb|AAM97129.1| expressed [Arabidopsis thaliana] >gi|25084010|gb|AAN72154.1| expressed
  misc_feature (1)..(319): Homolog of NCBI NO: 18422326 NR Description: serine/threonine protein phosphatase type protein id: At5g43380.1, supported by cDNA: gi_3153200 thaliana] >gi|26454643|sp|O82733|PP17_ARATH Serine/threonine
  misc_feature (1)..(313): Homolog of NCBI NO: 3153201 NR Description: serine/threonine protein phosphatase type one
  misc_feature (1)..(325): Homolog of NCBI NO: 7435129 NR Description: phosphoprotein phosphatase (EC 3.1.3.16),
  misc_feature (1)..(314): Homolog of NCBI NO: 7435133 NR Description: phosphoprotein phosphatase (EC 3.1.3.16) 1
  misc_feature (1)..(322): Homolog of NCBI NO: 7435136 NR Description: phosphoprotein phosphatase (EC 3.1.3.16) 1a
  misc_feature (9)..(325): Homolog of NCBI NO: 7435132 NR Description: phosphoprotein phosphatase (EC 3.1.3.16) 1,
  misc_feature (1)..(314): Homolog of NCBI NO: 4506005 NR Description: protein phosphatase 1, catalytic subunit, beta [Homo sapiens] >gi|6981388|ref|NP_037197.1| protein phosphatase catalytic subunit, beta isoform [Rattus norvegicus]
  misc_feature (1)..(314): Homolog of NCBI NO: 27884151 NR Description: SI:zC214P16.4 (novel protein similar to human phosphatase 1, catalytic subunit, beta isoform (PPP1CB)) [Danio
  misc_feature (1)..(314): Homolog of NCBI NO: 227436 NR Description: protein phosphatase 1 delta
MDPGTLNSVINRLLEAREKPGKIVQLSETEIKQLCFVSRDIFLRQPNLLELEAPVKICGDIHGQYPDLLRLFEHGGYPPNSNYLFLGDYVDRGKQSLETICLLLAYKIKFPENFFLLRGNHESASINRIYGFYDECKRRFSVKIWRIFTDCFNCLPVAALIDERIFCMHGGLSPELLSLRQIRDIRRPTDIPDRGLLCDLLWSDPDKDVRGWGPNDRGVSYTFGSDIVSGFLKRLDLDLICRAHQVVEDGFEFFANKQLVTIFSAPNYCGEFDNAGAMMSVSEDLTCSFQILKSNDKKSKFSFGSRGGAKTSFPYPKVKSILSSQNSKEYN

SEQ ID NO: 97525 - DNA, 1013 bp, Arabidopsis thaliana
  misc_feature (1)..(1013): Ceres Seq. ID no. 12738271
  misc_feature: MA Experiment ID: 108434 Result: Up-regulated in Transcription
  misc_feature: MA Experiment 108434 PARAMETER Experiment Name: At_Root_Tips_cDNA_P Parameter: Tissue Value: Root Tips
  misc_feature: MA Experiment ID: 108461 Result: Down-regulated in Transcription
  misc_feature: MA Experiment 108461 PARAMETER Experiment Name: At_Germinating_Seeds_cDNA_P Parameter: Age (day) Value: 1 vs. 0
  misc_feature: MA Experiment 108461 PARAMETER Experiment Name: At_Germinating_Seeds_cDNA_P Parameter: Tissue Value: Germinating Seeds
  misc_feature: MA Experiment ID: 108462 Result: Down-regulated in Transcription
  misc_feature: MA Experiment 108462 PARAMETER Experiment Name: At_Germinating_Seeds_cDNA_P Parameter: Age (day) Value: 2 vs. 0
  misc_feature: MA Experiment 108462 PARAMETER Experiment Name: At_Germinating_Seeds_cDNA_P Parameter: Tissue Value: Germinating Seeds
  misc_feature: MA Experiment ID: 108463 Result: Down-regulated in Transcription
  misc_feature: MA Experiment 108463 PARAMETER Experiment Name: At_Germinating_Seeds_cDNA_P Parameter: Age (day) Value: 3 vs. 0
  misc_feature: MA Experiment 108463 PARAMETER Experiment Name: At_Germinating_Seeds_cDNA_P Parameter: Tissue Value: Germinating Seeds
  misc_feature: MA Experiment ID: 108464 Result: Down-regulated in Transcription
  misc_feature: MA Experiment 108464 PARAMETER Experiment Name: At_Germinating_Seeds_cDNA_P Parameter: Age (day) Value: 4 vs. 0
  misc_feature: MA Experiment 108464 PARAMETER Experiment Name: At_Germinating_Seeds_cDNA_P Parameter: Tissue Value: Germinating Seeds
  misc_feature: MA Experiment ID: 20000179 Result: Down-regulated in Transcription
  misc_feature: MA Experiment 20000179 PARAMETER Experiment Name: At_Germinating_Seeds_P Parameter: Age (hr) Value: 6 vs. 0
  misc_feature: MA Experiment 20000179 PARAMETER Experiment Name: At_Germinating_Seeds_P Parameter: Tissue Value: Germinating Seeds
ccacgcgtccgcccacgcgtccgcaactccaccgaattcagaagatcgaagaagatgagtagaggaagcggcgctggttatgatcgtcacatcactatcttctcaccggaaggtcgtctctttcaagttgaatatgccttcaaggccgtgaaaacagctggtattacttcaatcggagttcgtgggaaagattcggtttgcgtcgttacccagaagaaagttcctgacaagcttttggatcagtctagtgttacacatctgttccctatcaccaagtacattggattggtagctactggcattacagctgatgcaaggtctttggttcaacaagcaaggaatcaagcagctgaatttcggttcacttatggatatgagatgcctgttgacattcttgctaaatggatagcggacaagtcacaggtttacactcaacatgcttacatgagaccccttggagttgtcgctatggtaatgggtgttgatgaagagaatggtcccttactttacaaatgtgacccagctggacatttttacggtcacaaggcaactagtgctggtatgaaggaacaagaagcagtcaatttcttggaggaggaaatgaaaggaaacccatctttcacatttgatgaaaccgtgcagactgccatatcggctttgcaatctgttcttcaagaagacttcaaggctactgagattgaggtaggtgtggtgagagcagagaacccggaattccgtgcattgacaacggaggagattgaggagcatttgacagccattagtgaacgagactgatcaacttagtgaaacaagtgtgagttacgttgcttcgcttctatcagacattcctctaaagtgaccactctccatcgatcttttgtttggtcttccttccataatttaatttacttagtcaacccagcaaacttgaaaaacaaaaatgcactgtaatgcttaaggctgtgagagtttccgagtcttttgactcttcagaaatgacaccaactttactc

SEQ ID NO: 97526 - protein, 264 aa, Arabidopsis thaliana
  peptide (1)..(264): Ceres Seq. ID no. 12738272
  misc_feature (50)..(238): Pfam Name: Proteasome A-type and B-type Pfam Description: Proteasome A-type and B-type
  misc_feature (19)..(264): Homolog of NCBI NO: 3421070 NR Description: 20S proteasome subunit PAA1 [Arabidopsis thaliana]
  misc_feature (19)..(264): Homolog of NCBI NO: 15238554 NR Description: 20S proteasome alpha subunit A1 (PAA1); protein At5g35590.1, supported by cDNA: gi_20260139, supported by cDNA:
  misc_feature (19)..(264): Homolog of NCBI NO: 20260140 NR Description: multicatalytic endopeptidase complex alpha [Arabidopsis thaliana] >gi|21386959|gb|AAM47883.1| multicatalytic
  misc_feature (20)..(264): Homolog of NCBI NO: 2511588 NR Description: multicatalytic endopeptidase complex, proteasome
  misc_feature (19)..(264): Homolog of NCBI NO: 15224993 NR Description: 20S proteasome alpha subunit A2 (PAA2); protein At2g05840.1, supported by cDNA: gi_15450622, supported by cDNA: [Arabidopsis thaliana] >gi|12229902|sp|O81147|PS62_ARATH complex
PRVRPRVRNSTEFRRSKKMSRGSGAGYDRHITIFSPEGRLFQVEYAFKAVKTAGITSIGVRGKDSVCVVTQKKVPDKLLDQSSVTHLFPITKYIGLVATGITADARSLVQQARNQAAEFRFTYGYEMPVDILAKWIADKSQVYTQHAYMRPLGVVAMVMGVDEENGPLLYKCDPAGHFYGHKATSAGMKEQEAVNFLEEEMKGNPSFTFDETVQTAISALQSVLQEDFKATEIEVGVVRAENPEFRALTTEEIEEHLTAISERD

SEQ ID NO: 97527 - protein, 246 aa, Arabidopsis thaliana
  peptide (1)..(246): Ceres Seq. ID no. 12738273
  misc_feature (32)..(220): Pfam Name: Proteasome A-type and B-type Pfam Description: Proteasome A-type and B-type
  misc_feature (1)..(246): Homolog of NCBI NO: 3421070 NR Description: 20S proteasome subunit PAA1 [Arabidopsis thaliana]
  misc_feature (1)..(246): Homolog of NCBI NO: 15238554 NR Description: 20S proteasome alpha subunit A1 (PAA1); protein At5g35590.1, supported by cDNA: gi_20260139, supported by cDNA:
  misc_feature (1)..(246): Homolog of NCBI NO: 20260140 NR Description: multicatalytic endopeptidase complex alpha [Arabidopsis thaliana] >gi|21386959|gb|AAM47883.1| multicatalytic
  misc_feature (2)..(246): Homolog of NCBI NO: 2511588 NR Description: multicatalytic endopeptidase complex, proteasome
  misc_feature (1)..(246): Homolog of NCBI NO: 15224993 NR Description: 20S proteasome alpha subunit A2 (PAA2); protein At2g05840.1, supported by cDNA: gi_15450622, supported by cDNA: [Arabidopsis thaliana] >gi|12229902|sp|O81147|PS62_ARATH complex
MSRGSGAGYDRHITIFSPEGRLFQVEYAFKAVKTAGITSIGVRGKDSVCVVTQKKVPDKLLDQSSVTHLFPITKYIGLVATGITADARSLVQQARNQAAEFRFTYGYEMPVDILAKWIADKSQVYTQHAYMRPLGVVAMVMGVDEENGPLLYKCDPAGHFYGHKATSAGMKEQEAVNFLEEEMKGNPSFTFDETVQTAISALQSVLQEDFKATEIEVGVVRAENPEFRALTTEEIEEHLTAISERD

SEQ ID NO: 97528 - protein, 138 aa, Arabidopsis thaliana
  peptide (1)..(138): Ceres Seq. ID no. 12738274
  misc_feature (1)..(112): Pfam Name: Proteasome A-type and B-type Pfam Description: Proteasome A-type and B-type
  misc_feature (1)..(138): Homolog of NCBI NO: 3421070 NR Description: 20S proteasome subunit PAA1 [Arabidopsis thaliana]
  misc_feature (1)..(138): Homolog of NCBI NO: 15238554 NR Description: 20S proteasome alpha subunit A1 (PAA1); protein At5g35590.1, supported by cDNA: gi_20260139, supported by cDNA:
  misc_feature (1)..(138): Homolog of NCBI NO: 20260140 NR Description: multicatalytic endopeptidase complex alpha [Arabidopsis thaliana] >gi|21386959|gb|AAM47883.1| multicatalytic
  misc_feature (1)..(138): Homolog of NCBI NO: 2511588 NR Description: multicatalytic endopeptidase complex, proteasome
  misc_feature (1)..(138): Homolog of NCBI NO: 15224993 NR Description: 20S proteasome alpha subunit A2 (PAA2); protein At2g05840.1, supported by cDNA: gi_15450622, supported by cDNA: [Arabidopsis thaliana] >gi|12229902|sp|O81147|PS62_ARATH complex
MPVDILAKWIADKSQVYTQHAYMRPLGVVAMVMGVDEENGPLLYKCDPAGHFYGHKATSAGMKEQEAVNFLEEEMKGNPSFTFDETVQTAISALQSVLQEDFKATEIEVGVVRAENPEFRALTTEEIEEHLTAISERD

SEQ ID NO: 97529 - DNA, 1722 bp, Arabidopsis thaliana
  misc_feature (1)..(1722): Ceres Seq. ID no. 12738307
  misc_feature: MA Experiment ID: 108569 Result: Up-regulated in Transcription
  misc_feature: MA Experiment 108569 PARAMETER Experiment Name: At_0.001%_MeJA__cDNA_P Parameter: Timepoint (hr) Value: 6
  misc_feature: MA Experiment 108569 PARAMETER Experiment Name: At_0.001%_MeJA__cDNA_P Parameter: Tissue Value: Aerial
  misc_feature: MA Experiment 108569 PARAMETER Experiment Name: At_0.001%_MeJA__cDNA_P Parameter: Treatment Value: 0.001% MeJA vs. No Treatment
  misc_feature: MA Experiment ID: 108573 Result: Up-regulated in Transcription
  misc_feature: MA Experiment 108573 PARAMETER Experiment Name: At_Drought_cDNA_P Parameter: Timepoint (hr) Value: 6
  misc_feature: MA Experiment 108573 PARAMETER Experiment Name: At_Drought_cDNA_P Parameter: Tissue Value: Aerial
  misc_feature: MA Experiment 108573 PARAMETER Experiment Name: At_Drought_cDNA_P Parameter: Treatment Value: Drought vs. No Drought
  misc_feature: MA Experiment ID: 20000071 Result: Up-regulated in Transcription
  misc_feature: MA Experiment 20000071 PARAMETER Experiment Name: At_100uM_ABA_Mutants_cDNA_P Parameter: Plant Line Value: CS8104
  misc_feature: MA Experiment 20000071 PARAMETER Experiment Name: At_100uM_ABA_Mutants_cDNA_P Parameter: Timepoint (hr) Value: 6
  misc_feature: MA Experiment 20000071 PARAMETER Experiment Name: At_100uM_ABA_Mutants_cDNA_P Parameter: Tissue Value: Aerial
  misc_feature: MA Experiment 20000071 PARAMETER Experiment Name: At_100uM_ABA_Mutants_cDNA_P Parameter: Treatment Value: 100uM ABA vs. No Treatment
  misc_feature: MA Experiment ID: 20000086 Result: Up-regulated in Transcription
  misc_feature: MA Experiment 20000086 PARAMETER Experiment Name: At_100uM_ABA_Mutants_cDNA_P Parameter: Plant Line Value: CS22
  misc_feature: MA Experiment 20000086 PARAMETER Experiment Name: At_100uM_ABA_Mutants_cDNA_P Parameter: Timepoint (hr) Value: 6
  misc_feature: MA Experiment 20000086 PARAMETER Experiment Name: At_100uM_ABA_Mutants_cDNA_P Parameter: Tissue Value: Aerial
  misc_feature: MA Experiment 20000086 PARAMETER Experiment Name: At_100uM_ABA_Mutants_cDNA_P Parameter: Treatment Value: 100uM ABA vs. No Treatment
  misc_feature: MA Experiment ID: 20000171 Result: Down-regulated in Transcription
  misc_feature: MA Experiment 20000171 PARAMETER Experiment Name: At_42deg_Heat_P Parameter: Age (day) Value: 14
  misc_feature: MA Experiment 20000171 PARAMETER Experiment Name: At_42deg_Heat_P Parameter: Organism Value: A. thaliana
  misc_feature: MA Experiment 20000171 PARAMETER Experiment Name: At_42deg_Heat_P Parameter: Plant Line Value: WS
  misc_feature: MA Experiment 20000171 PARAMETER Experiment Name: At_42deg_Heat_P Parameter: Temperature (deg C) Value: 42 vs. 22
  misc_feature: MA Experiment 20000171 PARAMETER Experiment Name: At_42deg_Heat_P Parameter: Timepoint (hr) Value: 1
  misc_feature: MA Experiment 20000171 PARAMETER Experiment Name: At_42deg_Heat_P Parameter: Tissue Value: Aerial
  misc_feature: MA Experiment ID: 20000234 Result: Down-regulated in Transcription
  misc_feature: MA Experiment 20000234 PARAMETER Experiment Name: At_Siliques_P Parameter: Age (day) Value: 21
  misc_feature: MA Experiment 20000234 PARAMETER Experiment Name: At_Siliques_P Parameter: Organism Value: A. thaliana
  misc_feature: MA Experiment 20000234 PARAMETER Experiment Name: At_Siliques_P Parameter: Plant Line Value: WS
  misc_feature: MA Experiment 20000234 PARAMETER Experiment Name: At_Siliques_P Parameter: Tissue Value: Less Than 5mm Siliques vs. Whole Plant
  misc_feature: MA Experiment ID: 20000265 Result: Down-regulated in Transcription
  misc_feature: MA Experiment 20000265 PARAMETER Experiment Name: At_Open_Flower_P Parameter: Age (day) Value: 21
  misc_feature: MA Experiment 20000265 PARAMETER Experiment Name: At_Open_Flower_P Parameter: Plant Line Value: WS
  misc_feature: MA Experiment 20000265 PARAMETER Experiment Name: At_Open_Flower_P Parameter: Tissue Value: Closed Flower vs. Whole Plant
  misc_feature: MA Experiment ID: 20000794 Result: Up-regulated in Transcription
  misc_feature: MA Experiment 20000794 PARAMETER Experiment Name: At_Petals_P Parameter: Age (day) Value: 23-25 days
  misc_feature: MA Experiment 20000794 PARAMETER Experiment Name: At_Petals_P Parameter: Plant Line Value: WS
  misc_feature: MA Experiment 20000794 PARAMETER Experiment Name: At_Petals_P Parameter: Tissue Value: Petals vs. Whole plant
cggccgctttgctgagcgcaatgacgggaccttcagagttggactgaaaaaactcaagttggattcgaaaaatcggcttgcagcacgcgtcgaatccaagcaagaaaagcccctgagagcttacagacttggagattctggagatgctgatgttgttgtgcttaagaattatctagatgctcagtactatggtgagatcgccattggtactccacctcagaagttcactgtggtttttgacactgggagctctaacctctgggtgccatcatcaaaatgctatttctcacttgcatgtctcttgcatcccaaatacaagtcgtctcgttcaagcacatatgagaagaatggaaaagctgccgcaattcattacggcactggagcaattgctggtttttttagtaatgatgctgtcacagttggcgatttagttgtcaaggatcaggagtttatcgaggcaaccaaggagcctggtataacatttgttgtagctaaatttgatggtatccttggtcttggattccaagagatctctgttggaaaagctgctcctgtttggtacaacatgctcaagcaaggccttatcaaggagccggttttttcattttggcttaaccgtaatgcagatgaagaagaaggtggtgaacttgtatttggaggtgttgatccaaatcatttcaagggcaaacatacatatgttcctgtgacacaaaagggctactggcagtttgacatgggtgatgttcttattggcggtgcacccactgggttctgtgaaagtggctgttctgcgatagcagattctggtacatctttgcttgccggtccaacgactataatcaccatgataaaccatgctattggagcagctggagttgttagccagcagtgcaagactgttgtggatcaatacgggcagaccattttggatttacttttgtctgagacccaaccgaagaaaatctgctcgcagattggtctgtgtacttttgatggtacccgtggtgtcagtatgggcattgagtcggtggtggacaaggaaaacgccaaattgtctaatggtgttggagatgctgcgtgttctgcatgtgagatggctgttgtgtggatccagagccagttgaggcaaaacatgactcaagagcgcatattgaactacgtcaacgagctatgtgaacgcctccccagcccaatgggagagtctgcagttgactgtgcacaactgtcaacaatgcccactgtttcacttaccattggaggcaaagtatttgatcttgctccagaagagtatgttctgaaagttggtgagggacctgtggcacagtgcatcagtggttttattgctcttgacgttgctccacctcgtggacctctctggatcttgggagatgtgttcatgggcaaataccacaccgtatttgactttggtaacgaacaggtcgggtttgcagaggcagcctaaacacgatcgggttggtgtcgcgtatggttttagtatgaacaatctgcgtctcaagtgttgtttgtatgttttctggagttgaggactttgagtcgtagtagaaatggtggcgcagttccttttaagttgtttcctaacgaaaaaaggccttgtagttttgaaggcattggctttgtaaataccttctaagtaagttcgatggtgaaaaaactgaaaactttaataaagcctgcctcttttgtttaaaaaaagcggccgcg

SEQ ID NO: 97530 - protein, 486 aa, Arabidopsis thaliana
  peptide (1)..(486): Ceres Seq. ID no. 12738308
  misc_feature (10)..(336): Pfam Name: Eukaryotic aspartyl protease Pfam Description: Eukaryotic aspartyl protease
  misc_feature (1)..(486): Homolog of NCBI NO: 1354272 NR Description: aspartic proteinase [Arabidopsis thaliana]
  misc_feature (3)..(486): Homolog of NCBI NO: 15221141 NR Description: putative aspartic proteinase; protein id: supported by cDNA: 8972., supported by cDNA: gi_15912218, by cDNA: gi_15912250, supported by cDNA: gi_17381035 [Arabidopsis
  misc_feature (4)..(486): Homolog of NCBI NO: 7435838 NR Description: probable aspartic proteinase (EC 3.4.23.-) 1 -
  misc_feature (3)..(485): Homolog of NCBI NO: 22330379 NR Description: aspartic protease, putative; protein id: supported by cDNA: gi_17979427 [Arabidopsis thaliana] putative aspartic protease [Arabidopsis thaliana]
  misc_feature (7)..(486): Homolog of NCBI NO: 2811025 NR Description: Aspartic proteinase precursor
  misc_feature (7)..(486): Homolog of NCBI NO: 21616053 NR Description: aspartic proteinase [Theobroma cacao]
  misc_feature (7)..(486): Homolog of NCBI NO: 20800441 NR Description: aspartic proteinase [Vigna unguiculata]
  misc_feature (7)..(486): Homolog of NCBI NO: 7435837 NR Description: aspartic proteinase (EC 3.4.23.-) - cowpea
GRFAERNDGTFRVGLKKLKLDSKNRLAARVESKQEKPLRAYRLGDSGDADVVVLKNYLDAQYYGEIAIGTPPQKFTVVFDTGSSNLWVPSSKCYFSLACLLHPKYKSSRSSTYEKNGKAAAIHYGTGAIAGFFSNDAVTVGDLVVKDQEFIEATKEPGITFVVAKFDGILGLGFQEISVGKAAPVWYNMLKQGLIKEPVFSFWLNRNADEEEGGELVFGGVDPNHFKGKHTYVPVTQKGYWQFDMGDVLIGGAPTGFCESGCSAIADSGTSLLAGPTTIITMINHAIGAAGVVSQQCKTVVDQYGQTILDLLLSETQPKKICSQIGLCTFDGTRGVSMGIESVVDKENAKLSNGVGDAACSACEMAVVWIQSQLRQNMTQERILNYVNELCERLPSPMGESAVDCAQLSTMPTVSLTIGGKVFDLAPEEYVLKVGEGPVAQCISGFIALDVAPPRGPLWILGDVFMGKYHTVFDFGNEQVGFAEAA

SEQ ID NO: 97531 - protein, 298 aa, Arabidopsis thaliana; identical to SEQ ID NO: 28197
  peptide (1)..(298): Ceres Seq. ID no. 12738309
  misc_feature (1)..(148): Pfam Name: Eukaryotic aspartyl protease Pfam Description: Eukaryotic aspartyl protease
  misc_feature (1)..(298): Homolog of NCBI NO: 1354272 NR Description: aspartic proteinase [Arabidopsis thaliana]
  misc_feature (1)..(298): Homolog of NCBI NO: 15221141 NR Description: putative aspartic proteinase; protein id: supported by cDNA: 8972., supported by cDNA: gi_15912218, by cDNA: gi_15912250, supported by cDNA: gi_17381035 [Arabidopsis
  misc_feature (1)..(298): Homolog of NCBI NO: 7435838 NR Description: probable aspartic proteinase (EC 3.4.23.-) 1 -
  misc_feature (1)..(297): Homolog of NCBI NO: 22330379 NR Description: aspartic protease, putative; protein id: supported by cDNA: gi_17979427 [Arabidopsis thaliana] putative aspartic protease [Arabidopsis thaliana]
  misc_feature (1)..(298): Homolog of NCBI NO: 2811025 NR Description: Aspartic proteinase precursor
  misc_feature (1)..(298): Homolog of NCBI NO: 21616053 NR Description: aspartic proteinase [Theobroma cacao]
  misc_feature (1)..(298): Homolog of NCBI NO: 20800441 NR Description: aspartic proteinase [Vigna unguiculata]
  misc_feature (1)..(298): Homolog of NCBI NO: 7435837 NR Description: aspartic proteinase (EC 3.4.23.-) - cowpea

SEQ ID NO: 97532 - DNA, 984 bp, Arabidopsis thaliana
  misc_feature (1)..(984): Ceres Seq. ID no. 12738318
  misc_feature: MA Experiment ID: 108434 Result: Down-regulated in Transcription
  misc_feature: MA Experiment 108434 PARAMETER Experiment Name: At_Root_Tips_cDNA_P Parameter: Tissue Value: Root Tips
  misc_feature: MA Experiment ID: 108435 Result: Down-regulated in Transcription
  misc_feature: MA Experiment 108435 PARAMETER Experiment Name: At_stm_Mutants_cDNA_P Parameter: Plant Line Value: wt Landsburg vs stm
  misc_feature: MA Experiment 108435 PARAMETER Experiment Name: At_stm_Mutants_cDNA_P Parameter: Tissue Value: Shoot Apical Meristem Region
  misc_feature: MA Experiment ID: 108488 Result: Down-regulated in Transcription
  misc_feature: MA Experiment ID: 108577 Result: Down-regulated in Transcription
  misc_feature: MA Experiment 108577 PARAMETER Experiment Name: At_42deg_Heat_cDNA_P Parameter: Temperature (deg C) Value: 42 vs. 22
  misc_feature: MA Experiment 108577 PARAMETER Experiment Name: At_42deg_Heat_cDNA_P Parameter: Timepoint (hr) Value: 6
  misc_feature: MA Experiment 108577 PARAMETER Experiment Name: At_42deg_Heat_cDNA_P Parameter: Tissue Value: Aerial
  misc_feature: MA Experiment ID: 108579 Result: Down-regulated in Transcription
  misc_feature: MA Experiment 108579 PARAMETER Experiment Name: At_4deg_Cold_cDNA_P Parameter: Temperature (deg C) Value: 4 vs. 22
  misc_feature: MA Experiment 108579 PARAMETER Experiment Name: At_4deg_Cold_cDNA_P Parameter: Timepoint (hr) Value: 6
  misc_feature: MA Experiment 108579 PARAMETER Experiment Name: At_4deg_Cold_cDNA_P Parameter: Tissue Value: Aerial
  misc_feature: MA Experiment ID: 108595 Result: Down-regulated in Transcription
  misc_feature: MA Experiment 108595 PARAMETER Experiment Name: At_Ler-pi_Ovule_cDNA_P Parameter: Plant Line Value: null
  misc_feature: MA Experiment ID: 20000072 Result: Up-regulated in Transcription
  misc_feature: MA Experiment 20000072 PARAMETER Experiment Name: At_100uM_ABA_Mutants_cDNA_P Parameter: Plant Line Value: CS8105
  misc_feature: MA Experiment 20000072 PARAMETER Experiment Name: At_100uM_ABA_Mutants_cDNA_P Parameter: Timepoint (hr) Value: 6
  misc_feature: MA Experiment 20000072 PARAMETER Experiment Name: At_100uM_ABA_Mutants_cDNA_P Parameter: Tissue Value: Aerial
  misc_feature: MA Experiment 20000072 PARAMETER Experiment Name: At_100uM_ABA_Mutants_cDNA_P Parameter: Treatment Value: 100uM ABA vs. No Treatment
  misc_feature: MA Experiment ID: 20000111 Result: Down-regulated in Transcription
  misc_feature: MA Experiment 20000111 PARAMETER Experiment Name: At_42deg_Heat_cDNA_P Parameter: Temperature (deg C) Value: 42 vs. 22
  misc_feature: MA Experiment 20000111 PARAMETER Experiment Name: At_42deg_Heat_cDNA_P Parameter: Timepoint (hr) Value: 6
  misc_feature: MA Experiment 20000111 PARAMETER Experiment Name: At_42deg_Heat_cDNA_P Parameter: Tissue Value: Aerial
  misc_feature: MA Experiment ID: 20000113 Result: Down-regulated in Transcription
  misc_feature: MA Experiment 20000113 PARAMETER Experiment Name: At_42deg_Heat_cDNA_P Parameter: Temperature (deg C) Value: 42 vs. 22
  misc_feature: MA Experiment 20000113 PARAMETER Experiment Name: At_42deg_Heat_cDNA_P Parameter: Timepoint (hr) Value: 8
  misc_feature: MA Experiment 20000113 PARAMETER Experiment Name: At_42deg_Heat_cDNA_P Parameter: Tissue Value: Aerial
  misc_feature: MA Experiment ID: 20000173 Result: Down-regulated in Transcription
  misc_feature: MA Experiment 20000173 PARAMETER Experiment Name: At_42deg_Heat_P Parameter: Age (day) Value: 14
  misc_feature: MA Experiment 20000173 PARAMETER Experiment Name: At_42deg_Heat_P Parameter: Organism Value: A. thaliana
  misc_feature: MA Experiment 20000173 PARAMETER Experiment Name: At_42deg_Heat_P Parameter: Plant Line Value: WS
  misc_feature: MA Experiment 20000173 PARAMETER Experiment Name: At_42deg_Heat_P Parameter: Temperature (deg C) Value: 42 vs. 22
  misc_feature: MA Experiment 20000173 PARAMETER Experiment Name: At_42deg_Heat_P Parameter: Timepoint (hr) Value: 6
  misc_feature: MA Experiment 20000173 PARAMETER Experiment Name: At_42deg_Heat_P Parameter: Tissue Value: Aerial
  misc_feature: MA Experiment ID: 20000179 Result: Up-regulated in Transcription
  misc_feature: MA Experiment 20000179 PARAMETER Experiment Name: At_Germinating_Seeds_P Parameter: Age (hr) Value: 6 vs. 0
  misc_feature: MA Experiment 20000179 PARAMETER Experiment Name: At_Germinating_Seeds_P Parameter: Tissue Value: Germinating Seeds
  misc_feature: MA Experiment ID: 20000184 Result: Down-regulated in Transcription
  misc_feature: MA Experiment 20000184 PARAMETER Experiment Name: At_Shoots__P Parameter: Age (day) Value: 7
  misc_feature: MA Experiment 20000184 PARAMETER Experiment Name: At_Shoots__P Parameter: Tissue Value: Shoots vs. Whole Plant
  misc_feature: MA Experiment ID: 20000185 Result: Down-regulated in Transcription
  misc_feature: MA Experiment 20000185 PARAMETER Experiment Name: At_Roots__P Parameter: Age (day) Value: 7 vs. 21
  misc_feature: MA Experiment 20000185 PARAMETER Experiment Name: At_Roots__P Parameter: Organism Value: A. thaliana
  misc_feature: MA Experiment 20000185 PARAMETER Experiment Name: At_Roots__P Parameter: Tissue Value: Roots vs. Whole Plant
  misc_feature: MA Experiment ID: 20000227 Result: Down-regulated in Transcription
  misc_feature: MA Experiment 20000227 PARAMETER Experiment Name: At_Root-Tips-vs-Tops_P Parameter: Tissue Value: Root Tips vs. Root Tops
  misc_feature: MA Experiment ID: 20000234 Result: Down-regulated in Transcription
  misc_feature: MA Experiment 20000234 PARAMETER Experiment Name: At_Siliques_P Parameter: Age (day) Value: 21
  misc_feature: MA Experiment 20000234 PARAMETER Experiment Name: At_Siliques_P Parameter: Organism Value: A. thaliana
  misc_feature: MA Experiment 20000234 PARAMETER Experiment Name: At_Siliques_P Parameter: Plant Line Value: WS
  misc_feature: MA Experiment 20000234 PARAMETER Experiment Name: At_Siliques_P Parameter: Tissue Value: Less Than 5mm Siliques vs. Whole Plant
  misc_feature: MA Experiment ID: 20000264 Result: Down-regulated in Transcription
  misc_feature: MA Experiment 20000264 PARAMETER Experiment Name: At_Open_Flower_P Parameter: Age (day) Value: 21
  misc_feature: MA Experiment 20000264 PARAMETER Experiment Name: At_Open_Flower_P Parameter: Plant Line Value: WS
  misc_feature: MA Experiment 20000264 PARAMETER Experiment Name: At_Open_Flower_P Parameter: Tissue Value: Open Flower vs. Whole Plant
  misc_feature: MA Experiment ID: 20000439 Result: Down-regulated in Transcription
  misc_feature: MA Experiment 20000439 PARAMETER Experiment Name: At_Roots__P Parameter: Age (day) Value: 14 vs. 21
  misc_feature: MA Experiment 20000439 PARAMETER Experiment Name: At_Roots__P Parameter: Organism Value: A. thaliana
  misc_feature: MA Experiment 20000439 PARAMETER Experiment Name: At_Roots__P Parameter: Tissue Value: Roots vs. Whole Plant
  misc_feature: MA Experiment ID: 20000495 Result: Down-regulated in Transcription
  misc_feature: MA Experiment 20000495 PARAMETER Experiment Name: At_Guard_Cells_P Parameter: Harvest Date Value: 8/2/2002
  misc_feature: MA Experiment 20000495 PARAMETER Experiment Name: At_Guard_Cells_P Parameter: Organism Value: A. thaliana
  misc_feature: MA Experiment 20000495 PARAMETER Experiment Name: At_Guard_Cells_P Parameter: Tissue Value: Guard Cells vs. Leaves
gttcacacatctctcccaaagtaggtagaagaagatggggacgacgttagatgtatcaagagcagagctagcacttgtggtaatgtatttgaacaaagcagaggcaagagataagttatgcagagctatacagtatggttccaagttcttgagtggtggacaacctggtactgctcaaaatgttgacaaatctactagcttagcaagaaaagtcttccgtcttttcaagtttgtgaatgacttgcatggtcttatcagtcctgtgcctaaaggaactcctcttcctcttgttttacttggaaagtcgaagaacgcacttttatctacattcttgttcctggatcaaattgtctggcttgggagatcaggaatatataagaacaaagaacgagctgagttacttggacgtatatctctcttctgctggatgggatcttctgtctgcacaactttagtcgaggttggtgagatgggaaggctttcttcatcaatgaagaagatcgaaaagggactcaagaatggaaacaagtatcaggatgaggattatcgtgctaagctaaaaaaatcaaacgagaggtcacttgctttgatcaaatcagctatggacattgttgtagcagctggtcttcttcagttagctccaacgaagatcactcctcgtgtcaccggagcttttggattcatcacctccatcatttcttgttaccagttgcttccgacacgccccaagatcaaaacaccctgaagtcaatcgaggaagctggtgttaaggagaaagtcatttcagaaagtttctgttcttcttattattaaggaaattcactgctgttataaaacatcgtataaaatacttatttgcaggaattacggttattataaatttatgcctcagattcttgatacacaagtttcaatactcaatagtattgcattattatgagatgttgtttctgctacgcaataactagaggcaaaatccaactt

SEQ ID NO: 97533 - protein, 236 aa, Arabidopsis thaliana; identical to SEQ ID NO: 28883
  peptide (1)..(236): Ceres Seq. ID no. 12738319
  misc_feature (12)..(227): Pfam Name: Peroxisomal biogenesis factor 11 (PEX11) Pfam Description: Peroxisomal biogenesis factor 11 (PEX11)
  misc_feature (1)..(236): Homolog of NCBI NO: 18406877 NR Description: expressed protein; protein id: At2g45740.1, by cDNA: 12250., supported by cDNA: gi_15450879 [Arabidopsis >gi|15450880|gb|AAK96711.1| Unknown protein [Arabidopsis
  misc_feature (1)..(231): Homolog of NCBI NO: 7486466 NR Description: hypothetical protein At2g45740 [imported] -
  misc_feature (3)..(236): Homolog of NCBI NO: 30695340 NR Description: expressed protein [Arabidopsis thaliana] unknown protein [Arabidopsis thaliana]
  misc_feature (3)..(234): Homolog of NCBI NO: 18378887 NR Description: expressed protein; protein id: At1g01820.1, by cDNA: 28475., supported by cDNA: gi_12083289, supported by gi_17381254, supported by cDNA: gi_20453366 [Arabidopsis
  misc_feature (3)..(236): Homolog of NCBI NO: 11358250 NR Description: hypothetical protein T27I15_160 - Arabidopsis >gi|8388623|emb|CAB94143.1| putative protein [Arabidopsis
  misc_feature (3)..(234): Homolog of NCBI NO: 8489788 NR Description: unknown [Lycopersicon esculentum]
  misc_feature (3)..(234): Homolog of NCBI NO: 25553559 NR Description: OSJNBa0038F22.7 [Oryza sativa (japonica
  misc_feature (3)..(225): Homolog of NCBI NO: 34898026 NR Description: ESTs AU064537(E31904),AU082147(E31904) correspond a region of the predicted gene.~Similar to Arabidopsis thaliana
  misc_feature (132)..(236): Homolog of NCBI NO: 14335058 NR Description: At2g45740/F4I18.28 [Arabidopsis thaliana]

SEQ ID NO: 97534 - protein, 220 aa, Arabidopsis thaliana; identical to SEQ ID NO: 28884
  peptide (1)..(220): Ceres Seq. ID no. 12738320
  misc_feature (1)..(211): Pfam Name: Peroxisomal biogenesis factor 11 (PEX11) Pfam Description: Peroxisomal biogenesis factor 11 (PEX11)
  misc_feature (1)..(220): Homolog of NCBI NO: 18406877 NR Description: expressed protein; protein id: At2g45740.1, by cDNA: 12250., supported by cDNA: gi_15450879 [Arabidopsis >gi|15450880|gb|AAK96711.1| Unknown protein [Arabidopsis
  misc_feature (1)..(215): Homolog of NCBI NO: 7486466 NR Description: hypothetical protein At2g45740 [imported] -
  misc_feature (1)..(220): Homolog of NCBI NO: 30695340 NR Description: expressed protein [Arabidopsis thaliana] unknown protein [Arabidopsis thaliana]
  misc_feature (1)..(218): Homolog of NCBI NO: 18378887 NR Description: expressed protein; protein id: At1g01820.1, by cDNA: 28475., supported by cDNA: gi_12083289, supported by gi_17381254, supported by cDNA: gi_20453366 [Arabidopsis
  misc_feature (1)..(220): Homolog of NCBI NO: 11358250 NR Description: hypothetical protein T27I15_160 - Arabidopsis >gi|8388623|emb|CAB94143.1| putative protein [Arabidopsis
  misc_feature (1)..(218): Homolog of NCBI NO: 8489788 NR Description: unknown [Lycopersicon esculentum]
  misc_feature (1)..(218): Homolog of NCBI NO: 25553559 NR Description: OSJNBa0038F22.7 [Oryza sativa (japonica
  misc_feature (1)..(209): Homolog of NCBI NO: 34898026 NR Description: ESTs AU064537(E31904),AU082147(E31904) correspond a region of the predicted gene.~Similar to Arabidopsis thaliana
  misc_feature (116)..(220): Homolog of NCBI NO: 14335058 NR Description: At2g45740/F4I18.28 [Arabidopsis thaliana]

SEQ ID NO: 97535 - DNA, 1922 bp, Arabidopsis thaliana
  misc_feature (1)..(1922): Ceres Seq. ID no. 12738434
  misc_feature: MA Experiment ID: 108569 Result: Up-regulated in Transcription
  misc_feature: MA Experiment 108569 PARAMETER Experiment Name: At_0.001%_MeJA__cDNA_P Parameter: Timepoint (hr) Value: 6
  misc_feature: MA Experiment 108569 PARAMETER Experiment Name: At_0.001%_MeJA__cDNA_P Parameter: Tissue Value: Aerial
  misc_feature: MA Experiment 108569 PARAMETER Experiment Name: At_0.001%_MeJA__cDNA_P Parameter: Treatment Value: 0.001% MeJA vs. No Treatment
  misc_feature: MA Experiment ID: 108573 Result: Up-regulated in Transcription
  misc_feature: MA Experiment 108573 PARAMETER Experiment Name: At_Drought_cDNA_P Parameter: Timepoint (hr) Value: 6
  misc_feature: MA Experiment 108573 PARAMETER Experiment Name: At_Drought_cDNA_P Parameter: Tissue Value: Aerial
  misc_feature: MA Experiment 108573 PARAMETER Experiment Name: At_Drought_cDNA_P Parameter: Treatment Value: Drought vs. No Drought
  misc_feature: MA Experiment ID: 108576 Result: Up-regulated in Transcription
  misc_feature: MA Experiment 108576 PARAMETER Experiment Name: At_42deg_Heat_cDNA_P Parameter: Temperature (deg C) Value: 42 vs. 22
  misc_feature: MA Experiment 108576 PARAMETER Experiment Name: At_42deg_Heat_cDNA_P Parameter: Timepoint (hr) Value: 1
  misc_feature: MA Experiment 108576 PARAMETER Experiment Name: At_42deg_Heat_cDNA_P Parameter: Tissue Value: Aerial
  misc_feature: MA Experiment ID: 108577 Result: Up-regulated in Transcription
  misc_feature: MA Experiment 108577 PARAMETER Experiment Name: At_42deg_Heat_cDNA_P Parameter: Temperature (deg C) Value: 42 vs. 22
  misc_feature: MA Experiment 108577 PARAMETER Experiment Name: At_42deg_Heat_cDNA_P Parameter: Timepoint (hr) Value: 6
  misc_feature: MA Experiment 108577 PARAMETER Experiment Name: At_42deg_Heat_cDNA_P Parameter: Tissue Value: Aerial
  misc_feature: MA Experiment ID: 108585 Result: Up-regulated in Transcription
  misc_feature: MA Experiment 108585 PARAMETER Experiment Name: At_5mM_NaNP_cDNA_P Parameter: Timepoint (hr) Value: 6
  misc_feature: MA Experiment 108585 PARAMETER Experiment Name: At_5mM_NaNP_cDNA_P Parameter: Tissue Value: Aerial
  misc_feature: MA Experiment 108585 PARAMETER Experiment Name: At_5mM_NaNP_cDNA_P Parameter: Treatment Value: null
  misc_feature: MA Experiment ID: 108594 Result: Down-regulated in Transcription
  misc_feature: MA Experiment 108594 PARAMETER Experiment Name: At_Ler-rhl_Root_cDNA_P Parameter: Plant Line Value: null
  misc_feature: MA Experiment ID: 108595 Result: Down-regulated in Transcription
  misc_feature: MA Experiment 108595 PARAMETER Experiment Name: At_Ler-pi_Ovule_cDNA_P Parameter: Plant Line Value: null
  misc_feature: MA Experiment ID: 20000087 Result: Down-regulated in Transcription
  misc_feature: MA Experiment 20000087 PARAMETER Experiment Name: At_100uM_ABA_Mutants_cDNA_P Parameter: Plant Line Value: WS
  misc_feature: MA Experiment 20000087 PARAMETER Experiment Name: At_100uM_ABA_Mutants_cDNA_P Parameter: Timepoint (hr) Value: 6
  misc_feature: MA Experiment 20000087 PARAMETER Experiment Name: At_100uM_ABA_Mutants_cDNA_P Parameter: Tissue Value: Aerial
  misc_feature: MA Experiment 20000087 PARAMETER Experiment Name: At_100uM_ABA_Mutants_cDNA_P Parameter: Treatment Value: 100uM ABA vs. No Treatment
  misc_feature: MA Experiment ID: 20000093 Result: Up-regulated in Transcription
  misc_feature: MA Experiment 20000093 PARAMETER Experiment Name: At_42deg_Heat_cDNA_P Parameter: Temperature (deg C) Value: 42 vs. 22
  misc_feature: MA Experiment 20000093 PARAMETER Experiment Name: At_42deg_Heat_cDNA_P Parameter: Timepoint (hr) Value: 0.5
  misc_feature: MA Experiment 20000093 PARAMETER Experiment Name: At_42deg_Heat_cDNA_P Parameter: Tissue Value: Aerial
  misc_feature: MA Experiment ID: 20000112 Result: Up-regulated in Transcription
  misc_feature: MA Experiment 20000112 PARAMETER Experiment Name: At_42deg_Heat_cDNA_P Parameter: Temperature (deg C) Value: 42 vs. 22
  misc_feature: MA Experiment 20000112 PARAMETER Experiment Name: At_42deg_Heat_cDNA_P Parameter: Timepoint (hr) Value: 2
  misc_feature: MA Experiment 20000112 PARAMETER Experiment Name: At_42deg_Heat_cDNA_P Parameter: Tissue Value: Aerial
  misc_feature: MA Experiment ID: 20000113 Result: Up-regulated in Transcription
  misc_feature: MA Experiment 20000113 PARAMETER Experiment Name: At_42deg_Heat_cDNA_P Parameter: Temperature (deg C) Value: 42 vs. 22
  misc_feature: MA Experiment 20000113 PARAMETER Experiment Name: At_42deg_Heat_cDNA_P Parameter: Timepoint (hr) Value: 8
  misc_feature: MA Experiment 20000113 PARAMETER Experiment Name: At_42deg_Heat_cDNA_P Parameter: Tissue Value: Aerial
  misc_feature: MA Experiment ID: 20000144 Result: Up-regulated in Transcription
  misc_feature: MA Experiment 20000144 PARAMETER Experiment Name: At_42deg_Heat_cDNA_P Parameter: Temperature (deg C) Value: 42 vs. 22
  misc_feature: MA Experiment 20000144 PARAMETER Experiment Name: At_42deg_Heat_cDNA_P Parameter: Timepoint (hr) Value: 1
  misc_feature: MA Experiment 20000144 PARAMETER Experiment Name: At_42deg_Heat_cDNA_P Parameter: Tissue Value: Aerial
  misc_feature: MA Experiment ID: 20000171 Result: Up-regulated in Transcription
  misc_feature: MA Experiment 20000171 PARAMETER Experiment Name: At_42deg_Heat_P Parameter: Age (day) Value: 14
  misc_feature: MA Experiment 20000171 PARAMETER Experiment Name: At_42deg_Heat_P Parameter: Organism Value: A. thaliana
  misc_feature: MA Experiment 20000171 PARAMETER Experiment Name: At_42deg_Heat_P Parameter: Plant Line Value: WS
  misc_feature: MA Experiment 20000171 PARAMETER Experiment Name: At_42deg_Heat_P Parameter: Temperature (deg C) Value: 42 vs. 22
  misc_feature: MA Experiment 20000171 PARAMETER Experiment Name: At_42deg_Heat_P Parameter: Timepoint (hr) Value: 1
  misc_feature: MA Experiment 20000171 PARAMETER Experiment Name: At_42deg_Heat_P Parameter: Tissue Value: Aerial
  misc_feature: MA Experiment ID: 20000173 Result: Up-regulated in Transcription
  misc_feature: MA Experiment 20000173 PARAMETER Experiment Name: At_42deg_Heat_P Parameter: Age (day) Value: 14
  misc_feature: MA Experiment 20000173 PARAMETER Experiment Name: At_42deg_Heat_P Parameter: Organism Value: A. thaliana
  misc_feature: MA Experiment 20000173 PARAMETER Experiment Name: At_42deg_Heat_P Parameter: Plant Line Value: WS
  misc_feature: MA Experiment 20000173 PARAMETER Experiment Name: At_42deg_Heat_P Parameter: Temperature (deg C) Value: 42 vs. 22
  misc_feature: MA Experiment 20000173 PARAMETER Experiment Name: At_42deg_Heat_P Parameter: Timepoint (hr) Value: 6
  misc_feature: MA Experiment 20000173 PARAMETER Experiment Name: At_42deg_Heat_P Parameter: Tissue Value: Aerial
  misc_feature: MA Experiment ID: 20000184 Result: Down-regulated in Transcription
  misc_feature: MA Experiment 20000184 PARAMETER Experiment Name: At_Shoots__P Parameter: Age (day) Value: 7
  misc_feature: MA Experiment 20000184 PARAMETER Experiment Name: At_Shoots__P Parameter: Tissue Value: Shoots vs. Whole Plant
  misc_feature: MA Experiment ID: 20000234 Result: Down-regulated in Transcription
  misc_feature: MA Experiment 20000234 PARAMETER Experiment Name: At_Siliques_P Parameter: Age (day) Value: 21
  misc_feature: MA Experiment 20000234 PARAMETER Experiment Name: At_Siliques_P Parameter: Organism Value: A. thaliana
  misc_feature: MA Experiment 20000234 PARAMETER Experiment Name: At_Siliques_P Parameter: Plant Line Value: WS
  misc_feature: MA Experiment 20000234 PARAMETER Experiment Name: At_Siliques_P Parameter: Tissue Value: Less Than 5mm Siliques vs. Whole Plant
  misc_feature: MA Experiment ID: 20000455 Result: Up-regulated in Transcription
  misc_feature: MA Experiment 20000455 PARAMETER Experiment Name: At_100uM_ABA_P Parameter: Age (day) Value: 16
  misc_feature: MA Experiment 20000455 PARAMETER Experiment Name: At_100uM_ABA_P Parameter: Organism Value: A. thaliana
  misc_feature: MA Experiment 20000455 PARAMETER Experiment Name: At_100uM_ABA_P Parameter: Plant Line Value: WS
  misc_feature: MA Experiment 20000455 PARAMETER Experiment Name: At_100uM_ABA_P Parameter: Timepoint (hr) Value: 48
  misc_feature: MA Experiment 20000455 PARAMETER Experiment Name: At_100uM_ABA_P Parameter: Tissue Value: Aerial
  misc_feature: MA Experiment 20000455 PARAMETER Experiment Name: At_100uM_ABA_P Parameter: Treatment Value: 100uM ABA vs. No Treatment
  misc_feature: MA Experiment ID: 20000495 Result: Down-regulated in Transcription
  misc_feature: MA Experiment 20000495 PARAMETER Experiment Name: At_Guard_Cells_P Parameter: Harvest Date Value: 8/2/2002
  misc_feature: MA Experiment 20000495 PARAMETER Experiment Name: At_Guard_Cells_P Parameter: Organism Value: A. thaliana
  misc_feature: MA Experiment 20000495 PARAMETER Experiment Name: At_Guard_Cells_P Parameter: Tissue Value: Guard Cells vs. Leaves
  misc_feature: MA Experiment ID: 20000496 Result: Down-regulated in Transcription
  misc_feature: MA Experiment 20000496 PARAMETER Experiment Name: At_Guard_Cells_P Parameter: Harvest Date Value: 7/19/2002
  misc_feature: MA Experiment 20000496 PARAMETER Experiment Name: At_Guard_Cells_P Parameter: Organism Value: Canola
  misc_feature: MA Experiment 20000496 PARAMETER Experiment Name: At_Guard_Cells_P Parameter: Tissue Value: Guard Cells vs. Leaves
  misc_feature: MA Experiment ID: 20001451 Result: Down-regulated in Transcription
  misc_feature: MA Experiment 20001451 PARAMETER Experiment Name: At_Far-red-induction_P Parameter: Age (day) Value: 7
  misc_feature: MA Experiment 20001451 PARAMETER Experiment Name: At_Far-red-induction_P Parameter: Light Value: Far-red vs. White
  misc_feature: MA Experiment 20001451 PARAMETER Experiment Name: At_Far-red-induction_P Parameter: Organism Value: A. thaliana
  misc_feature: MA Experiment 20001451 PARAMETER Experiment Name: At_Far-red-induction_P Parameter: Plant Line Value: Columbia
  misc_feature: MA Experiment 20001451 PARAMETER Experiment Name: At_Far-red-induction_P Parameter: Timepoint (hr) Value: 24
  misc_feature: MA Experiment 20001451 PARAMETER Experiment Name: At_Far-red-induction_P Parameter: Tissue Value: Whole Plant
  misc_feature: MA Experiment ID: 20001560 Result: Down-regulated in Transcription
  misc_feature: MA Experiment 20001560 PARAMETER Experiment Name: At_Drought_Soil_Dry_P Parameter: Age (day) Value: 28
  misc_feature: MA Experiment 20001560 PARAMETER Experiment Name: At_Drought_Soil_Dry_P Parameter: Organism Value: A. thaliana
  misc_feature: MA Experiment 20001560 PARAMETER Experiment Name: At_Drought_Soil_Dry_P Parameter: Plant Line Value: WS
  misc_feature: MA Experiment 20001560 PARAMETER Experiment Name: At_Drought_Soil_Dry_P Parameter: Post Timepoint (hr) Value: None
  misc_feature: MA Experiment 20001560 PARAMETER Experiment Name: At_Drought_Soil_Dry_P Parameter: Post-Treatment Value: None
  misc_feature: MA Experiment 20001560 PARAMETER Experiment Name: At_Drought_Soil_Dry_P Parameter: Timepoint (day) Value: 14
  misc_feature: MA Experiment 20001560 PARAMETER Experiment Name: At_Drought_Soil_Dry_P Parameter: Treatment Value: Drought vs. No Drought
  misc_feature: MA Experiment ID: 20001905 Result: Up-regulated in Transcription
  misc_feature: MA Experiment 20001905 PARAMETER Experiment Name: At_Drought_Reproduction_P Parameter: Age (day) Value: 40
  misc_feature: MA Experiment 20001905 PARAMETER Experiment Name: At_Drought_Reproduction_P Parameter: Organism Value: A. thaliana
  misc_feature: MA Experiment 20001905 PARAMETER Experiment Name: At_Drought_Reproduction_P Parameter: Plant Line Value: WS
  misc_feature: MA Experiment 20001905 PARAMETER Experiment Name: At_Drought_Reproduction_P Parameter: Timepoint (day) Value: 10
  misc_feature: MA Experiment 20001905 PARAMETER Experiment Name: At_Drought_Reproduction_P Parameter: Tissue Value: Rosettes
  misc_feature: MA Experiment 20001905 PARAMETER Experiment Name: At_Drought_Reproduction_P Parameter: Treatment Value: Drought vs. No Drought
ttgatgggtcgtggctcagtggcgtcgcttgctcctgggttccgttttcacccgacggatgaggaacttgttcgctactaccttaagcgtaaggtctgcaacaaaccctttaagttcgatgctatttccgtcaccgacatatacaagtctgagccttgggatctaccagataagtcgaagttgaaaagtagagacttggaatggtacttctttagtatgctggataagaagtacagtaatggttccaagacgaatcgtgctacggagaaagggtattggaagacgactgggaaagatcgggagattcgtaatggttcaagaatccttgggatgaagaagacacttgtttatcacaagggtcgagctccccgtggtgaaaagaccaattgggttatgcaggagtatcggctttctgatgaggacttgaagaaagctggtgtgccacaagaagcatatgtgttatgtaggatattccagaaaagtggtacggttcctaagaatggggagcagtatggtgctccttatcttgaggaggagtgggaagaagatggaatgacttatgtacctgctcaagatgctttcagtgaaggattggctttgaatgatgatgtttatgtcgatattgatgacattgacgagaagcccgaaaatctggtggtctatgatgccgttcctattctacctaactattgtcatggggaatcaagtaacaatgttgaatcaggcaattactcagactctggaaattacattcaaccaggaaacaatgttgtcgactctggtgggtactttgaacaaccaattgaaacttttgaggaagatcggaagcctattatacgggagggtagcattcagccttgttctctgtttccagaggaacaaattggctgtggtgtgcaagacgaaaatgtggtgaatctggaatcttccaacaataatgtgtttgtagctgatacatgctacagtgacattcctattgatcataactatttacccgatgagccattcatggatcctaataacaatcttccactcaacgatggtctgtacctggaaacgaatgatctcagctgtgctcaacaagatgattttaacttcgaagattatctcagcttctttgatgatgaaggtttgacttttgacgagtctctattaatgggacctgaagattttcttcccaacccagaaacccttgaacagaaacctgcccctaaagaaatggaaaaagaaagaggtcgcaggaggcaaagaagcagtggaggaaaaggaaagtggcgaaagatcttcttccaaaacaagtacacagatttcaaggactttgattcagctccgaagtacccatttctcaaaaagacgagccacatgcttggagccattcctactccatcttcatttgcttcacagttccaaacaaaggacgcaatgcgtctacacgcagcacaatcttctggttcagttcacgtgactgcaggtatgatgagaatatcaaacatgactctagcagcggacagcggtatgggctggtcatatgacaagaacggtaacctcaacgtagtcctttcattcggggtagtccaacaggatgatgcgatgactgcctcgggaagcaagacaggaattacggcgacaagagcaatgttagtcttcatgtgtttatgggttctcctactctctgttagcttcaaaatagtaaccatggtgtctgctcggtaataggatcaaagttgaatcgtctcaaagactttttttggtgtttgtacctctccaatcatatagcctttaactttggcagtgctttgctgctcaatatttaaatttttattcgaagggtttggtgtagcttgaattctctatatggtttctagtttgagtttctagaaataagaacataaacaactttcttatgacgtcgacgcggccgc

SEQ ID NO: 97536 - protein, 570 aa, Arabidopsis thaliana
  peptide (1)..(570): Ceres Seq. ID no. 12738435
  misc_feature (10)..(138): Pfam Name: No apical meristem (NAM) protein Pfam Description: No apical meristem (NAM) protein
  misc_feature (2)..(570): Homolog of NCBI NO: 6456751 NR Description: NAC2 [Arabidopsis thaliana]
  misc_feature (2)..(570): Homolog of NCBI NO: 15237699 NR Description: putative protein; protein id: At5g04410.1, by cDNA: gi_20466285, supported by cDNA: gi_6456750 [Arabidopsis
  misc_feature (2)..(570): Homolog of NCBI NO: 8567779 NR Description: NAC, putative [Arabidopsis thaliana]
  misc_feature (2)..(563): Homolog of NCBI NO: 18398895 NR Description: expressed protein; protein id: At3g10500.1 thaliana] >gi|15293139|gb|AAK93680.1| unknown protein thaliana] >gi|19310691|gb|AAL85076.1| unknown protein
  misc_feature (2)..(563): Homolog of NCBI NO: 21593389 NR Description: NAC, putative [Arabidopsis thaliana]
  misc_feature (179)..(538): Homolog of NCBI NO: 28188625 NR Description: unknown protein [Arabidopsis thaliana]
  misc_feature (179)..(538): Homolog of NCBI NO: 28188627 NR Description: unknown protein [Arabidopsis thaliana] unknown protein [Arabidopsis thaliana] unknown protein [Arabidopsis thaliana]
  misc_feature (179)..(538): Homolog of NCBI NO: 28188643 NR Description: unknown protein [Arabidopsis lyrata] unknown protein [Arabidopsis lyrata] >gi|28188647|gb|AAN46249.1|
  misc_feature (179)..(538): Homolog of NCBI NO: 28188649 NR Description: unknown protein [Arabidopsis lyrata]
  misc_feature (179)..(538): Homolog of NCBI NO: 28188651 NR Description: unknown protein [Arabidopsis lyrata]
LMGRGSVASLAPGFRFHPTDEELVRYYLKRKVCNKPFKFDAISVTDIYKSEPWDLPDKSKLKSRDLEWYFFSMLDKKYSNGSKTNRATEKGYWKTTGKDREIRNGSRILGMKKTLVYHKGRAPRGEKTNWVMQEYRLSDEDLKKAGVPQEAYVLCRIFQKSGTVPKNGEQYGAPYLEEEWEEDGMTYVPAQDAFSEGLALNDDVYVDIDDIDEKPENLVVYDAVPILPNYCHGESSNNVESGNYSDSGNYIQPGNNVVDSGGYFEQPIETFEEDRKPIIREGSIQPCSLFPEEQIGCGVQDENVVNLESSNNNVFVADTCYSDIPIDHNYLPDEPFMDPNNNLPLNDGLYLETNDLSCAQQDDFNFEDYLSFFDDEGLTFDESLLMGPEDFLPNPETLEQKPAPKEMEKERGRRRQRSSGGKGKWRKIFFQNKYTDFKDFDSAPKYPFLKKTSHMLGAIPTPSSFASQFQTKDAMRLHAAQSSGSVHVTAGMMRISNMTLAADSGMGWSYDKNGNLNVVLSFGVVQQDDAMTASGSKTGITATRAMLVFMCLWVLLLSVSFKIVTMVSAR

SEQ ID NO: 97537 - protein, 569 aa, Arabidopsis thaliana
  peptide (1)..(569): Ceres Seq. ID no. 12738436
  misc_feature (9)..(137): Pfam Name: No apical meristem (NAM) protein Pfam Description: No apical meristem (NAM) protein
  misc_feature (1)..(569): Homolog of NCBI NO: 6456751 NR Description: NAC2 [Arabidopsis thaliana]
  misc_feature (1)..(569): Homolog of NCBI NO: 15237699 NR Description: putative protein; protein id: At5g04410.1, by cDNA: gi_20466285, supported by cDNA: gi_6456750 [Arabidopsis
  misc_feature (1)..(569): Homolog of NCBI NO: 8567779 NR Description: NAC, putative [Arabidopsis thaliana]
  misc_feature (1)..(562): Homolog of NCBI NO: 18398895 NR Description: expressed protein; protein id: At3g10500.1 thaliana] >gi|15293139|gb|AAK93680.1| unknown protein thaliana] >gi|19310691|gb|AAL85076.1| unknown protein
  misc_feature (1)..(562): Homolog of NCBI NO: 21593389 NR Description: NAC, putative [Arabidopsis thaliana]
  misc_feature (178)..(537): Homolog of NCBI NO: 28188625 NR Description: unknown protein [Arabidopsis thaliana]
  misc_feature (178)..(537): Homolog of NCBI NO: 28188627 NR Description: unknown protein [Arabidopsis thaliana] unknown protein [Arabidopsis thaliana] unknown protein [Arabidopsis thaliana]
  misc_feature (178)..(537): Homolog of NCBI NO: 28188643 NR Description: unknown protein [Arabidopsis lyrata] unknown protein [Arabidopsis lyrata] >gi|28188647|gb|AAN46249.1|
  misc_feature (178)..(537): Homolog of NCBI NO: 28188649 NR Description: unknown protein [Arabidopsis lyrata]
  misc_feature (178)..(537): Homolog of NCBI NO: 28188651 NR Description: unknown protein [Arabidopsis lyrata]
MGRGSVASLAPGFRFHPTDEELVRYYLKRKVCNKPFKFDAISVTDIYKSEPWDLPDKSKLKSRDLEWYFFSMLDKKYSNGSKTNRATEKGYWKTTGKDREIRNGSRILGMKKTLVYHKGRAPRGEKTNWVMQEYRLSDEDLKKAGVPQEAYVLCRIFQKSGTVPKNGEQYGAPYLEEEWEEDGMTYVPAQDAFSEGLALNDDVYVDIDDIDEKPENLVVYDAVPILPNYCHGESSNNVESGNYSDSGNYIQPGNNVVDSGGYFEQPIETFEEDRKPIIREGSIQPCSLFPEEQIGCGVQDENVVNLESSNNNVFVADTCYSDIPIDHNYLPDEPFMDPNNNLPLNDGLYLETNDLSCAQQDDFNFEDYLSFFDDEGLTFDESLLMGPEDFLPNPETLEQKPAPKEMEKERGRRRQRSSGGKGKWRKIFFQNKYTDFKDFDSAPKYPFLKKTSHMLGAIPTPSSFASQFQTKDAMRLHAAQSSGSVHVTAGMMRISNMTLAADSGMGWSYDKNGNLNVVLSFGVVQQDDAMTASGSKTGITATRAMLVFMCLWVLLLSVSFKIVTMVSAR

SEQ ID NO: 97538 - protein, 498 aa, Arabidopsis thaliana
  peptide (1)..(498): Ceres Seq. ID no. 12738437
  misc_feature (1)..(66): Pfam Name: No apical meristem (NAM) protein Pfam Description: No apical meristem (NAM) protein
  misc_feature (1)..(498): Homolog of NCBI NO: 6456751 NR Description: NAC2 [Arabidopsis thaliana]
  misc_feature (1)..(498): Homolog of NCBI NO: 15237699 NR Description: putative protein; protein id: At5g04410.1, by cDNA: gi_20466285, supported by cDNA: gi_6456750 [Arabidopsis
  misc_feature (1)..(498): Homolog of NCBI NO: 8567779 NR Description: NAC, putative [Arabidopsis thaliana]
  misc_feature (1)..(491): Homolog of NCBI NO: 18398895 NR Description: expressed protein; protein id: At3g10500.1 thaliana] >gi|15293139|gb|AAK93680.1| unknown protein thaliana] >gi|19310691|gb|AAL85076.1| unknown protein
  misc_feature (1)..(491): Homolog of NCBI NO: 21593389 NR Description: NAC, putative [Arabidopsis thaliana]
  misc_feature (107)..(466): Homolog of NCBI NO: 28188625 NR Description: unknown protein [Arabidopsis thaliana]
  misc_feature (107)..(466): Homolog of NCBI NO: 28188627 NR Description: unknown protein [Arabidopsis thaliana] unknown protein [Arabidopsis thaliana] unknown protein [Arabidopsis thaliana]
  misc_feature (107)..(466): Homolog of NCBI NO: 28188643 NR Description: unknown protein [Arabidopsis lyrata] unknown protein [Arabidopsis lyrata] >gi|28188647|gb|AAN46249.1|
  misc_feature (107)..(466): Homolog of NCBI NO: 28188649 NR Description: unknown protein [Arabidopsis lyrata]
  misc_feature (107)..(466): Homolog of NCBI NO: 28188651 NR Description: unknown protein [Arabidopsis lyrata]
MLDKKYSNGSKTNRATEKGYWKTTGKDREIRNGSRILGMKKTLVYHKGRAPRGEKTNWVMQEYRLSDEDLKKAGVPQEAYVLCRIFQKSGTVPKNGEQYGAPYLEEEWEEDGMTYVPAQDAFSEGLALNDDVYVDIDDIDEKPENLVVYDAVPILPNYCHGESSNNVESGNYSDSGNYIQPGNNVVDSGGYFEQPIETFEEDRKPIIREGSIQPCSLFPEEQIGCGVQDENVVNLESSNNNVFVADTCYSDIPIDHNYLPDEPFMDPNNNLPLNDGLYLETNDLSCAQQDDFNFEDYLSFFDDEGLTFDESLLMGPEDFLPNPETLEQKPAPKEMEKERGRRRQRSSGGKGKWRKIFFQNKYTDFKDFDSAPKYPFLKKTSHMLGAIPTPSSFASQFQTKDAMRLHAAQSSGSVHVTAGMMRISNMTLAADSGMGWSYDKNGNLNVVLSFGVVQQDDAMTASGSKTGITATRAMLVFMCLWVLLLSVSFKIVTMVSAR

SEQ ID NO: 97539 - DNA, 1593 bp, Arabidopsis thaliana
  misc_feature (1)..(1593): Ceres Seq. ID no. 12738509
  misc_feature: MA Experiment ID: 20000179 Result: Up-regulated in Transcription
  misc_feature: MA Experiment 20000179 PARAMETER Experiment Name: At_Germinating_Seeds_P Parameter: Age (hr) Value: 6 vs. 0
  misc_feature: MA Experiment 20000179 PARAMETER Experiment Name: At_Germinating_Seeds_P Parameter: Tissue Value: Germinating Seeds
  misc_feature: MA Experiment ID: 20000185 Result: Down-regulated in Transcription
  misc_feature: MA Experiment 20000185 PARAMETER Experiment Name: At_Roots__P Parameter: Age (day) Value: 7 vs. 21
  misc_feature: MA Experiment 20000185 PARAMETER Experiment Name: At_Roots__P Parameter: Organism Value: A. thaliana
  misc_feature: MA Experiment 20000185 PARAMETER Experiment Name: At_Roots__P Parameter: Tissue Value: Roots vs. Whole Plant
  misc_feature: MA Experiment ID: 20000439 Result: Down-regulated in Transcription
  misc_feature: MA Experiment 20000439 PARAMETER Experiment Name: At_Roots__P Parameter: Age (day) Value: 14 vs. 21
  misc_feature: MA Experiment 20000439 PARAMETER Experiment Name: At_Roots__P Parameter: Organism Value: A. thaliana
  misc_feature: MA Experiment 20000439 PARAMETER Experiment Name: At_Roots__P Parameter: Tissue Value: Roots vs. Whole Plant
  misc_feature: MA Experiment ID: 20001247 Result: Up-regulated in Transcription
  misc_feature: MA Experiment 20001247 PARAMETER Experiment Name: At_Far-red-induction_P Parameter: Age (day) Value: 7
  misc_feature: MA Experiment 20001247 PARAMETER Experiment Name: At_Far-red-induction_P Parameter: Light Value: Far-red vs. White
  misc_feature: MA Experiment 20001247 PARAMETER Experiment Name: At_Far-red-induction_P Parameter: Organism Value: A. thaliana
  misc_feature: MA Experiment 20001247 PARAMETER Experiment Name: At_Far-red-induction_P Parameter: Plant Line Value: Columbia
  misc_feature: MA Experiment 20001247 PARAMETER Experiment Name: At_Far-red-induction_P Parameter: Timepoint (hr) Value: 1
  misc_feature: MA Experiment 20001247 PARAMETER Experiment Name: At_Far-red-induction_P Parameter: Tissue Value: Whole Plant
  misc_feature: MA Experiment ID: 20001905 Result: Down-regulated in Transcription
  misc_feature: MA Experiment 20001905 PARAMETER Experiment Name: At_Drought_Reproduction_P Parameter: Age (day) Value: 40
  misc_feature: MA Experiment 20001905 PARAMETER Experiment Name: At_Drought_Reproduction_P Parameter: Organism Value: A. thaliana
  misc_feature: MA Experiment 20001905 PARAMETER Experiment Name: At_Drought_Reproduction_P Parameter: Plant Line Value: WS
  misc_feature: MA Experiment 20001905 PARAMETER Experiment Name: At_Drought_Reproduction_P Parameter: Timepoint (day) Value: 10
  misc_feature: MA Experiment 20001905 PARAMETER Experiment Name: At_Drought_Reproduction_P Parameter: Tissue Value: Rosettes
  misc_feature: MA Experiment 20001905 PARAMETER Experiment Name: At_Drought_Reproduction_P Parameter: Treatment Value: Drought vs. No Drought
  misc_feature: Pfam Name: DUF296 Pfam Description: Domain of unknown function (DUF296)
attcacacttcatttctttgcttttggtgagagaatgaaacagagaagaagagatgaagaaaattaaagttctttccttttctcttttggatctaatttcatcttgagattttctcatagcttgatactaaagctacataaaaaacaattaggtgaaatgaaagtttgtgtgttttgataagttttcagagattttcggttgcatgttgttatcttgctcttgaagtctatcgaacccttttagattctgattttgttctcttcttatccctcctcctataagttagccatttagggtccccatcgaattttactaagttaaagtcagagtctttttggttaagctatggatcgaagagacgcaatggcgttatccgggtcgggttcttactatatccaaagaggaatccccggttctggtcctcctcctcctcaaactcaaccaacgtttcacggatcacaaggatttcatcatttcaccaattccatctctccttttgggtcaaacccaaacccaaatccaaaccctggaggtgtctctactggattcgtgtctcctcctttacccgttgactcttctccggctgattcgtcagcggcggcggcgggagctttggttgctcctccttcaggtgacacgtctgtgaagcggaagagaggacggcctagaaaatatggacaagatggtggttctgtttcgttggcattgtctccttctatctccaacgtttccccgaactctaacaaacgtggccgtggaagacctcctggctccggcaagaagcaacggctatcttccattggtgaaatgatgccttcatcaactgggatgagcttcacaccgcatgtaatcgtagtttccattggtgaagacattgcttcaaaggttatatcgttctcgcatcaaggtccacgagcgatatgtgtcttatccgcaagtggtgctgtctctactgcaactcttcttcagccagcaccttctcatggaactattatatacgagggtctattcgagctcatatctctctcaacttcttatctgaacacaactgacaatgactacccaaaccgcactggaagtctagcggtctcacttgctagccccgatggtcgtgtcattggtggtggaattggaggtcctctaatagcagcaagccaagtccaggtcattgttggcagcttcatttgggcaattccgaaagggaagattaaaaaacgtgaagaaacttctgaagatgtccaagatactgatgctttggaaaacaacaacgataacacagcagcaacgtcacctcctgttcctcagcaaagtcagaacattgttcagactcctgtaggcatttggtcaactggttcaaggtcaatggatatgcatcacccccatatggacattgatctaatgcgtggatgattcatgtatatataagcattgaatctaggagaagaagaagaaacttgagctaacctccctgaaacaaagtagtctattggtattgtttaggaaagaaaaagacaattagtaagtttaggaatttctgcgtgttttcgagcaaaaaaaaagttaatttggtctcataacatgttaagaaaggg

SEQ ID NO: 97540 - protein, 354 aa, Arabidopsis thaliana; identical to SEQ ID NO: 47286
  peptide (1)..(354): Ceres Seq. ID no. 12738510
  misc_feature: Pfam Name: DUF296 Pfam Description: Domain of unknown function (DUF296)
  misc_feature (1)..(354): Homolog of NCBI NO: 30695388 NR Description: DNA-binding protein -related [Arabidopsis
  misc_feature (7)..(354): Homolog of NCBI NO: 11281387 NR Description: probable DNA-binding protein - Arabidopsis
  misc_feature (1)..(354): Homolog of NCBI NO: 15225902 NR Description: putative AT-hook DNA-binding protein; protein id: supported by cDNA: gi_14194130, supported by cDNA: gi_16323337, by cDNA: gi_17065245 [Arabidopsis thaliana]
  misc_feature (1)..(354): Homolog of NCBI NO: 7488825 NR Description: probable DNA-binding protein - garden pea
  misc_feature (1)..(342): Homolog of NCBI NO: 2213534 NR Description: DNA-binding PD1-like protein [Pisum sativum]
  misc_feature (1)..(354): Homolog of NCBI NO: 30696854 NR Description: DNA-binding protein -related [Arabidopsis
  misc_feature (1)..(354): Homolog of NCBI NO: 22330402 NR Description: DNA-binding protein, putative; protein id: supported by cDNA: gi_17979308, supported by cDNA: gi_20466008
  misc_feature (7)..(354): Homolog of NCBI NO: 17979309 NR Description: putative DNA-binding protein [Arabidopsis
  misc_feature (15)..(354): Homolog of NCBI NO: 6633838 NR Description: F2K11.15 [Arabidopsis thaliana]
  misc_feature (1)..(316): Homolog of NCBI NO: 6633838 NR Description: F2K11.15 [Arabidopsis thaliana]

SEQ ID NO: 97541 - protein, 348 aa, Arabidopsis thaliana; identical to SEQ ID NO: 47287
  peptide (1)..(348): Ceres Seq. ID no. 12738511
  misc_feature: Pfam Name: DUF296 Pfam Description: Domain of unknown function (DUF296)
  misc_feature (1)..(348): Homolog of NCBI NO: 30695388 NR Description: DNA-binding protein -related [Arabidopsis
  misc_feature (1)..(348): Homolog of NCBI NO: 11281387 NR Description: probable DNA-binding protein - Arabidopsis
  misc_feature (1)..(348): Homolog of NCBI NO: 15225902 NR Description: putative AT-hook DNA-binding protein; protein id: supported by cDNA: gi_14194130, supported by cDNA: gi_16323337, by cDNA: gi_17065245 [Arabidopsis thaliana]
  misc_feature (1)..(348): Homolog of NCBI NO: 7488825 NR Description: probable DNA-binding protein - garden pea
  misc_feature (1)..(336): Homolog of NCBI NO: 2213534 NR Description: DNA-binding PD1-like protein [Pisum sativum]
  misc_feature (1)..(348): Homolog of NCBI NO: 30696854 NR Description: DNA-binding protein -related [Arabidopsis
  misc_feature (1)..(348): Homolog of NCBI NO: 22330402 NR Description: DNA-binding protein, putative; protein id: supported by cDNA: gi_17979308, supported by cDNA: gi_20466008
  misc_feature (1)..(348): Homolog of NCBI NO: 17979309 NR Description: putative DNA-binding protein [Arabidopsis
  misc_feature (9)..(348): Homolog of NCBI NO: 6633838 NR Description: F2K11.15 [Arabidopsis thaliana]
  misc_feature (1)..(310): Homolog of NCBI NO: 6633838 NR Description: F2K11.15 [Arabidopsis thaliana]

SEQ ID NO: 97542 - protein, 200 aa, Arabidopsis thaliana; identical to SEQ ID NO: 47288
  peptide (1)..(200): Ceres Seq. ID no. 12738512
  misc_feature: Pfam Name: DUF296 Pfam Description: Domain of unknown function (DUF296)
  misc_feature (1)..(200): Homolog of NCBI NO: 30695388 NR Description: DNA-binding protein -related [Arabidopsis
  misc_feature (1)..(200): Homolog of NCBI NO: 11281387 NR Description: probable DNA-binding protein - Arabidopsis
  misc_feature (1)..(200): Homolog of NCBI NO: 15225902 NR Description: putative AT-hook DNA-binding protein; protein id: supported by cDNA: gi_14194130, supported by cDNA: gi_16323337, by cDNA: gi_17065245 [Arabidopsis thaliana]
  misc_feature (1)..(200): Homolog of NCBI NO: 7488825 NR Description: probable DNA-binding protein - garden pea
  misc_feature (1)..(188): Homolog of NCBI NO: 2213534 NR Description: DNA-binding PD1-like protein [Pisum sativum]
  misc_feature (1)..(200): Homolog of NCBI NO: 30696854 NR Description: DNA-binding protein -related [Arabidopsis
  misc_feature (1)..(200): Homolog of NCBI NO: 22330402 NR Description: DNA-binding protein, putative; protein id: supported by cDNA: gi_17979308, supported by cDNA: gi_20466008
  misc_feature (1)..(200): Homolog of NCBI NO: 17979309 NR Description: putative DNA-binding protein [Arabidopsis
  misc_feature (1)..(200): Homolog of NCBI NO: 6633838 NR Description: F2K11.15 [Arabidopsis thaliana]
  misc_feature (1)..(162): Homolog of NCBI NO: 6633838 NR Description: F2K11.15 [Arabidopsis thaliana]

SEQ ID NO: 97543 - DNA, 2931 bp, Arabidopsis thaliana
  misc_feature (1)..(2931): Ceres Seq. ID no. 12738620
  misc_feature: MA Experiment ID: 20000180 Result: Up-regulated in Transcription
  misc_feature: MA Experiment 20000180 PARAMETER Experiment Name: At_Germinating_Seeds_P Parameter: Age (hr) Value: 24 vs. 0
  misc_feature: MA Experiment 20000180 PARAMETER Experiment Name: At_Germinating_Seeds_P Parameter: Tissue Value: Germinating Seeds
  misc_feature: MA Experiment ID: 20000452 Result: Up-regulated in Transcription
  misc_feature: MA Experiment 20000452 PARAMETER Experiment Name: At_CS6879_Shoots-Roots_P Parameter: Age (day) Value: 14
  misc_feature: MA Experiment 20000452 PARAMETER Experiment Name: At_CS6879_Shoots-Roots_P Parameter: Organism Value: A. thaliana
  misc_feature: MA Experiment 20000452 PARAMETER Experiment Name: At_CS6879_Shoots-Roots_P Parameter: Plant Line Value: CS6879 vs. WS
  misc_feature: MA Experiment 20000452 PARAMETER Experiment Name: At_CS6879_Shoots-Roots_P Parameter: Tissue Value: Shoots
cactttgaaccattggttggttttgatcaaaaccaaaggatgtgtgtatgtatgtatatattctaacgctcaaaactgatcactagcattcctagatttttccttcttgtgatcacttgcagctatggccacacatgcagctctcgccgtctcaagaatcccggtcacacagcgactgcagtctaagagtgccattcactctttccctgctcaatgctcctccaagaggctagaagtcgctgaattctccggtctgcgtatgagtagtatcggtggggaagcatctttcttcgatgctgtagctgcacaaatcatccctaaggctgtgacaacatcaactcctgttagaggagagacagtggcgaaactgaaagttgcgattaacggttttggaaggattggtaggaactttcttaggtgttggcatggtcgtaaagactctcctctcgaagttgttgtacttaacgacagtggtggtgtcaagaatgcatcccacttgcttaagtatgactccatgcttggaaccttcaaggctgaagtgaaaattgtggacaatgaaactattagtgttgatggtaagctcatcaaagttgtctccaacagagaccctcttaagcttccatgggctgagctcggcattgacattgttatcgagggaacaggagtgtttgttgatgggccaggagcagggaagcatatccaagccggagcctcgaaagttatcatcactgcaccagccaaaggtgctgatatccctacctatgttatgggagtcaatgagcaagactatggtcacgatgtcgctaacattattagcaatgcatcttgcaccaccaactgtttggcaccttttgctaaagtcttggatgaagaatttggaattgtcaaggggacaatgacaaccacacactcctacaccggagaccaaaggcttctagatgcatcacacagggacctaaggcgtgcaagagccgcagcactgaacatagtgcctaccagcacaggagcagccaaggcggtgtcattagtgttgccgcagctgaagggtaaacttaacggcattgcactccgtgtgccaacaccaaacgtctcagtggttgaccttgttataaacgttgagaagaaaggtttgacagcagaggatgtgaacgaggcctttagaaaagccgctaatggaccgatgaaaggcattttagacgtttgcgatgcgcctcttgtctctgttgacttcaggtgctctgatgtctctaccaccattgactcgtccctcactatggttatgggtgatgatatggtcaaggtggttgcttggtatgataacgagtggggttacagccaaagagtggtggatttggctcacctagtggctagcaagtggccgggagcggaagctgttggaagtggagatcctttggaggatttctgcaagacaaacccggctgatgaggaatgcaaagtctatgactgaacaactttgatcatttctttctttatttttcaccaaaacaatactttgtatcatgagttacttattcgaaatcgtactatgaaaaaaaaaaaaaaaagagctcttggatccaagctttagctgaaggtagaccatggaatgatccgccagttgttaaggaagcgaataagaagcctccgttggctcagggcggttacggaaacaacaataacaataacaatggaggatgggatagttgggataacgatgattcttacaaatctgatatgagaaggaatcagtcagcgaatgatttcagggcatcgggaaatagagaaggtgcacatgtgaagtcaaagtcgtcggaggatatctacacgcgatcgcagcttgaggcttctgccgctgggaaagagagtttcttcgcgaggagaatggcggagaatgagtctaagcctgaaggtcttcctccttcgcaaggtggcaagtatgtaggattcggatcaagctcggctccaccaccgagaaataatcaacaggatgatgttttctccgttgtttctcagggttttggaagactgtctctggttgctgcatctgcagctcagtcagctgctagtgttgttcaaacaggaaccaaggagttcacatccaaggtgaaggaaggtgggtatgatcacaaggtgagtgaaactgtaaatgtagttgctaataagacaacagagataggacataggacatggggaatcatgaaaggagtaatggcaatggcgacacagaaggtagaagagtttactaaagaaggatcaacaagctggaatcagcagagtgaaaatgagggcaatggttactaccagaactttggaaatgggaacaaagcagcgaattcatctgttggaggaggaaggccacaatcatcatcgacaagtggtcattacaacaactcgcagaattcaaattcttgggatagttggggagagaatgagaataagaagacagaagcagtagctccaaaggggtcatctgcttctaatgatgatgatggttggactggttgggatgatcatgatgccaaagatgatgggttcgatggtcattaccaaagtgcaggcgataagaaatctgctggtcacaacgggaaatcagacaccgcttggactggtggaggttttctctaaggaatgccggtgagaagtgtataattaattaaggctgggaccatcgtggtctgaatagaagataagaatggtcttcatcttaaaaccatgttcatccatacccacaggtctgcgtttttcttcataagttggcggtttcttgatatctcttcttcatgtgttaaggagtaacgtatttgtacaagatccatagccgattgtttgctaaagattttcggttttagtctttcacaatttaaatttatcttcaactgtaaccacaactgaacattctttttctcaaaattgccttgttccgttgttcgt

SEQ ID NO: 97544 - protein, 447 aa, Arabidopsis thaliana; identical to SEQ ID NO: 49987
  peptide (1)..(447): Ceres Seq. ID no. 12738621
  misc_feature (236)..(397): Pfam Name: Glyceraldehyde 3-phosphate dehydrogenase, Pfam Description: Glyceraldehyde 3-phosphate dehydrogenase,
  misc_feature (1)..(447): Homolog of NCBI NO: 15217555 NR Description: glyceraldehyde-3-phosphate dehydrogenase; protein At1g42970.1, supported by cDNA: gi_14517407, supported by cDNA: supported by cDNA: gi_19310804, supported by cDNA: gi_20465255
  misc_feature (46)..(447): Homolog of NCBI NO: 81621 NR Description: glyceraldehyde-3-phosphate dehydrogenase (NADP)
  misc_feature (1)..(447): Homolog of NCBI NO: 120663 NR Description: Glyceraldehyde 3-phosphate dehydrogenase B,
  misc_feature (5)..(447): Homolog of NCBI NO: 20733 NR Description: precursor C-terminal fragment (AA -80 to 367)
  misc_feature (1)..(447): Homolog of NCBI NO: 66028 NR Description: glyceraldehyde-3-phosphate dehydrogenase (NADP)
  misc_feature (1)..(447): Homolog of NCBI NO: 120664 NR Description: Glyceraldehyde 3-phosphate dehydrogenase B,
  misc_feature (1)..(447): Homolog of NCBI NO: 6063542 NR Description: EST C74302(E30840) corresponds to a region of the
  misc_feature (31)..(421): Homolog of NCBI NO: 120665 NR Description: Glyceraldehyde 3-phosphate dehydrogenase B,
  misc_feature (1)..(431): Homolog of NCBI NO: 18076102 NR Description: glyceraldehyde-3-phosphate dehydrogenase
  misc_feature (1)..(418): Homolog of NCBI NO: 629429 NR Description: glyceraldehyde-3-phosphate dehydrogenase (NADP)

SEQ ID NO: 97545 - protein, 402 aa, Arabidopsis thaliana; identical to SEQ ID NO: 49988
  peptide (1)..(402): Ceres Seq. ID no. 12738622
  misc_feature (191)..(352): Pfam Name: Glyceraldehyde 3-phosphate dehydrogenase, Pfam Description: Glyceraldehyde 3-phosphate dehydrogenase,
  misc_feature (1)..(402): Homolog of NCBI NO: 15217555 NR Description: glyceraldehyde-3-phosphate dehydrogenase; protein At1g42970.1, supported by cDNA: gi_14517407, supported by cDNA: supported by cDNA: gi_19310804, supported by cDNA: gi_20465255
  misc_feature (1)..(402): Homolog of NCBI NO: 81621 NR Description: glyceraldehyde-3-phosphate dehydrogenase (NADP)
  misc_feature (1)..(402): Homolog of NCBI NO: 120663 NR Description: Glyceraldehyde 3-phosphate dehydrogenase B,
  misc_feature (1)..(402): Homolog of NCBI NO: 20733 NR Description: precursor C-terminal fragment (AA -80 to 367)
  misc_feature (1)..(402): Homolog of NCBI NO: 66028 NR Description: glyceraldehyde-3-phosphate dehydrogenase (NADP)
  misc_feature (1)..(402): Homolog of NCBI NO: 120664 NR Description: Glyceraldehyde 3-phosphate dehydrogenase B,
  misc_feature (1)..(402): Homolog of NCBI NO: 6063542 NR Description: EST C74302(E30840) corresponds to a region of the
  misc_feature (1)..(376): Homolog of NCBI NO: 120665 NR Description: Glyceraldehyde 3-phosphate dehydrogenase B,
  misc_feature (1)..(386): Homolog of NCBI NO: 18076102 NR Description: glyceraldehyde-3-phosphate dehydrogenase
  misc_feature (1)..(373): Homolog of NCBI NO: 629429 NR Description: glyceraldehyde-3-phosphate dehydrogenase (NADP)

SEQ ID NO: 97546 - protein, 317 aa, Arabidopsis thaliana; identical to SEQ ID NO: 49989
  peptide (1)..(317): Ceres Seq. ID no. 12738623
  misc_feature (106)..(267): Pfam Name: Glyceraldehyde 3-phosphate dehydrogenase, Pfam Description: Glyceraldehyde 3-phosphate dehydrogenase,
  misc_feature (1)..(317): Homolog of NCBI NO: 15217555 NR Description: glyceraldehyde-3-phosphate dehydrogenase; protein At1g42970.1, supported by cDNA: gi_14517407, supported by cDNA: supported by cDNA: gi_19310804, supported by cDNA: gi_20465255
  misc_feature (1)..(317): Homolog of NCBI NO: 81621 NR Description: glyceraldehyde-3-phosphate dehydrogenase (NADP)
  misc_feature (1)..(317): Homolog of NCBI NO: 120663 NR Description: Glyceraldehyde 3-phosphate dehydrogenase B,
  misc_feature (1)..(317): Homolog of NCBI NO: 20733 NR Description: precursor C-terminal fragment (AA -80 to 367)
  misc_feature (1)..(317): Homolog of NCBI NO: 66028 NR Description: glyceraldehyde-3-phosphate dehydrogenase (NADP)
  misc_feature (1)..(317): Homolog of NCBI NO: 120664 NR Description: Glyceraldehyde 3-phosphate dehydrogenase B,
  misc_feature (1)..(317): Homolog of NCBI NO: 6063542 NR Description: EST C74302(E30840) corresponds to a region of the
  misc_feature (1)..(291): Homolog of NCBI NO: 120665 NR Description: Glyceraldehyde 3-phosphate dehydrogenase B,
  misc_feature (1)..(301): Homolog of NCBI NO: 18076102 NR Description: glyceraldehyde-3-phosphate dehydrogenase
  misc_feature (1)..(288): Homolog of NCBI NO: 629429 NR Description: glyceraldehyde-3-phosphate dehydrogenase (NADP)

SEQ ID NO: 97547 - DNA, 1529 bp, Arabidopsis thaliana
  misc_feature (1)..(1529): Ceres Seq. ID no. 12738724
  misc_feature: MA Experiment ID: 108434 Result: Up-regulated in Transcription
  misc_feature: MA Experiment 108434 PARAMETER Experiment Name: At_Root_Tips_cDNA_P Parameter: Tissue Value: Root Tips
  misc_feature: MA Experiment ID: 108462 Result: Down-regulated in Transcription
  misc_feature: MA Experiment 108462 PARAMETER Experiment Name: At_Germinating_Seeds_cDNA_P Parameter: Age (day) Value: 2 vs. 0
  misc_feature: MA Experiment 108462 PARAMETER Experiment Name: At_Germinating_Seeds_cDNA_P Parameter: Tissue Value: Germinating Seeds
  misc_feature: MA Experiment ID: 108463 Result: Down-regulated in Transcription
  misc_feature: MA Experiment 108463 PARAMETER Experiment Name: At_Germinating_Seeds_cDNA_P Parameter: Age (day) Value: 3 vs. 0
  misc_feature: MA Experiment 108463 PARAMETER Experiment Name: At_Germinating_Seeds_cDNA_P Parameter: Tissue Value: Germinating Seeds
  misc_feature: MA Experiment ID: 108464 Result: Down-regulated in Transcription
  misc_feature: MA Experiment 108464 PARAMETER Experiment Name: At_Germinating_Seeds_cDNA_P Parameter: Age (day) Value: 4 vs. 0
  misc_feature: MA Experiment 108464 PARAMETER Experiment Name: At_Germinating_Seeds_cDNA_P Parameter: Tissue Value: Germinating Seeds
  misc_feature: MA Experiment ID: 108573 Result: Down-regulated in Transcription
  misc_feature: MA Experiment 108573 PARAMETER Experiment Name: At_Drought_cDNA_P Parameter: Timepoint (hr) Value: 6
  misc_feature: MA Experiment 108573 PARAMETER Experiment Name: At_Drought_cDNA_P Parameter: Tissue Value: Aerial
  misc_feature: MA Experiment 108573 PARAMETER Experiment Name: At_Drought_cDNA_P Parameter: Treatment Value: Drought vs. No Drought
  misc_feature: MA Experiment ID: 108585 Result: Down-regulated in Transcription
  misc_feature: MA Experiment 108585 PARAMETER Experiment Name: At_5mM_NaNP_cDNA_P Parameter: Timepoint (hr) Value: 6
  misc_feature: MA Experiment 108585 PARAMETER Experiment Name: At_5mM_NaNP_cDNA_P Parameter: Tissue Value: Aerial
  misc_feature: MA Experiment 108585 PARAMETER Experiment Name: At_5mM_NaNP_cDNA_P Parameter: Treatment Value: null
  misc_feature: MA Experiment ID: 108595 Result: Down-regulated in Transcription
  misc_feature: MA Experiment 108595 PARAMETER Experiment Name: At_Ler-pi_Ovule_cDNA_P Parameter: Plant Line Value: null
  misc_feature: MA Experiment ID: 108668 Result: Down-regulated in Transcription
  misc_feature: MA Experiment 108668 PARAMETER Experiment Name: At_2mM_SA_cDNA_P Parameter: Plant Line Value: WS
  misc_feature: MA Experiment 108668 PARAMETER Experiment Name: At_2mM_SA_cDNA_P Parameter: Timepoint (hr) Value: 6
  misc_feature: MA Experiment 108668 PARAMETER Experiment Name: At_2mM_SA_cDNA_P Parameter: Treatment Value: 2mM SA vs. No Treatment
  misc_feature: MA Experiment ID: 20000089 Result: Up-regulated in Transcription
  misc_feature: MA Experiment ID: 20000182 Result: Down-regulated in Transcription
  misc_feature: MA Experiment 20000182 PARAMETER Experiment Name: At_2mM_SA_P Parameter: Age (day) Value: 14
  misc_feature: MA Experiment 20000182 PARAMETER Experiment Name: At_2mM_SA_P Parameter: Organism Value: A. thaliana
  misc_feature: MA Experiment 20000182 PARAMETER Experiment Name: At_2mM_SA_P Parameter: Plant Line Value: WS
  misc_feature: MA Experiment 20000182 PARAMETER Experiment Name: At_2mM_SA_P Parameter: Timepoint (hr) Value: 6
  misc_feature: MA Experiment 20000182 PARAMETER Experiment Name: At_2mM_SA_P Parameter: Tissue Value: Aerial
  misc_feature: MA Experiment 20000182 PARAMETER Experiment Name: At_2mM_SA_P Parameter: Treatment Value: 2mM SA vs. No Treatment
  misc_feature: MA Experiment ID: 20000185 Result: Down-regulated in Transcription
  misc_feature: MA Experiment 20000185 PARAMETER Experiment Name: At_Roots__P Parameter: Age (day) Value: 7 vs. 21
  misc_feature: MA Experiment 20000185 PARAMETER Experiment Name: At_Roots__P Parameter: Organism Value: A. thaliana
  misc_feature: MA Experiment 20000185 PARAMETER Experiment Name: At_Roots__P Parameter: Tissue Value: Roots vs. Whole Plant
  misc_feature: MA Experiment ID: 20000224 Result: Up-regulated in Transcription
  misc_feature: MA Experiment ID: 20000436 Result: Down-regulated in Transcription
  misc_feature: MA Experiment 20000436 PARAMETER Experiment Name: At_Drought_P Parameter: Age (day) Value: 7
  misc_feature: MA Experiment 20000436 PARAMETER Experiment Name: At_Drought_P Parameter: Organism Value: A. thaliana
  misc_feature: MA Experiment 20000436 PARAMETER Experiment Name: At_Drought_P Parameter: Plant Line Value: WS
  misc_feature: MA Experiment 20000436 PARAMETER Experiment Name: At_Drought_P Parameter: Timepoint (hr) Value: 12
  misc_feature: MA Experiment 20000436 PARAMETER Experiment Name: At_Drought_P Parameter: Tissue Value: Whole Plant
  misc_feature: MA Experiment 20000436 PARAMETER Experiment Name: At_Drought_P Parameter: Treatment Value: Drought vs. No Drought
  misc_feature: MA Experiment ID: 20000437 Result: Down-regulated in Transcription
  misc_feature: MA Experiment 20000437 PARAMETER Experiment Name: At_Drought_P Parameter: Age (day) Value: 8
  misc_feature: MA Experiment 20000437 PARAMETER Experiment Name: At_Drought_P Parameter: Organism Value: A. thaliana
  misc_feature: MA Experiment 20000437 PARAMETER Experiment Name: At_Drought_P Parameter: Plant Line Value: WS
  misc_feature: MA Experiment 20000437 PARAMETER Experiment Name: At_Drought_P Parameter: Timepoint (hr) Value: 24
  misc_feature: MA Experiment 20000437 PARAMETER Experiment Name: At_Drought_P Parameter: Tissue Value: Whole Plant
  misc_feature: MA Experiment 20000437 PARAMETER Experiment Name: At_Drought_P Parameter: Treatment Value: Drought vs. No Drought
  misc_feature: MA Experiment ID: 20000439 Result: Down-regulated in Transcription
  misc_feature: MA Experiment 20000439 PARAMETER Experiment Name: At_Roots__P Parameter: Age (day) Value: 14 vs. 21
  misc_feature: MA Experiment 20000439 PARAMETER Experiment Name: At_Roots__P Parameter: Organism Value: A. thaliana
  misc_feature: MA Experiment 20000439 PARAMETER Experiment Name: At_Roots__P Parameter: Tissue Value: Roots vs. Whole Plant
  misc_feature: MA Experiment ID: 20000527 Result: Up-regulated in Transcription
  misc_feature: MA Experiment 20000527 PARAMETER Experiment Name: At_10percent_PEG_P Parameter: Age (day) Value: 20
  misc_feature: MA Experiment 20000527 PARAMETER Experiment Name: At_10percent_PEG_P Parameter: Organism Value: A. thaliana
  misc_feature: MA Experiment 20000527 PARAMETER Experiment Name: At_10percent_PEG_P Parameter: Plant Line Value: WS
  misc_feature: MA Experiment 20000527 PARAMETER Experiment Name: At_10percent_PEG_P Parameter: Timepoint (day) Value: 20
  misc_feature: MA Experiment 20000527 PARAMETER Experiment Name: At_10percent_PEG_P Parameter: Tissue Value: Whole Plant
  misc_feature: MA Experiment 20000527 PARAMETER Experiment Name: At_10percent_PEG_P Parameter: Treatment Value: 10percent PEG vs. No Treatment
  misc_feature: MA Experiment ID: 20001247 Result: Down-regulated in Transcription
  misc_feature: MA Experiment 20001247 PARAMETER Experiment Name: At_Far-red-induction_P Parameter: Age (day) Value: 7
  misc_feature: MA Experiment 20001247 PARAMETER Experiment Name: At_Far-red-induction_P Parameter: Light Value: Far-red vs. White
  misc_feature: MA Experiment 20001247 PARAMETER Experiment Name: At_Far-red-induction_P Parameter: Organism Value: A. thaliana
  misc_feature: MA Experiment 20001247 PARAMETER Experiment Name: At_Far-red-induction_P Parameter: Plant Line Value: Columbia
  misc_feature: MA Experiment 20001247 PARAMETER Experiment Name: At_Far-red-induction_P Parameter: Timepoint (hr) Value: 1
  misc_feature: MA Experiment 20001247 PARAMETER Experiment Name: At_Far-red-induction_P Parameter: Tissue Value: Whole Plant
  misc_feature: MA Experiment ID: 20001458 Result: Up-regulated in Transcription
  misc_feature: MA Experiment 20001458 PARAMETER Experiment Name: At_50mM_NH4NO3_L-to-H_P Parameter: Age (day) Value: Undefined
  misc_feature: MA Experiment 20001458 PARAMETER Experiment Name: At_50mM_NH4NO3_L-to-H_P Parameter: Organism Value: Undefined
  misc_feature: MA Experiment 20001458 PARAMETER Experiment Name: At_50mM_NH4NO3_L-to-H_P Parameter: Plant Line Value: Undefined
  misc_feature: MA Experiment 20001458 PARAMETER Experiment Name: At_50mM_NH4NO3_L-to-H_P Parameter: Timepoint (hr) Value: 2
  misc_feature: MA Experiment 20001458 PARAMETER Experiment Name: At_50mM_NH4NO3_L-to-H_P Parameter: Tissue Value: Siliques
  misc_feature: MA Experiment 20001458 PARAMETER Experiment Name: At_50mM_NH4NO3_L-to-H_P Parameter: Treatment Value: 50mM NH4NO3 vs. 100mM Manitol
  misc_feature: MA Experiment ID: 20001556 Result: Up-regulated in Transcription
  misc_feature: MA Experiment 20001556 PARAMETER Experiment Name: At_Drought_Soil_Dry_P Parameter: Age (day) Value: 26
  misc_feature: MA Experiment 20001556 PARAMETER Experiment Name: At_Drought_Soil_Dry_P Parameter: Organism Value: A. thaliana
  misc_feature: MA Experiment 20001556 PARAMETER Experiment Name: At_Drought_Soil_Dry_P Parameter: Plant Line Value: WS
  misc_feature: MA Experiment 20001556 PARAMETER Experiment Name: At_Drought_Soil_Dry_P Parameter: Post Timepoint (hr) Value: None
  misc_feature: MA Experiment 20001556 PARAMETER Experiment Name: At_Drought_Soil_Dry_P Parameter: Post-Treatment Value: None
  misc_feature: MA Experiment 20001556 PARAMETER Experiment Name: At_Drought_Soil_Dry_P Parameter: Timepoint (day) Value: 12
  misc_feature: MA Experiment 20001556 PARAMETER Experiment Name: At_Drought_Soil_Dry_P Parameter: Treatment Value: Drought vs. No Drought
  misc_feature: MA Experiment ID: 20001558 Result: Up-regulated in Transcription
  misc_feature: MA Experiment 20001558 PARAMETER Experiment Name: At_Drought_Soil_Dry_P Parameter: Age (day) Value: 27
  misc_feature: MA Experiment 20001558 PARAMETER Experiment Name: At_Drought_Soil_Dry_P Parameter: Organism Value: A. thaliana
  misc_feature: MA Experiment 20001558 PARAMETER Experiment Name: At_Drought_Soil_Dry_P Parameter: Plant Line Value: WS
  misc_feature: MA Experiment 20001558 PARAMETER Experiment Name: At_Drought_Soil_Dry_P Parameter: Post Timepoint (hr) Value: 6
  misc_feature: MA Experiment 20001558 PARAMETER Experiment Name: At_Drought_Soil_Dry_P Parameter: Post-Treatment Value: Re-Water vs. No Drought
  misc_feature: MA Experiment 20001558 PARAMETER Experiment Name: At_Drought_Soil_Dry_P Parameter: Timepoint (day) Value: 13
  misc_feature: MA Experiment 20001558 PARAMETER Experiment Name: At_Drought_Soil_Dry_P Parameter: Treatment Value: Drought vs. No Drought
  misc_feature: MA Experiment ID: 20001560 Result: Up-regulated in Transcription
  misc_feature: MA Experiment 20001560 PARAMETER Experiment Name: At_Drought_Soil_Dry_P Parameter: Age (day) Value: 28
  misc_feature: MA Experiment 20001560 PARAMETER Experiment Name: At_Drought_Soil_Dry_P Parameter: Organism Value: A. thaliana
  misc_feature: MA Experiment 20001560 PARAMETER Experiment Name: At_Drought_Soil_Dry_P Parameter: Plant Line Value: WS
  misc_feature: MA Experiment 20001560 PARAMETER Experiment Name: At_Drought_Soil_Dry_P Parameter: Post Timepoint (hr) Value: None
  misc_feature: MA Experiment 20001560 PARAMETER Experiment Name: At_Drought_Soil_Dry_P Parameter: Post-Treatment Value: None
  misc_feature: MA Experiment 20001560 PARAMETER Experiment Name: At_Drought_Soil_Dry_P Parameter: Timepoint (day) Value: 14
  misc_feature: MA Experiment 20001560 PARAMETER Experiment Name: At_Drought_Soil_Dry_P Parameter: Treatment Value: Drought vs. No Drought
  misc_feature: MA Experiment ID: 20001757 Result: Up-regulated in Transcription
  misc_feature: MA Experiment 20001757 PARAMETER Experiment Name: At_50mM_NH4NO3_L-to-H_P Parameter: Timepoint (hr) Value: 6
  misc_feature: MA Experiment 20001757 PARAMETER Experiment Name: At_50mM_NH4NO3_L-to-H_P Parameter: Tissue Value: Leaf
  misc_feature: MA Experiment 20001757 PARAMETER Experiment Name: At_50mM_NH4NO3_L-to-H_P Parameter: Treatment Value: 50mM NH4NO3 vs 100mM Mannitol
gaatcggcggccgcggatccaacctcgccggcgacggaaaatggctttcgcgtctccttcgctccgtcttcttcctcagtctccgttaggtcgaataacatctaaactacaccgtttcagtactgcgaaactctcactcttctcctttcaccatgattcttcatcttctttggctgtcagaactccggtatcttccttcgtcgtcggcgctatctccggaaaatcctctaccggaacgaaatcgaaatccaaaaccaaacggaaaccacctcctcctccgccagtcactactgtggctgaagagcaacacattgctgagtcagagacagtcaacattgccgaagatgtcactcaattgattggaagcacaccaatggtctatctcaatagagtcacagatggttgtttggctgacattgctgccaagctcgaatcaatggagccctgtagaagcgtcaaagataggatcggtctgagcatgatcaacgaggcagaaaacagcggagctataactccgaggaagactgtattagtagaaccaacaaccggaaacactggccttgggattgcatttgtggctgcagctaaaggctacaagcttatagtgacaatgccagcttctatcaatattgaaaggaggatgcttttacgtgcactaggagcagagattgtgctaacgaatccagagaagggtctcaaaggagcagtggataaagccaaagagattgttctcaagacaaagaacgcatatatgtttcagcaattcgacaatacagcaaatacaaagatccactttgaaactacaggaccagaaatctgggaagatacaatgggtaatgtcgatatattcgttgccggaataggaactggtggtactgtaactggtactggaggtttcttgaaaatgatgaacaaggatattaaggtagttggcgttgaaccatcagaaagaagtgtgatttctggagacaaccctggttacttaccgggaatcttggatgttaaattacttgatgaagtgtttaaggttagcaacggggaagcgattgagatggcgaggagactagctttagaggaaggattgctggttgggatttcatctggagctgctgcagtagcagcagtcagcttggctaaaagagcagagaatgccggtaaactaatcacggttctgtttccaagccatggcgagcggtatatcacaacggctctgtttagttccatcaacagagaagtccaagagatgagatattagtagcagccattagaaaagcccccaaagtttggtccttttggagagtgtaaacaacaaatctctttgcaatacagaaaagagaggtttcagaagactgtgaggttagagctcacacgagaactgagagataaacatgtctcgagcccaaccagttttattcaaagatttgtgaatgtatagaagatcatagaccttgttgcattattcttcttcttctcactcatatgtcagggaagtatgctgaacaaataaaagtttgatcatctaaaccctg

SEQ ID NO: 97548 - protein, 417 aa, Arabidopsis thaliana
  peptide (1)..(417): Ceres Seq. ID no. 12738725
  misc_feature (116)..(395): Pfam Name: Pyridoxal-phosphate dependent enzyme Pfam Description: Pyridoxal-phosphate dependent enzyme
  misc_feature (14)..(417): Homolog of NCBI NO: 15228596 NR Description: O-acetylserine (thiol) lyase; protein id: supported by cDNA: gi_20466214, supported by cDNA: gi_2281779 thaliana] >gi|11131558|sp|O22682|CYSN_ARATH Probable cysteine
  misc_feature (106)..(416): Homolog of NCBI NO: 12081921 NR Description: plastidic cysteine synthase 2 [Solanum tuberosum]
  misc_feature (106)..(416): Homolog of NCBI NO: 399333 NR Description: Cysteine synthase, chloroplast precursor
  misc_feature (106)..(416): Homolog of NCBI NO: 11131628 NR Description: Cysteine synthase, chloroplast precursor
  misc_feature (106)..(416): Homolog of NCBI NO: 12081919 NR Description: plastidic cysteine synthase 1 [Solanum tuberosum]
  misc_feature (108)..(416): Homolog of NCBI NO: 303902 NR Description: cysteine synthase [Spinacia oleracea]
  misc_feature (108)..(416): Homolog of NCBI NO: 12644209 NR Description: CYSTEINE SYNTHASE, CHLOROPLAST PRECURSOR
  misc_feature (108)..(415): Homolog of NCBI NO: 231970 NR Description: Cysteine synthase (O-acetylserine sulfhydrylase)
  misc_feature (108)..(416): Homolog of NCBI NO: 421795 NR Description: cysteine synthase (EC 4.2.99.8) B precursor, - spinach >gi|312944|emb|CAA47329.1| cysteine synthase [Spinacia
  misc_feature (104)..(415): Homolog of NCBI NO: 11131901 NR Description: Cysteine synthase (O-acetylserine sulfhydrylase)
NRRPRIQPRRRRKMAFASPSLRLLPQSPLGRITSKLHRFSTAKLSLFSFHHDSSSSLAVRTPVSSFVVGAISGKSSTGTKSKSKTKRKPPPPPPVTTVAEEQHIAESETVNIAEDVTQLIGSTPMVYLNRVTDGCLADIAAKLESMEPCRSVKDRIGLSMINEAENSGAITPRKTVLVEPTTGNTGLGIAFVAAAKGYKLIVTMPASINIERRMLLRALGAEIVLTNPEKGLKGAVDKAKEIVLKTKNAYMFQQFDNTANTKIHFETTGPEIWEDTMGNVDIFVAGIGTGGTVTGTGGFLKMMNKDIKVVGVEPSERSVISGDNPGYLPGILDVKLLDEVFKVSNGEAIEMARRLALEEGLLVGISSGAAAVAAVSLAKRAENAGKLITVLFPSHGERYITTALFSSINREVQEMRY

SEQ ID NO: 97549 - protein, 404 aa, Arabidopsis thaliana; identical to SEQ ID NO: 49383
  peptide (1)..(404): Ceres Seq. ID no. 12738726
  misc_feature (103)..(382): Pfam Name: Pyridoxal-phosphate dependent enzyme Pfam Description: Pyridoxal-phosphate dependent enzyme
  misc_feature (1)..(404): Homolog of NCBI NO: 15228596 NR Description: O-acetylserine (thiol) lyase; protein id: supported by cDNA: gi_20466214, supported by cDNA: gi_2281779 thaliana] >gi|11131558|sp|O22682|CYSN_ARATH Probable cysteine
  misc_feature (93)..(403): Homolog of NCBI NO: 12081921 NR Description: plastidic cysteine synthase 2 [Solanum tuberosum]
  misc_feature (93)..(403): Homolog of NCBI NO: 399333 NR Description: Cysteine synthase, chloroplast precursor
  misc_feature (93)..(403): Homolog of NCBI NO: 11131628 NR Description: Cysteine synthase, chloroplast precursor
  misc_feature (93)..(403): Homolog of NCBI NO: 12081919 NR Description: plastidic cysteine synthase 1 [Solanum tuberosum]
  misc_feature (95)..(403): Homolog of NCBI NO: 303902 NR Description: cysteine synthase [Spinacia oleracea]
  misc_feature (95)..(403): Homolog of NCBI NO: 12644209 NR Description: CYSTEINE SYNTHASE, CHLOROPLAST PRECURSOR
  misc_feature (95)..(402): Homolog of NCBI NO: 231970 NR Description: Cysteine synthase (O-acetylserine sulfhydrylase)
  misc_feature (95)..(403): Homolog of NCBI NO: 421795 NR Description: cysteine synthase (EC 4.2.99.8) B precursor, - spinach >gi|312944|emb|CAA47329.1| cysteine synthase [Spinacia
  misc_feature (91)..(402): Homolog of NCBI NO: 11131901 NR Description: Cysteine synthase (O-acetylserine sulfhydrylase)

SEQ ID NO: 97550 - protein, 293 aa, Arabidopsis thaliana; identical to SEQ ID NO: 49384
  peptide (1)..(293): Ceres Seq. ID no. 12738727
  misc_feature (1)..(271): Pfam Name: Pyridoxal-phosphate dependent enzyme Pfam Description: Pyridoxal-phosphate dependent enzyme
  misc_feature (1)..(293): Homolog of NCBI NO: 15228596 NR Description: O-acetylserine (thiol) lyase; protein id: supported by cDNA: gi_20466214, supported by cDNA: gi_2281779 thaliana] >gi|11131558|sp|O22682|CYSN_ARATH Probable cysteine
  misc_feature (1)..(292): Homolog of NCBI NO: 12081921 NR Description: plastidic cysteine synthase 2 [Solanum tuberosum]
  misc_feature (1)..(292): Homolog of NCBI NO: 399333 NR Description: Cysteine synthase, chloroplast precursor
  misc_feature (1)..(292): Homolog of NCBI NO: 11131628 NR Description: Cysteine synthase, chloroplast precursor
  misc_feature (1)..(292): Homolog of NCBI NO: 12081919 NR Description: plastidic cysteine synthase 1 [Solanum tuberosum]
  misc_feature (1)..(292): Homolog of NCBI NO: 303902 NR Description: cysteine synthase [Spinacia oleracea]
  misc_feature (1)..(292): Homolog of NCBI NO: 12644209 NR Description: CYSTEINE SYNTHASE, CHLOROPLAST PRECURSOR
  misc_feature (1)..(291): Homolog of NCBI NO: 231970 NR Description: Cysteine synthase (O-acetylserine sulfhydrylase)
  misc_feature (1)..(292): Homolog of NCBI NO: 421795 NR Description: cysteine synthase (EC 4.2.99.8) B precursor, - spinach >gi|312944|emb|CAA47329.1| cysteine synthase [Spinacia
  misc_feature (1)..(291): Homolog of NCBI NO: 11131901 NR Description: Cysteine synthase (O-acetylserine sulfhydrylase)

SEQ ID NO: 97551 - DNA, 1109 bp, Arabidopsis thaliana
  misc_feature (1)..(1109): Ceres Seq. ID no. 12738760
  misc_feature: MA Experiment ID: 20000184 Result: Down-regulated in Transcription
  misc_feature: MA Experiment 20000184 PARAMETER Experiment Name: At_Shoots__P Parameter: Age (day) Value: 7
  misc_feature: MA Experiment 20000184 PARAMETER Experiment Name: At_Shoots__P Parameter: Tissue Value: Shoots vs. Whole Plant
ggaacacggaaatattggcgcccagataatcttcttctgtgaagcattttaagtcgccgactccaatcaacagagcccagttattccattttatcgaattaattagggttcagagagatgggtaggaaaaagaaatctagggcttcgacaaccgaagaagatgagattgagatggataatgctggcccatcctctgagacaagtctttacgaggttcttggagttgaaagaagagccacttcacaggaaataagaaaagcgtaccataagttggcattgaagcttcaccctgataaaaatcaggatgataaggaagctaaagacaagttccagcagctgcaaaaagttatatcaattcttggtgatgaagagaaaagggcagtctatgatcaaactggctcaattgatgatgctgatattcctggagatgcgtttgagaatttgcgggatttcttccgggacatgtataagaaggtcaccgaagctgatattgaagagtttgaggcaacctacaggggatctgagtcagagaagaaagacttgcttgagcttttcaacaagtttaagggtaaaatgaacaggctattctgctcaatgctttgctcggaccccaagcttgattcacaccgtttcaaagacatgcttgatgaggccattgcagcaggagaagtgaagtcaagcaaggcatatgagaaatgggcaaataaaatttcagaaacgaaaccgcccaccagtccattgaggaagaggaagaagaagaagtcagcacccaaggattcagagacagatctttgcttgatgattgcgaaacgacaagaggagaggaaagggaaggtggactcgatgttttcatcacttatctctaggtatggtggtgatgcggaagcagagcccactgaagaagaatttgaagcttcccagagaaggattgaaacccaaagaaaaccatccaagaagtctagaggaaagtagaggtcttaaagcagagttgtcttctagtagtatttgtgatggaacaagaatgtttattttctttccaaatttcatcaatttccaaaatcagtaaatatttcgattattgctttataaattgaggaattatcttctcc

SEQ ID NO: 97552 - protein, 284 aa, Arabidopsis thaliana
  peptide (1)..(284): Ceres Seq. ID no. 12738761
  misc_feature (29)..(94): Pfam Name: DnaJ domain Pfam Description: DnaJ domain
  misc_feature (1)..(284): Homolog of NCBI NO: 2689720 NR Description: DnaJ homologue [Arabidopsis thaliana]
  misc_feature (1)..(284): Homolog of NCBI NO: 15240212 NR Description: DnaJ homologue (gb|AAB91418.1|); protein id: supported by cDNA: gi_2689719 [Arabidopsis thaliana]
  misc_feature (19)..(284): Homolog of NCBI NO: 15230424 NR Description: DnaJ protein, putative; protein id: At3g12170.1
  misc_feature (19)..(167): Homolog of NCBI NO: 12322012 NR Description: DnaJ protein, putative, 3' partial; 1110-1
  misc_feature (28)..(251): Homolog of NCBI NO: 39794528 NR Description: Unknown (protein for MGC:76175) [Silurana
  misc_feature (30)..(251): Homolog of NCBI NO: 27597059 NR Description: DnaJ homolog, subfamily C, member 9; DnaJ protein
  misc_feature (30)..(251): Homolog of NCBI NO: 34868976 NR Description: similar to J domain of DnaJ-like-protein 1 - rat
  misc_feature (30)..(251): Homolog of NCBI NO: 25513803 NR Description: J domain of DnaJ-like-protein 1 - rat
  misc_feature (30)..(251): Homolog of NCBI NO: 23956266 NR Description: similar to DnaJ protein SB73; likely ortholog of
  misc_feature (30)..(284): Homolog of NCBI NO: 21356411 NR Description: CG6693-PA [Drosophila melanogaster]
MGRKKKSRASTTEEDEIEMDNAGPSSETSLYEVLGVERRATSQEIRKAYHKLALKLHPDKNQDDKEAKDKFQQLQKVISILGDEEKRAVYDQTGSIDDADIPGDAFENLRDFFRDMYKKVTEADIEEFEATYRGSESEKKDLLELFNKFKGKMNRLFCSMLCSDPKLDSHRFKDMLDEAIAAGEVKSSKAYEKWANKISETKPPTSPLRKRKKKKSAPKDSETDLCLMIAKRQEERKGKVDSMFSSLISRYGGDAEAEPTEEEFEASQRRIETQRKPSKKSRGK

SEQ ID NO: 97553 - protein, 266 aa, Arabidopsis thaliana
  peptide (1)..(266): Ceres Seq. ID no. 12738762
  misc_feature (11)..(76): Pfam Name: DnaJ domain Pfam Description: DnaJ domain
  misc_feature (1)..(266): Homolog of NCBI NO: 2689720 NR Description: DnaJ homologue [Arabidopsis thaliana]
  misc_feature (1)..(266): Homolog of NCBI NO: 15240212 NR Description: DnaJ homologue (gb|AAB91418.1|); protein id: supported by cDNA: gi_2689719 [Arabidopsis thaliana]
  misc_feature (1)..(266): Homolog of NCBI NO: 15230424 NR Description: DnaJ protein, putative; protein id: At3g12170.1
  misc_feature (1)..(149): Homolog of NCBI NO: 12322012 NR Description: DnaJ protein, putative, 3' partial; 1110-1
  misc_feature (10)..(233): Homolog of NCBI NO: 39794528 NR Description: Unknown (protein for MGC:76175) [Silurana
  misc_feature (12)..(233): Homolog of NCBI NO: 27597059 NR Description: DnaJ homolog, subfamily C, member 9; DnaJ protein
  misc_feature (12)..(233): Homolog of NCBI NO: 34868976 NR Description: similar to J domain of DnaJ-like-protein 1 - rat
  misc_feature (12)..(233): Homolog of NCBI NO: 25513803 NR Description: J domain of DnaJ-like-protein 1 - rat
  misc_feature (12)..(233): Homolog of NCBI NO: 23956266 NR Description: similar to DnaJ protein SB73; likely ortholog of
  misc_feature (12)..(266): Homolog of NCBI NO: 21356411 NR Description: CG6693-PA [Drosophila melanogaster]
MDNAGPSSETSLYEVLGVERRATSQEIRKAYHKLALKLHPDKNQDDKEAKDKFQQLQKVISILGDEEKRAVYDQTGSIDDADIPGDAFENLRDFFRDMYKKVTEADIEEFEATYRGSESEKKDLLELFNKFKGKMNRLFCSMLCSDPKLDSHRFKDMLDEAIAAGEVKSSKAYEKWANKISETKPPTSPLRKRKKKKSAPKDSETDLCLMIAKRQEERKGKVDSMFSSLISRYGGDAEAEPTEEEFEASQRRIETQRKPSKKSRGK

SEQ ID NO: 97554 - protein, 169 aa, Arabidopsis thaliana
  peptide (1)..(169): Ceres Seq. ID no. 12738763
  misc_feature (1)..(169): Homolog of NCBI NO: 2689720 NR Description: DnaJ homologue [Arabidopsis thaliana]
  misc_feature (1)..(169): Homolog of NCBI NO: 15240212 NR Description: DnaJ homologue (gb|AAB91418.1|); protein id: supported by cDNA: gi_2689719 [Arabidopsis thaliana]
  misc_feature (1)..(169): Homolog of NCBI NO: 15230424 NR Description: DnaJ protein, putative; protein id: At3g12170.1
  misc_feature (1)..(52): Homolog of NCBI NO: 12322012 NR Description: DnaJ protein, putative, 3' partial; 1110-1
  misc_feature (1)..(136): Homolog of NCBI NO: 39794528 NR Description: Unknown (protein for MGC:76175) [Silurana
  misc_feature (1)..(136): Homolog of NCBI NO: 27597059 NR Description: DnaJ homolog, subfamily C, member 9; DnaJ protein
  misc_feature (1)..(136): Homolog of NCBI NO: 34868976 NR Description: similar to J domain of DnaJ-like-protein 1 - rat
  misc_feature (1)..(136): Homolog of NCBI NO: 25513803 NR Description: J domain of DnaJ-like-protein 1 - rat
  misc_feature (1)..(136): Homolog of NCBI NO: 23956266 NR Description: similar to DnaJ protein SB73; likely ortholog of
  misc_feature (1)..(169): Homolog of NCBI NO: 21356411 NR Description: CG6693-PA [Drosophila melanogaster]
MYKKVTEADIEEFEATYRGSESEKKDLLELFNKFKGKMNRLFCSMLCSDPKLDSHRFKDMLDEAIAAGEVKSSKAYEKWANKISETKPPTSPLRKRKKKKSAPKDSETDLCLMIAKRQEERKGKVDSMFSSLISRYGGDAEAEPTEEEFEASQRRIETQRKPSKKSRGK

SEQ ID NO: 97555 - DNA, 1879 bp, Arabidopsis thaliana
  misc_feature (1)..(1879): Ceres Seq. ID no. 12738832
  misc_feature: MA Experiment ID: 20000234 Result: Down-regulated in Transcription
  misc_feature: MA Experiment 20000234 PARAMETER Experiment Name: At_Siliques_P Parameter: Age (day) Value: 21
  misc_feature: MA Experiment 20000234 PARAMETER Experiment Name: At_Siliques_P Parameter: Organism Value: A. thaliana
  misc_feature: MA Experiment 20000234 PARAMETER Experiment Name: At_Siliques_P Parameter: Plant Line Value: WS
  misc_feature: MA Experiment 20000234 PARAMETER Experiment Name: At_Siliques_P Parameter: Tissue Value: Less Than 5mm Siliques vs. Whole Plant
  misc_feature: MA Experiment ID: 20000235 Result: Down-regulated in Transcription
  misc_feature: MA Experiment 20000235 PARAMETER Experiment Name: At_Siliques_P Parameter: Age (day) Value: 21
  misc_feature: MA Experiment 20000235 PARAMETER Experiment Name: At_Siliques_P Parameter: Organism Value: A. thaliana
  misc_feature: MA Experiment 20000235 PARAMETER Experiment Name: At_Siliques_P Parameter: Plant Line Value: WS
  misc_feature: MA Experiment 20000235 PARAMETER Experiment Name: At_Siliques_P Parameter: Tissue Value: 5-10mm Siliques vs. Whole Plant
  misc_feature: MA Experiment ID: 20000265 Result: Down-regulated in Transcription
  misc_feature: MA Experiment 20000265 PARAMETER Experiment Name: At_Open_Flower_P Parameter: Age (day) Value: 21
  misc_feature: MA Experiment 20000265 PARAMETER Experiment Name: At_Open_Flower_P Parameter: Plant Line Value: WS
  misc_feature: MA Experiment 20000265 PARAMETER Experiment Name: At_Open_Flower_P Parameter: Tissue Value: Closed Flower vs. Whole Plant
  misc_feature: MA Experiment ID: 20000437 Result: Up-regulated in Transcription
  misc_feature: MA Experiment 20000437 PARAMETER Experiment Name: At_Drought_P Parameter: Age (day) Value: 8
  misc_feature: MA Experiment 20000437 PARAMETER Experiment Name: At_Drought_P Parameter: Organism Value: A. thaliana
  misc_feature: MA Experiment 20000437 PARAMETER Experiment Name: At_Drought_P Parameter: Plant Line Value: WS
  misc_feature: MA Experiment 20000437 PARAMETER Experiment Name: At_Drought_P Parameter: Timepoint (hr) Value: 24
  misc_feature: MA Experiment 20000437 PARAMETER Experiment Name: At_Drought_P Parameter: Tissue Value: Whole Plant
  misc_feature: MA Experiment 20000437 PARAMETER Experiment Name: At_Drought_P Parameter: Treatment Value: Drought vs. No Drought
acttctcttttgattcgattctctctttaccttgaagcttcaatatcaaccaaatcttttttctcaaaatctcaaagaatctctcaaactcagtctcctatctgtctctctgcaaactattaccaaccagataatttagatatggaagctactcagaaacatatgattcaagaaggatcttcaatgttttaccatcaaccatcttcagtcaaacaaatggacctttctgttcagacatttgattcttactgcacacttgaatcctcttcaggcaccaagtctcatccttgtcttaacaacaaaaacaactcttcttcaaccacaagcttttcctctaatgaaagtcccatttctcaagccaacaacaacaacttatcaaggtttaacaatcattcccctgaagaaaacaataactctcccttgagcggttcttcagcgacaaacaccaacgagacagagcttagtctcatgcttaaagatttggagactgcaatgatggagcctgatgtagacaacagctataacaatcaaggcgggtttggacagcagcatggagttgtttcttcagctatgtatagatctatggagatgatctctaggggagatttaaaaggagtgctctatgaatgcgcaaaagctgttgaaaactatgatttggaaatgactgattggttgatctctcagttacagcaaatggtttctgtttctggtgagcctgttcagcgcttaggagcttatatgcttgaaggtctcgttgctaggttagcttcttcgggtagctccatctataaagcattgagatgcaaagacccaacgggtcctgagcttcttacttatatgcatatcttgtatgaagcctgcccttatttcaaattcggttatgaatctgctaatggagctatagctgaagctgtgaagaacgaaagttttgtgcacattatcgatttccagatttctcaaggtggtcaatgggtgagtttgatccgtgctcttggtgctagacctggtggacctccgaacgttaggataacgggaattgatgatccgagatcatcgtttgctcgtcaaggaggacttgagttagttggacaaagacttgggaagctagctgaaatgtgcggtgttccgtttgagttccatggagctgctttatgctgcacggaagtcgaaatcgagaagctaggagttagaaatggagaagcgctcgcggttaacttcccgcttgttcttcaccacatgcctgatgagagtgtaactgtggagaatcacagagatagattgttgagattggtcaaacacttgtcaccaaacgttgtgactctggttgagcaagaagcgaatacaaacactgcgccgtttcttccccggtttgtcgagacaatgaaccattacttggcagttttcgaatcaatagatgtgaaactcgctagagatcacaaggaaaggatcaatgttgagcagcattgtttggctagagaggttgtgaatcttatagcttgtgaaggtgttgaaagagaagagaggcacgagccactagggaaatggaggtctcggtttcacatggcgggatttaaaccgtatcctttgagctcgtatgtgaacgcaacaatcgaaggattgcttgagagttattcagagaagtatacacttgaagaaagagatggagcattgtatttaggatggaagaatcaacctcttatcacttcttgtgcttggaggtaactaataaaaaccttgttcggtttcagaagagattagaaacttcttttaaagtttgcagaatctgtttgtaaaagtaaaactcatgcatgatccgaaggaacaagttgtcaaatgttgtagtagtaagtgatatgttgatgaccccataaaaaaacag

SEQ ID NO: 97556 - protein, 573 aa, Arabidopsis thaliana
  peptide (1)..(573): Ceres Seq. ID no. 12738833
  misc_feature (177)..(483): Pfam Name: GRAS family transcription factor Pfam Description: GRAS family transcription factor
  misc_feature (1)..(573): Homolog of NCBI NO: 23397333 NR Description: putative scarecrow protein [Arabidopsis thaliana]
  misc_feature (1)..(573): Homolog of NCBI NO: 30694805 NR Description: scarecrow-like transcription factor 5 (SCL5) thaliana] >gi|24030207|gb|AAN41283.1| putative scarecrow protein
  misc_feature (48)..(573): Homolog of NCBI NO: 14517552 NR Description: F17J6.12/F17J6.12 [Arabidopsis thaliana]
  misc_feature (48)..(573): Homolog of NCBI NO: 25405382 NR Description: scarecrow-like protein [imported] - Arabidopsis >gi|9454552|gb|AAF87875.1|AC012561_8 Putative transcription
  misc_feature (271)..(573): Homolog of NCBI NO: 11358827 NR Description: scarecrow-like protein 5 [imported] - Arabidopsis
  misc_feature (76)..(572): Homolog of NCBI NO: 37533564 NR Description: putative SCARECROW gene regulator-like [Oryza
  misc_feature (143)..(573): Homolog of NCBI NO: 15238903 NR Description: SCARECROW gene regulator-like; protein id: supported by cDNA: gi_8132288 [Arabidopsis thaliana] phytochrome A signal transduction 1 protein [Arabidopsis
  misc_feature (76)..(572): Homolog of NCBI NO: 25989334 NR Description: chitin-inducible gibberellin-responsive protein
  misc_feature (165)..(573): Homolog of NCBI NO: 26450054 NR Description: putative SCARECROW gene regulator [Arabidopsis
  misc_feature (195)..(573): Homolog of NCBI NO: 15224425 NR Description: putative SCARECROW gene regulator; protein id: supported by cDNA: gi_6644391 [Arabidopsis thaliana]
TSLLIRFSLYLEASISTKSFFSKSQRISQTQSPICLSANYYQPDNLDMEATQKHMIQEGSSMFYHQPSSVKQMDLSVQTFDSYCTLESSSGTKSHPCLNNKNNSSSTTSFSSNESPISQANNNNLSRFNNHSPEENNNSPLSGSSATNTNETELSLMLKDLETAMMEPDVDNSYNNQGGFGQQHGVVSSAMYRSMEMISRGDLKGVLYECAKAVENYDLEMTDWLISQLQQMVSVSGEPVQRLGAYMLEGLVARLASSGSSIYKALRCKDPTGPELLTYMHILYEACPYFKFGYESANGAIAEAVKNESFVHIIDFQISQGGQWVSLIRALGARPGGPPNVRITGIDDPRSSFARQGGLELVGQRLGKLAEMCGVPFEFHGAALCCTEVEIEKLGVRNGEALAVNFPLVLHHMPDESVTVENHRDRLLRLVKHLSPNVVTLVEQEANTNTAPFLPRFVETMNHYLAVFESIDVKLARDHKERINVEQHCLAREVVNLIACEGVEREERHEPLGKWRSRFHMAGFKPYPLSSYVNATIEGLLESYSEKYTLEERDGALYLGWKNQPLITSCAWR

SEQ ID NO: 97557 - protein, 526 aa, Arabidopsis thaliana
  peptide (1)..(526): Ceres Seq. ID no. 12738834
  misc_feature (130)..(436): Pfam Name: GRAS family transcription factor Pfam Description: GRAS family transcription factor
  misc_feature (1)..(526): Homolog of NCBI NO: 23397333 NR Description: putative scarecrow protein [Arabidopsis thaliana]
  misc_feature (1)..(526): Homolog of NCBI NO: 30694805 NR Description: scarecrow-like transcription factor 5 (SCL5) thaliana] >gi|24030207|gb|AAN41283.1| putative scarecrow protein
  misc_feature (1)..(526): Homolog of NCBI NO: 14517552 NR Description: F17J6.12/F17J6.12 [Arabidopsis thaliana]
  misc_feature (1)..(526): Homolog of NCBI NO: 25405382 NR Description: scarecrow-like protein [imported] - Arabidopsis >gi|9454552|gb|AAF87875.1|AC012561_8 Putative transcription
  misc_feature (224)..(526): Homolog of NCBI NO: 11358827 NR Description: scarecrow-like protein 5 [imported] - Arabidopsis
  misc_feature (29)..(525): Homolog of NCBI NO: 37533564 NR Description: putative SCARECROW gene regulator-like [Oryza
  misc_feature (96)..(526): Homolog of NCBI NO: 15238903 NR Description: SCARECROW gene regulator-like; protein id: supported by cDNA: gi_8132288 [Arabidopsis thaliana] phytochrome A signal transduction 1 protein [Arabidopsis
  misc_feature (29)..(525): Homolog of NCBI NO: 25989334 NR Description: chitin-inducible gibberellin-responsive protein
  misc_feature (118)..(526): Homolog of NCBI NO: 26450054 NR Description: putative SCARECROW gene regulator [Arabidopsis
  misc_feature (148)..(526): Homolog of NCBI NO: 15224425 NR Description: putative SCARECROW gene regulator; protein id: supported by cDNA: gi_6644391 [Arabidopsis thaliana]
MEATQKHMIQEGSSMFYHQPSSVKQMDLSVQTFDSYCTLESSSGTKSHPCLNNKNNSSSTTSFSSNESPISQANNNNLSRFNNHSPEENNNSPLSGSSATNTNETELSLMLKDLETAMMEPDVDNSYNNQGGFGQQHGVVSSAMYRSMEMISRGDLKGVLYECAKAVENYDLEMTDWLISQLQQMVSVSGEPVQRLGAYMLEGLVARLASSGSSIYKALRCKDPTGPELLTYMHILYEACPYFKFGYESANGAIAEAVKNESFVHIIDFQISQGGQWVSLIRALGARPGGPPNVRITGIDDPRSSFARQGGLELVGQRLGKLAEMCGVPFEFHGAALCCTEVEIEKLGVRNGEALAVNFPLVLHHMPDESVTVENHRDRLLRLVKHLSPNVVTLVEQEANTNTAPFLPRFVETMNHYLAVFESIDVKLARDHKERINVEQHCLAREVVNLIACEGVEREERHEPLGKWRSRFHMAGFKPYPLSSYVNATIEGLLESYSEKYTLEERDGALYLGWKNQPLITSCAWR

SEQ ID NO: 97558 - protein, 519 aa, Arabidopsis thaliana
  peptide (1)..(519): Ceres Seq. ID no. 12738835
  misc_feature (123)..(429): Pfam Name: GRAS family transcription factor Pfam Description: GRAS family transcription factor
  misc_feature (1)..(519): Homolog of NCBI NO: 23397333 NR Description: putative scarecrow protein [Arabidopsis thaliana]
  misc_feature (1)..(519): Homolog of NCBI NO: 30694805 NR Description: scarecrow-like transcription factor 5 (SCL5) thaliana] >gi|24030207|gb|AAN41283.1| putative scarecrow protein
  misc_feature (1)..(519): Homolog of NCBI NO: 14517552 NR Description: F17J6.12/F17J6.12 [Arabidopsis thaliana]
  misc_feature (1)..(519): Homolog of NCBI NO: 25405382 NR Description: scarecrow-like protein [imported] - Arabidopsis >gi|9454552|gb|AAF87875.1|AC012561_8 Putative transcription
  misc_feature (217)..(519): Homolog of NCBI NO: 11358827 NR Description: scarecrow-like protein 5 [imported] - Arabidopsis
  misc_feature (22)..(518): Homolog of NCBI NO: 37533564 NR Description: putative SCARECROW gene regulator-like [Oryza
  misc_feature (89)..(519): Homolog of NCBI NO: 15238903 NR Description: SCARECROW gene regulator-like; protein id: supported by cDNA: gi_8132288 [Arabidopsis thaliana] phytochrome A signal transduction 1 protein [Arabidopsis
  misc_feature (22)..(518): Homolog of NCBI NO: 25989334 NR Description: chitin-inducible gibberellin-responsive protein
  misc_feature (111)..(519): Homolog of NCBI NO: 26450054 NR Description: putative SCARECROW gene regulator [Arabidopsis
  misc_feature (141)..(519): Homolog of NCBI NO: 15224425 NR Description: putative SCARECROW gene regulator; protein id: supported by cDNA: gi_6644391 [Arabidopsis thaliana]
MIQEGSSMFYHQPSSVKQMDLSVQTFDSYCTLESSSGTKSHPCLNNKNNSSSTTSFSSNESPISQANNNNLSRFNNHSPEENNNSPLSGSSATNTNETELSLMLKDLETAMMEPDVDNSYNNQGGFGQQHGVVSSAMYRSMEMISRGDLKGVLYECAKAVENYDLEMTDWLISQLQQMVSVSGEPVQRLGAYMLEGLVARLASSGSSIYKALRCKDPTGPELLTYMHILYEACPYFKFGYESANGAIAEAVKNESFVHIIDFQISQGGQWVSLIRALGARPGGPPNVRITGIDDPRSSFARQGGLELVGQRLGKLAEMCGVPFEFHGAALCCTEVEIEKLGVRNGEALAVNFPLVLHHMPDESVTVENHRDRLLRLVKHLSPNVVTLVEQEANTNTAPFLPRFVETMNHYLAVFESIDVKLARDHKERINVEQHCLAREVVNLIACEGVEREERHEPLGKWRSRFHMAGFKPYPLSSYVNATIEGLLESYSEKYTLEERDGALYLGWKNQPLITSCAWR

SEQ ID NO: 97559 - DNA, 1057 bp, Arabidopsis thaliana
  misc_feature (1)..(1057): Ceres Seq. ID no. 12738854
  misc_feature: MA Experiment ID: 108501 Result: Up-regulated in Transcription
  misc_feature: MA Experiment 108501 PARAMETER Experiment Name: At_ap2_floral_buds_cDNA_P Parameter: Plant Line Value: ap2 (Ler.)
  misc_feature: MA Experiment 108501 PARAMETER Experiment Name: At_ap2_floral_buds_cDNA_P Parameter: Tissue Value: Closed Flower
  misc_feature: MA Experiment ID: 20000184 Result: Down-regulated in Transcription
  misc_feature: MA Experiment 20000184 PARAMETER Experiment Name: At_Shoots__P Parameter: Age (day) Value: 7
  misc_feature: MA Experiment 20000184 PARAMETER Experiment Name: At_Shoots__P Parameter: Tissue Value: Shoots vs. Whole Plant
  misc_feature: MA Experiment ID: 20000234 Result: Up-regulated in Transcription
  misc_feature: MA Experiment 20000234 PARAMETER Experiment Name: At_Siliques_P Parameter: Age (day) Value: 21
  misc_feature: MA Experiment 20000234 PARAMETER Experiment Name: At_Siliques_P Parameter: Organism Value: A. thaliana
  misc_feature: MA Experiment 20000234 PARAMETER Experiment Name: At_Siliques_P Parameter: Plant Line Value: WS
  misc_feature: MA Experiment 20000234 PARAMETER Experiment Name: At_Siliques_P Parameter: Tissue Value: Less Than 5mm Siliques vs. Whole Plant
  misc_feature: MA Experiment ID: 20000264 Result: Up-regulated in Transcription
  misc_feature: MA Experiment 20000264 PARAMETER Experiment Name: At_Open_Flower_P Parameter: Age (day) Value: 21
  misc_feature: MA Experiment 20000264 PARAMETER Experiment Name: At_Open_Flower_P Parameter: Plant Line Value: WS
  misc_feature: MA Experiment 20000264 PARAMETER Experiment Name: At_Open_Flower_P Parameter: Tissue Value: Open Flower vs. Whole Plant
  misc_feature: MA Experiment ID: 20000265 Result: Up-regulated in Transcription
  misc_feature: MA Experiment 20000265 PARAMETER Experiment Name: At_Open_Flower_P Parameter: Age (day) Value: 21
  misc_feature: MA Experiment 20000265 PARAMETER Experiment Name: At_Open_Flower_P Parameter: Plant Line Value: WS
  misc_feature: MA Experiment 20000265 PARAMETER Experiment Name: At_Open_Flower_P Parameter: Tissue Value: Closed Flower vs. Whole Plant
  misc_feature: MA Experiment ID: 20000286 Result: Up-regulated in Transcription
  misc_feature: MA Experiment 20000286 PARAMETER Experiment Name: At_Open_Flower_P Parameter: Age (day) Value: 21
  misc_feature: MA Experiment 20000286 PARAMETER Experiment Name: At_Open_Flower_P Parameter: Plant Line Value: WS
  misc_feature: MA Experiment 20000286 PARAMETER Experiment Name: At_Open_Flower_P Parameter: Tissue Value: Half Open vs. Whole Plant
  misc_feature: MA Experiment ID: 20000794 Result: Down-regulated in Transcription
  misc_feature: MA Experiment 20000794 PARAMETER Experiment Name: At_Petals_P Parameter: Age (day) Value: 23-25 days
  misc_feature: MA Experiment 20000794 PARAMETER Experiment Name: At_Petals_P Parameter: Plant Line Value: WS
  misc_feature: MA Experiment 20000794 PARAMETER Experiment Name: At_Petals_P Parameter: Tissue Value: Petals vs. Whole plant
  misc_feature: Phenotype: ROSETTE LEAVES Curled-Curled 5
  misc_feature: Phenotype: ROSETTE LEAVES Other
  misc_feature: Phenotype: WHOLE PLANT Size-Small
  misc_feature: Phenotype: WHOLE PLANT Size-Small
  misc_feature: Phenotype: CAULINE LEAVES Curled-Curled 5
  misc_feature: Phenotype: FLOWERS Other
  misc_feature: Phenotype: FLOWERS Other
  misc_feature: Phenotype: SILIQUES Other
  misc_feature: Phenotype: FERTILITY Fertility-Reduced
  misc_feature: Phenotype: FERTILITY Fertility-Reduced
  misc_feature: Phenotype: ROSETTE LEAVES Curled-Curled 4
  misc_feature: Phenotype: ROSETTE LEAVES Curled-Curled 5
  misc_feature: Phenotype: ROSETTE LEAVES Other
  misc_feature: Phenotype: WHOLE PLANT Size-Small
  misc_feature: Phenotype: WHOLE PLANT Size-Small
  misc_feature: Phenotype: CAULINE LEAVES Curled-Curled 4
  misc_feature: Phenotype: FLOWERS Other
  misc_feature: Phenotype: FERTILITY Fertility-Reduced
  misc_feature: Phenotype: FERTILITY Fertility-Reduced
  misc_feature: Phenotype: ROSETTE LEAVES Curled-Curled 5
  misc_feature: Phenotype: WHOLE PLANT Size-Small
  misc_feature: Phenotype: INFLORESCENCE Strength-Weak
  misc_feature: Phenotype: FERTILITY Fertility-Male-sterile
  misc_feature: Phenotype: FERTILITY Fertility-Reduced
  misc_feature: Phenotype: FERTILITY Fertility-Sterile
  misc_feature: Phenotype: ROSETTE LEAVES Curled-Curled 5
  misc_feature: Phenotype: WHOLE PLANT Size-Small
  misc_feature: Phenotype: INFLORESCENCE Strength-Weak
  misc_feature: Phenotype: FERTILITY Fertility-Male-sterile
  misc_feature: Phenotype: FERTILITY Fertility-Sterile
  misc_feature: Phenotype: ROSETTE LEAVES Curled-Curled 5
  misc_feature: Phenotype: WHOLE PLANT Size-Small
  misc_feature: Phenotype: INFLORESCENCE Strength-Weak
  misc_feature: Phenotype: FERTILITY Fertility-Male-sterile
  misc_feature: Phenotype: FERTILITY Fertility-Reduced
  misc_feature: Phenotype: FERTILITY Fertility-Sterile
  misc_feature: Phenotype: ROSETTE LEAVES Curled-Curled 2
  misc_feature: Phenotype: SILIQUES Length-Short
  misc_feature: Phenotype: ROSETTE LEAVES Curled-Curled 5
  misc_feature: Phenotype: WHOLE PLANT Size-Small
  misc_feature: Phenotype: INFLORESCENCE Strength-Weak
  misc_feature: Phenotype: FERTILITY Fertility-Male-sterile
  misc_feature: Phenotype: FERTILITY Fertility-Sterile
  misc_feature: Phenotype: ROSETTE LEAVES Curled-Curled 5
  misc_feature: Phenotype: WHOLE PLANT Size-Small
  misc_feature: Phenotype: ROSETTE LEAVES Curled-Curled 5
  misc_feature: Phenotype: WHOLE PLANT Size-Small
  misc_feature: Phenotype: ROSETTE LEAVES Curled-Curled 5
  misc_feature: Phenotype: WHOLE PLANT Size-Small
  misc_feature: Phenotype: ROSETTE LEAVES Curled-Curled 5
  misc_feature: Phenotype: WHOLE PLANT Size-Small
  misc_feature: Phenotype: ROSETTE LEAVES Curled-Curled 5
  misc_feature: Phenotype: ROSETTE LEAVES Curled-Curled 5
  misc_feature: Phenotype: WHOLE PLANT Size-Small
  misc_feature: Phenotype: WHOLE PLANT Size-Small
  misc_feature: Phenotype: CAULINE LEAVES Curled-Curled 5
  misc_feature: Phenotype: FLOWERS Other
  misc_feature: Phenotype: FERTILITY Fertility-Reduced
  misc_feature: Phenotype: FERTILITY Fertility-Sterile
  misc_feature: Phenotype: ROSETTE LEAVES Curled-Curled 5
  misc_feature: Phenotype: ROSETTE LEAVES Curled-Curled 5
  misc_feature: Phenotype: WHOLE PLANT Size-Small
  misc_feature: Phenotype: WHOLE PLANT Size-Small
  misc_feature: Phenotype: CAULINE LEAVES Curled-Curled 5
  misc_feature: Phenotype: FLOWERS Other
  misc_feature: Phenotype: FERTILITY Fertility-Reduced
  misc_feature: Phenotype: FERTILITY Fertility-Sterile
  misc_feature: Phenotype: ROSETTE LEAVES Curled-Curled 5
  misc_feature: Phenotype: ROSETTE LEAVES Curled-Curled 5
  misc_feature: Phenotype: WHOLE PLANT Size-Small
  misc_feature: Phenotype: WHOLE PLANT Size-Small
  misc_feature: Phenotype: CAULINE LEAVES Curled-Curled 5
  misc_feature: Phenotype: FLOWERS Other
  misc_feature: Phenotype: FERTILITY Fertility-Reduced
  misc_feature: Phenotype: FERTILITY Fertility-Sterile
  misc_feature: Phenotype: ROSETTE LEAVES Curled-Curled 5
  misc_feature: Phenotype: ROSETTE LEAVES Curled-Curled 5
  misc_feature: Phenotype: WHOLE PLANT Size-Small
  misc_feature: Phenotype: WHOLE PLANT Size-Small
  misc_feature: Phenotype: CAULINE LEAVES Curled-Curled 5
  misc_feature: Phenotype: FLOWERS Other
  misc_feature: Phenotype: FERTILITY Fertility-Reduced
  misc_feature: Phenotype: FERTILITY Fertility-Sterile
  misc_feature: Phenotype: ROSETTE LEAVES Curled-Curled 5
  misc_feature: Phenotype: ROSETTE LEAVES Curled-Curled 5
  misc_feature: Phenotype: WHOLE PLANT Size-Small
  misc_feature: Phenotype: WHOLE PLANT Size-Small
  misc_feature: Phenotype: CAULINE LEAVES Curled-Curled 5
  misc_feature: Phenotype: FLOWERS Other
  misc_feature: Phenotype: FERTILITY Fertility-Reduced
  misc_feature: Phenotype: FERTILITY Fertility-Sterile
  misc_feature: Phenotype: ROSETTE LEAVES Curled-Curled 5
  misc_feature: Phenotype: ROSETTE LEAVES Curled-Curled 5
  misc_feature: Phenotype: WHOLE PLANT Size-Small
  misc_feature: Phenotype: WHOLE PLANT Size-Small
  misc_feature: Phenotype: CAULINE LEAVES Curled-Curled 5
  misc_feature: Phenotype: FLOWERS Other
  misc_feature: Phenotype: FERTILITY Fertility-Reduced
  misc_feature: Phenotype: FERTILITY Fertility-Sterile
  misc_feature: Phenotype: ROSETTE LEAVES Curled-Curled 5
  misc_feature: Phenotype: ROSETTE LEAVES Curled-Curled 5
  misc_feature: Phenotype: WHOLE PLANT Size-Small
  misc_feature: Phenotype: WHOLE PLANT Size-Small
  misc_feature: Phenotype: CAULINE LEAVES Curled-Curled 5
  misc_feature: Phenotype: FLOWERS Other
  misc_feature: Phenotype: FERTILITY Fertility-Reduced
  misc_feature: Phenotype: FERTILITY Fertility-Sterile
  misc_feature: Phenotype: ROSETTE LEAVES Curled-Curled 5
  misc_feature: Phenotype: ROSETTE LEAVES Curled-Curled 5
  misc_feature: Phenotype: WHOLE PLANT Size-Small
  misc_feature: Phenotype: WHOLE PLANT Size-Small
  misc_feature: Phenotype: CAULINE LEAVES Curled-Curled 5
  misc_feature: Phenotype: FLOWERS Other
  misc_feature: Phenotype: FERTILITY Fertility-Reduced
  misc_feature: Phenotype: FERTILITY Fertility-Sterile
  misc_feature: Phenotype: ROSETTE LEAVES Curled-Curled 5
  misc_feature: Phenotype: ROSETTE LEAVES Curled-Curled 5
  misc_feature: Phenotype: WHOLE PLANT Size-Small
  misc_feature: Phenotype: WHOLE PLANT Size-Small
  misc_feature: Phenotype: CAULINE LEAVES Curled-Curled 5
  misc_feature: Phenotype: FLOWERS Other
  misc_feature: Phenotype: FERTILITY Fertility-Reduced
  misc_feature: Phenotype: FERTILITY Fertility-Sterile
  misc_feature: Phenotype: ROSETTE LEAVES Curled-Curled 5
  misc_feature: Phenotype: ROSETTE LEAVES Curled-Curled 5
  misc_feature: Phenotype: WHOLE PLANT Size-Small
  misc_feature: Phenotype: WHOLE PLANT Size-Small
  misc_feature: Phenotype: CAULINE LEAVES Curled-Curled 5
  misc_feature: Phenotype: FLOWERS Other
  misc_feature: Phenotype: FERTILITY Fertility-Reduced
  misc_feature: Phenotype: FERTILITY Fertility-Sterile
  misc_feature: Phenotype: ROSETTE LEAVES Curled-Curled 3
  misc_feature: Phenotype: ROSETTE LEAVES Curled-Curled 3
  misc_feature: Phenotype: WHOLE PLANT Size-Small
  misc_feature: Phenotype: WHOLE PLANT Size-Small
  misc_feature: Phenotype: ROSETTE LEAVES Curled-Curled 3
  misc_feature: Phenotype: ROSETTE LEAVES Curled-Curled 4
  misc_feature: Phenotype: WHOLE PLANT Size-Small
  misc_feature: Phenotype: WHOLE PLANT Size-Small
  misc_feature: Phenotype: ROSETTE LEAVES Curled-Curled 3
  misc_feature: Phenotype: ROSETTE LEAVES Curled-Curled 3
  misc_feature: Phenotype: WHOLE PLANT Size-Small
  misc_feature: Phenotype: WHOLE PLANT Size-Small
  misc_feature: Phenotype: ROSETTE LEAVES Curled-Curled 3
  misc_feature: Phenotype: ROSETTE LEAVES Curled-Curled 5
  misc_feature: Phenotype: WHOLE PLANT Size-Small
  misc_feature: Phenotype: WHOLE PLANT Size-Small
  misc_feature: Phenotype: ROSETTE LEAVES Curled-Curled 5
  misc_feature: Phenotype: WHOLE PLANT Size-Small
  misc_feature: Phenotype: ROSETTE LEAVES Curled-Curled 5
  misc_feature: Phenotype: ROSETTE LEAVES Curled-Curled 5
  misc_feature: Phenotype: WHOLE PLANT Size-Small
  misc_feature: Phenotype: WHOLE PLANT Size-Small
  misc_feature: Phenotype: ROSETTE LEAVES Curled-Curled 5
  misc_feature: Phenotype: ROSETTE LEAVES Curled-Curled 5
  misc_feature: Phenotype: WHOLE PLANT Size-Small
  misc_feature: Phenotype: WHOLE PLANT Size-Small
  misc_feature: Phenotype: FERTILITY Fertility-Reduced
  misc_feature: Phenotype: ROSETTE LEAVES Curled-Curled 3
  misc_feature: Phenotype: ROSETTE LEAVES Curled-Curled 3
  misc_feature: Phenotype: WHOLE PLANT Size-Small
  misc_feature: Phenotype: WHOLE PLANT Size-Small
  misc_feature: Phenotype: ROSETTE LEAVES Curled-Curled 3
  misc_feature: Phenotype: ROSETTE LEAVES Curled-Curled 3
  misc_feature: Phenotype: WHOLE PLANT Size-Small
  misc_feature: Phenotype: WHOLE PLANT Size-Small
  misc_feature: Phenotype: ROSETTE LEAVES Curled-Curled 5
  misc_feature: Phenotype: WHOLE PLANT Size-Small
  misc_feature: Phenotype: FERTILITY Fertility-Reduced
  misc_feature: Phenotype: ROSETTE LEAVES Curled-Curled 2
  misc_feature: Phenotype: WHOLE PLANT Size-Small
  misc_feature: Phenotype: FERTILITY Fertility-Reduced
  misc_feature: Phenotype: ROSETTE LEAVES Curled-Curled 5
  misc_feature: Phenotype: WHOLE PLANT Size-Small
  misc_feature: Phenotype: FERTILITY Fertility-Reduced
  misc_feature: Phenotype: ROSETTE LEAVES Curled-Curled 2
  misc_feature: Phenotype: WHOLE PLANT Size-Small
  misc_feature: Phenotype: FERTILITY Fertility-Reduced
  misc_feature: Phenotype: ROSETTE LEAVES Curled-Curled 2
  misc_feature: Phenotype: WHOLE PLANT Size-Small
  misc_feature: Phenotype: FERTILITY Fertility-Reduced
  misc_feature: Phenotype: ROSETTE LEAVES Curled-Curled 5
  misc_feature: Phenotype: WHOLE PLANT Size-Small
  misc_feature: Phenotype: FERTILITY Fertility-Reduced
  misc_feature: Phenotype: ROSETTE LEAVES Curled-Curled 2
  misc_feature: Phenotype: WHOLE PLANT Size-Small
  misc_feature: Phenotype: FERTILITY Fertility-Reduced
  misc_feature: Phenotype: ROSETTE LEAVES Curled-Curled 2
  misc_feature: Phenotype: WHOLE PLANT Size-Small
  misc_feature: Phenotype: FERTILITY Fertility-Reduced
  misc_feature: Phenotype: ROSETTE LEAVES Curled-Curled 2
  misc_feature: Phenotype: WHOLE PLANT Size-Small
  misc_feature: Phenotype: FERTILITY Fertility-Reduced
  misc_feature: Phenotype: ROSETTE LEAVES Curled-Curled 2
  misc_feature: Phenotype: WHOLE PLANT Size-Small
  misc_feature: Phenotype: FERTILITY Fertility-Reduced
  misc_feature: Phenotype: ROSETTE LEAVES Curled-Curled 5
  misc_feature: Phenotype: WHOLE PLANT Size-Small
  misc_feature: Phenotype: ROSETTE LEAVES Curled-Curled 5
  misc_feature: Phenotype: ROSETTE LEAVES Curled-Curled 5
  misc_feature: Phenotype: WHOLE PLANT Size-Small
  misc_feature: Phenotype: WHOLE PLANT Size-Small
  misc_feature: Phenotype: ROSETTE LEAVES Curled-Curled 4
  misc_feature: Phenotype: ROSETTE LEAVES Curled-Curled 5
  misc_feature: Phenotype: WHOLE PLANT Size-Small
  misc_feature: Phenotype: WHOLE PLANT Size-Small
  misc_feature: Phenotype: ROSETTE LEAVES Curled-Curled 5
  misc_feature: Phenotype: WHOLE PLANT Size-Small
  misc_feature: Phenotype: ROSETTE LEAVES Curled-Curled 5
  misc_feature: Phenotype: ROSETTE LEAVES Curled-Curled 5
  misc_feature: Phenotype: WHOLE PLANT Size-Small
  misc_feature: Phenotype: WHOLE PLANT Size-Small
  misc_feature: Phenotype: ROSETTE LEAVES Curled-Curled 3
  misc_feature: Phenotype: ROSETTE LEAVES Curled-Curled 3
  misc_feature: Phenotype: WHOLE PLANT Size-Small
  misc_feature: Phenotype: CAULINE LEAVES Curled-Curled 3
  misc_feature: Phenotype: ROSETTE LEAVES Curled-Curled 4
  misc_feature: Phenotype: ROSETTE LEAVES Curled-Curled 4
  misc_feature: Phenotype: WHOLE PLANT Size-Small
  misc_feature: Phenotype: WHOLE PLANT Size-Small
  misc_feature: Phenotype: ROSETTE LEAVES Curled-Curled 4
  misc_feature: Phenotype: ROSETTE LEAVES Curled-Curled 4
  misc_feature: Phenotype: WHOLE PLANT Size-Small
  misc_feature: Phenotype: WHOLE PLANT Size-Small
  misc_feature: Phenotype: ROSETTE LEAVES Curled-Curled 4
  misc_feature: Phenotype: ROSETTE LEAVES Curled-Curled 5
  misc_feature: Phenotype: WHOLE PLANT Size-Small
  misc_feature: Phenotype: WHOLE PLANT Size-Small
  misc_feature: Phenotype: ROSETTE LEAVES Curled-Curled 3
  misc_feature: Phenotype: ROSETTE LEAVES Curled-Curled 4
  misc_feature: Phenotype: WHOLE PLANT Size-Small
  misc_feature: Phenotype: CAULINE LEAVES Curled-Curled 3
  misc_feature: Phenotype: ROSETTE LEAVES Curled-Curled 5
  misc_feature: Phenotype: ROSETTE LEAVES Curled-Curled 5
  misc_feature: Phenotype: ROSETTE LEAVES Other
  misc_feature: Phenotype: WHOLE PLANT Size-Small
  misc_feature: Phenotype: WHOLE PLANT Size-Small
  misc_feature: Phenotype: CAULINE LEAVES Curled-Curled 5
  misc_feature: Phenotype: INFLORESCENCE Height-Short
  misc_feature: Phenotype: FERTILITY Fertility-Reduced
  misc_feature: Phenotype: FERTILITY Fertility-Reduced
  misc_feature: Phenotype: ROSETTE LEAVES Curled-Curled 5
  misc_feature: Phenotype: ROSETTE LEAVES Other
  misc_feature: Phenotype: WHOLE PLANT Size-Small
  misc_feature: Phenotype: CAULINE LEAVES Curled-Curled 5
  misc_feature: Phenotype: INFLORESCENCE Height-Short
  misc_feature: Phenotype: FERTILITY Fertility-Reduced
  misc_feature: Phenotype: ROSETTE LEAVES Curled-Curled 5
  misc_feature: Phenotype: ROSETTE LEAVES Curled-Curled 5
  misc_feature: Phenotype: ROSETTE LEAVES Other
  misc_feature: Phenotype: WHOLE PLANT Size-Small
  misc_feature: Phenotype: WHOLE PLANT Size-Small
  misc_feature: Phenotype: CAULINE LEAVES Curled-Curled 5
  misc_feature: Phenotype: INFLORESCENCE Flowering Time-Late Flowering
  misc_feature: Phenotype: INFLORESCENCE Height-Short
  misc_feature: Phenotype: FERTILITY Fertility-Reduced
  misc_feature: Phenotype: FERTILITY Fertility-Reduced
  misc_feature: Phenotype: ROSETTE LEAVES Curled-Curled 5
  misc_feature: Phenotype: ROSETTE LEAVES Curled-Curled 5
  misc_feature: Phenotype: ROSETTE LEAVES Other
  misc_feature: Phenotype: WHOLE PLANT Size-Small
  misc_feature: Phenotype: WHOLE PLANT Size-Small
  misc_feature: Phenotype: CAULINE LEAVES Curled-Curled 5
  misc_feature: Phenotype: INFLORESCENCE Height-Short
  misc_feature: Phenotype: FERTILITY Fertility-Reduced
  misc_feature: Phenotype: FERTILITY Fertility-Reduced
  misc_feature: Phenotype: ROSETTE LEAVES Curled-Curled 5
  misc_feature: Phenotype: ROSETTE LEAVES Curled-Curled 5
  misc_feature: Phenotype: ROSETTE LEAVES Other
  misc_feature: Phenotype: WHOLE PLANT Size-Small
  misc_feature: Phenotype: WHOLE PLANT Size-Small
  misc_feature: Phenotype: CAULINE LEAVES Curled-Curled 5
  misc_feature: Phenotype: INFLORESCENCE Height-Short
  misc_feature: Phenotype: FERTILITY Fertility-Reduced
  misc_feature: Phenotype: FERTILITY Fertility-Reduced
  misc_feature: Phenotype: ROSETTE LEAVES Curled-Curled 5
  misc_feature: Phenotype: ROSETTE LEAVES Curled-Curled 5
  misc_feature: Phenotype: ROSETTE LEAVES Other
  misc_feature: Phenotype: WHOLE PLANT Size-Small
  misc_feature: Phenotype: WHOLE PLANT Size-Small
  misc_feature: Phenotype: CAULINE LEAVES Curled-Curled 5
  misc_feature: Phenotype: INFLORESCENCE Height-Short
  misc_feature: Phenotype: FERTILITY Fertility-Reduced
  misc_feature: Phenotype: FERTILITY Fertility-Reduced
  misc_feature: Phenotype: ROSETTE LEAVES Curled-Curled 5
  misc_feature: Phenotype: ROSETTE LEAVES Curled-Curled 5
  misc_feature: Phenotype: ROSETTE LEAVES Other
  misc_feature: Phenotype: WHOLE PLANT Size-Small
  misc_feature: Phenotype: WHOLE PLANT Size-Small
  misc_feature: Phenotype: CAULINE LEAVES Curled-Curled 5
  misc_feature: Phenotype: INFLORESCENCE Height-Short
  misc_feature: Phenotype: FERTILITY Fertility-Reduced
  misc_feature: Phenotype: FERTILITY Fertility-Reduced
  misc_feature: Phenotype: ROSETTE LEAVES Curled-Curled 5
  misc_feature: Phenotype: ROSETTE LEAVES Curled-Curled 5
  misc_feature: Phenotype: ROSETTE LEAVES Other
  misc_feature: Phenotype: WHOLE PLANT Size-Small
  misc_feature: Phenotype: WHOLE PLANT Size-Small
  misc_feature: Phenotype: CAULINE LEAVES Curled-Curled 5
  misc_feature: Phenotype: INFLORESCENCE Height-Short
  misc_feature: Phenotype: FERTILITY Fertility-Reduced
  misc_feature: Phenotype: FERTILITY Fertility-Reduced
  misc_feature: Phenotype: ROSETTE LEAVES Curled-Curled 5
  misc_feature: Phenotype: ROSETTE LEAVES Curled-Curled 5
  misc_feature: Phenotype: ROSETTE LEAVES Other
  misc_feature: Phenotype: WHOLE PLANT Size-Small
  misc_feature: Phenotype: WHOLE PLANT Size-Small
  misc_feature: Phenotype: CAULINE LEAVES Curled-Curled 5
  misc_feature: Phenotype: INFLORESCENCE Height-Short
  misc_feature: Phenotype: FERTILITY Fertility-Reduced
  misc_feature: Phenotype: FERTILITY Fertility-Reduced
  misc_feature: Phenotype: ROSETTE LEAVES Curled-Curled 5
  misc_feature: Phenotype: ROSETTE LEAVES Curled-Curled 5
  misc_feature: Phenotype: ROSETTE LEAVES Other
  misc_feature: Phenotype: WHOLE PLANT Size-Small
  misc_feature: Phenotype: WHOLE PLANT Size-Small
  misc_feature: Phenotype: CAULINE LEAVES Curled-Curled 5
  misc_feature: Phenotype: INFLORESCENCE Height-Short
  misc_feature: Phenotype: FERTILITY Fertility-Reduced
  misc_feature: Phenotype: FERTILITY Fertility-Reduced
  misc_feature: Phenotype: ROSETTE LEAVES Curled-Curled 5
  misc_feature: Phenotype: ROSETTE LEAVES Curled-Curled 5
  misc_feature: Phenotype: ROSETTE LEAVES Other
  misc_feature: Phenotype: WHOLE PLANT Size-Small
  misc_feature: Phenotype: WHOLE PLANT Size-Small
  misc_feature: Phenotype: CAULINE LEAVES Curled-Curled 5
  misc_feature: Phenotype: FLOWERS Other
  misc_feature: Phenotype: FLOWERS Other
  misc_feature: Phenotype: SILIQUES Other
  misc_feature: Phenotype: FERTILITY Fertility-Reduced
  misc_feature: Phenotype: FERTILITY Fertility-Reduced
  misc_feature: Phenotype: ROSETTE LEAVES Curled-Curled 5
  misc_feature: Phenotype: ROSETTE LEAVES Curled-Curled 5
  misc_feature: Phenotype: ROSETTE LEAVES Other
  misc_feature: Phenotype: WHOLE PLANT Size-Small
  misc_feature: Phenotype: WHOLE PLANT Size-Small
  misc_feature: Phenotype: CAULINE LEAVES Curled-Curled 5
  misc_feature: Phenotype: FLOWERS Other
  misc_feature: Phenotype: FLOWERS Other
  misc_feature: Phenotype: SILIQUES Other
  misc_feature: Phenotype: FERTILITY Fertility-Reduced
  misc_feature: Phenotype: FERTILITY Fertility-Reduced
  misc_feature: Phenotype: ROSETTE LEAVES Curled-Curled 3
  misc_feature: Phenotype: ROSETTE LEAVES Curled-Curled 5
  misc_feature: Phenotype: WHOLE PLANT Size-Small
  misc_feature: Phenotype: WHOLE PLANT Size-Small
  misc_feature: Phenotype: CAULINE LEAVES Curled-Curled 3
  misc_feature: Phenotype: FLOWERS Other
  misc_feature: Phenotype: FLOWERS Other
  misc_feature: Phenotype: INFLORESCENCE Flowering Time-Late Flowering
  misc_feature: Phenotype: INFLORESCENCE Height-Short
  misc_feature: Phenotype: FERTILITY Fertility-Reduced
  misc_feature: Phenotype: FERTILITY Fertility-Sterile
  misc_feature: Phenotype: ROSETTE LEAVES Curled-Curled 5
  misc_feature: Phenotype: ROSETTE LEAVES Curled-Curled 5
  misc_feature: Phenotype: ROSETTE LEAVES Other
  misc_feature: Phenotype: WHOLE PLANT Size-Small
  misc_feature: Phenotype: WHOLE PLANT Size-Small
  misc_feature: Phenotype: CAULINE LEAVES Curled-Curled 5
  misc_feature: Phenotype: FLOWERS Other
  misc_feature: Phenotype: FLOWERS Other
  misc_feature: Phenotype: SILIQUES Other
  misc_feature: Phenotype: FERTILITY Fertility-Reduced
  misc_feature: Phenotype: FERTILITY Fertility-Reduced
  misc_feature: Phenotype: ROSETTE LEAVES Curled-Curled 5
  misc_feature: Phenotype: ROSETTE LEAVES Curled-Curled 5
  misc_feature: Phenotype: ROSETTE LEAVES Other
  misc_feature: Phenotype: WHOLE PLANT Size-Small
  misc_feature: Phenotype: WHOLE PLANT Size-Small
  misc_feature: Phenotype: CAULINE LEAVES Curled-Curled 5
  misc_feature: Phenotype: FLOWERS Other
  misc_feature: Phenotype: FLOWERS Other
  misc_feature: Phenotype: SILIQUES Other
  misc_feature: Phenotype: FERTILITY Fertility-Reduced
  misc_feature: Phenotype: FERTILITY Fertility-Reduced
  misc_feature: Phenotype: ROSETTE LEAVES Curled-Curled 4
  misc_feature: Phenotype: ROSETTE LEAVES Curled-Curled 5
  misc_feature: Phenotype: ROSETTE LEAVES Other
  misc_feature: Phenotype: WHOLE PLANT Size-Small
  misc_feature: Phenotype: WHOLE PLANT Size-Small
  misc_feature: Phenotype: CAULINE LEAVES Curled-Curled 4
  misc_feature: Phenotype: FLOWERS Other
  misc_feature: Phenotype: FERTILITY Fertility-Reduced
  misc_feature: Phenotype: FERTILITY Fertility-Reduced
  misc_feature: Phenotype: ROSETTE LEAVES Curled-Curled 4
  misc_feature: Phenotype: ROSETTE LEAVES Curled-Curled 5
  misc_feature: Phenotype: ROSETTE LEAVES Other
  misc_feature: Phenotype: WHOLE PLANT Size-Small
  misc_feature: Phenotype: WHOLE PLANT Size-Small
  misc_feature: Phenotype: CAULINE LEAVES Curled-Curled 4
  misc_feature: Phenotype: FLOWERS Other
  misc_feature: Phenotype: FERTILITY Fertility-Reduced
  misc_feature: Phenotype: FERTILITY Fertility-Reduced
  misc_feature: Phenotype: ROSETTE LEAVES Curled-Curled 3
  misc_feature: Phenotype: ROSETTE LEAVES Curled-Curled 5
  misc_feature: Phenotype: ROSETTE LEAVES Shape-Oval
  misc_feature: Phenotype: ROSETTE LEAVES Other
  misc_feature: Phenotype: WHOLE PLANT Size-Small
  misc_feature: Phenotype: CAULINE LEAVES Curled-Curled 3
  misc_feature: Phenotype: FLOWERS Other
  misc_feature: Phenotype: FLOWERS Other
  misc_feature: Phenotype: INFLORESCENCE Flowering Time-Late Flowering
  misc_feature: Phenotype: INFLORESCENCE Height-Short
  misc_feature: Phenotype: FERTILITY Fertility-Reduced
  misc_feature: Phenotype: ROSETTE LEAVES Curled-Curled 5
  misc_feature: Phenotype: ROSETTE LEAVES Curled-Curled 4
  misc_feature: Phenotype: ROSETTE LEAVES Curled-Curled 4
  misc_feature: Phenotype: WHOLE PLANT Size-Small
  misc_feature: Phenotype: WHOLE PLANT Size-Small
  misc_feature: Phenotype: CAULINE LEAVES Curled-Curled 4
  misc_feature: Phenotype: SILIQUES Other
  misc_feature: Phenotype: ROSETTE LEAVES Curled-Curled 3
  misc_feature: Phenotype: ROSETTE LEAVES Curled-Curled 3
  misc_feature: Phenotype: ROSETTE LEAVES Other
  misc_feature: Phenotype: WHOLE PLANT Size-Small
  misc_feature: Phenotype: CAULINE LEAVES Curled-Curled 3
  misc_feature: Phenotype: SILIQUES Other
  misc_feature: Phenotype: FERTILITY Fertility-Reduced
  misc_feature: Phenotype: ROSETTE LEAVES Curled-Curled 5
  misc_feature: Phenotype: ROSETTE LEAVES Curled-Curled 5
  misc_feature: Phenotype: WHOLE PLANT Size-Small
  misc_feature: Phenotype: WHOLE PLANT Size-Small
  misc_feature: Phenotype: CAULINE LEAVES Curled-Curled 5
  misc_feature: Phenotype: INFLORESCENCE Flowering Time-Late Flowering
  misc_feature: Phenotype: FERTILITY Fertility-Reduced
  misc_feature: Phenotype: ROSETTE LEAVES Curled-Curled 5
  misc_feature: Phenotype: ROSETTE LEAVES Curled-Curled 5
  misc_feature: Phenotype: WHOLE PLANT Size-Small
  misc_feature: Phenotype: WHOLE PLANT Size-Small
  misc_feature: Phenotype: CAULINE LEAVES Curled-Curled 5
  misc_feature: Phenotype: INFLORESCENCE Flowering Time-Late Flowering
  misc_feature: Phenotype: FERTILITY Fertility-Reduced
  misc_feature: Phenotype: ROSETTE LEAVES Curled-Curled 3
  misc_feature: Phenotype: ROSETTE LEAVES Curled-Curled 3
  misc_feature: Phenotype: ROSETTE LEAVES Other
  misc_feature: Phenotype: WHOLE PLANT Size-Small
  misc_feature: Phenotype: CAULINE LEAVES Curled-Curled 3
  misc_feature: Phenotype: SILIQUES Other
  misc_feature: Phenotype: FERTILITY Fertility-Reduced
  misc_feature: Phenotype: ROSETTE LEAVES Curled-Curled 3
  misc_feature: Phenotype: ROSETTE LEAVES Curled-Curled 3
  misc_feature: Phenotype: ROSETTE LEAVES Other
  misc_feature: Phenotype: WHOLE PLANT Size-Small
  misc_feature: Phenotype: CAULINE LEAVES Curled-Curled 3
  misc_feature: Phenotype: SILIQUES Other
  misc_feature: Phenotype: FERTILITY Fertility-Reduced
  misc_feature: Phenotype: ROSETTE LEAVES Curled-Curled 3
  misc_feature: Phenotype: ROSETTE LEAVES Curled-Curled 5
  misc_feature: Phenotype: WHOLE PLANT Size-Small
  misc_feature: Phenotype: WHOLE PLANT Size-Small
  misc_feature: Phenotype: CAULINE LEAVES Curled-Curled 5
  misc_feature: Phenotype: INFLORESCENCE Flowering Time-Late Flowering
  misc_feature: Phenotype: FERTILITY Fertility-Reduced
  misc_feature: Phenotype: ROSETTE LEAVES Curled-Curled 3
  misc_feature: Phenotype: ROSETTE LEAVES Curled-Curled 3
  misc_feature: Phenotype: ROSETTE LEAVES Other
  misc_feature: Phenotype: WHOLE PLANT Size-Small
  misc_feature: Phenotype: CAULINE LEAVES Curled-Curled 3
  misc_feature: Phenotype: SILIQUES Other
  misc_feature: Phenotype: FERTILITY Fertility-Reduced
  misc_feature: Phenotype: ROSETTE LEAVES Curled-Curled 3
  misc_feature: Phenotype: ROSETTE LEAVES Curled-Curled 5
  misc_feature: Phenotype: WHOLE PLANT Size-Small
  misc_feature: Phenotype: WHOLE PLANT Size-Small
  misc_feature: Phenotype: CAULINE LEAVES Curled-Curled 5
  misc_feature: Phenotype: INFLORESCENCE Flowering Time-Late Flowering
  misc_feature: Phenotype: SILIQUES Other
  misc_feature: Phenotype: FERTILITY Fertility-Reduced
  misc_feature: Phenotype: ROSETTE LEAVES Curled-Curled 3
  misc_feature: Phenotype: ROSETTE LEAVES Curled-Curled 4
  misc_feature: Phenotype: WHOLE PLANT Size-Small
  misc_feature: Phenotype: WHOLE PLANT Size-Small
  misc_feature: Phenotype: CAULINE LEAVES Curled-Curled 4
  misc_feature: Phenotype: SILIQUES Other
  misc_feature: Phenotype: ROSETTE LEAVES Curled-Curled 5
  misc_feature: Phenotype: WHOLE PLANT Size-Small
  misc_feature: Phenotype: ROSETTE LEAVES Curled-Curled 5
  misc_feature: Phenotype: WHOLE PLANT Size-Small
  misc_feature: Phenotype: ROSETTE LEAVES Curled-Curled 5
  misc_feature: Phenotype: WHOLE PLANT Size-Small
  misc_feature: Phenotype: FERTILITY Fertility-Reduced
  misc_feature: Phenotype: ROSETTE LEAVES Curled-Curled 5
  misc_feature: Phenotype: WHOLE PLANT Size-Small
  misc_feature: Phenotype: ROSETTE LEAVES Curled-Curled 5
  misc_feature: Phenotype: WHOLE PLANT Size-Small
  misc_feature: Phenotype: ROSETTE LEAVES Curled-Curled 5
  misc_feature: Phenotype: WHOLE PLANT Size-Small
  misc_feature: Phenotype: FERTILITY Fertility-Reduced
gtttttgggattctcaaaaaactcaaaataaactttcctcattttttttttctttcttttgttttgttttctttataaaggagaaagaaagagaaagagagtttccgaaagctgaattgagttgggtgaagcaaattctcaggatgggaagaggaaagatagaaataaagaggatagagaactcaacaaatcgacaagtgacgttttgcaaaagaagaaatggacttctgaagaaagcctatgagctttcggtcctttgcgatgcagaagttgcgctcattgttttctccactcgtggccgtctctatgaatacgccaataacaacataagatcaaccattgagaggtacaagaaagcttgttctgatagcaccaacactagcactgtccaagaaatcaatgccgcgtactatcaacaagaatctgctaagctgagacaacagatccaaacgattcaaaactccaacaggaatctgatgggagactctttgagttccttaagtgtcaaggaactaaaacaagttgagaatcgccttgagaaagctatctctaggatcaggtccaagaagcatgagttgcttctagttgaaatcgaaaacgcgcagaaaagggagattgagcttgacaatgagaacatctatctaagaactaaggtagcagaagtggagaggtatcaacaacaccatcatcaaatggttagtggttcagagattaacgcaattgaagctttagcctcacgcaattactttgctcatagcattatgactgctggttctggatctggtaatggaggttcttactctgatcccgacaagaaaattcttcatctcggataatctcgtctgcgaaaaaccgagctgcaataactctctgcatgcatctggggattctttgctcagatttatctctacataaaatatgttttggtgcaaaataattcaaagtacaatgaaggtattggtccttcaagactcattgcaatttgtgttgtgtaatgattaagacatactctagtttttattgcttcgtatcatagtatctattctatggtatctcc

SEQ ID NO: 97560 - protein, 277 aa, Arabidopsis thaliana
  peptide (1)..(277): Ceres Seq. ID no. 12738855
  misc_feature (121)..(220): Pfam Name: K-box region Pfam Description: K-box region
  misc_feature (48)..(277): Homolog of NCBI NO: 15234874 NR Description: MADS-box protein; protein id: At4g09960.1, by cDNA: 32791., supported by cDNA: gi_862639 [Arabidopsis
  misc_feature (48)..(277): Homolog of NCBI NO: 30681253 NR Description: MADS-box protein [Arabidopsis thaliana]
  misc_feature (48)..(277): Homolog of NCBI NO: 23194453 NR Description: MADS box protein GHMADS-2 [Gossypium hirsutum]
  misc_feature (48)..(277): Homolog of NCBI NO: 4103342 NR Description: agamous-like putative transcription factor
  misc_feature (48)..(277): Homolog of NCBI NO: 20385590 NR Description: MADS-box protein 5 [Vitis vinifera]
  misc_feature (48)..(277): Homolog of NCBI NO: 7446521 NR Description: MADS-box protein - cucumber
  misc_feature (48)..(277): Homolog of NCBI NO: 27763670 NR Description: mads-box transcription factor [Momordica
  misc_feature (48)..(277): Homolog of NCBI NO: 29467048 NR Description: MADS-box transcription factor AG [Agapanthus
  misc_feature (48)..(276): Homolog of NCBI NO: 1568513 NR Description: fbp11 [Petunia x hybrida]
  misc_feature (48)..(277): Homolog of NCBI NO: 21955182 NR Description: transcription factor MADS1 [Hyacinthus orientalis]
FWDSQKTQNKLSSFFFSFFCFVFFIKEKEREREFPKAELSWVKQILRMGRGKIEIKRIENSTNRQVTFCKRRNGLLKKAYELSVLCDAEVALIVFSTRGRLYEYANNNIRSTIERYKKACSDSTNTSTVQEINAAYYQQESAKLRQQIQTIQNSNRNLMGDSLSSLSVKELKQVENRLEKAISRIRSKKHELLLVEIENAQKREIELDNENIYLRTKVAEVERYQQHHHQMVSGSEINAIEALASRNYFAHSIMTAGSGSGNGGSYSDPDKKILHLG

SEQ ID NO: 97561 - protein, 230 aa, Arabidopsis thaliana; identical to SEQ ID NO: 44274
  peptide (1)..(230): Ceres Seq. ID no. 12738856
  misc_feature (74)..(173): Pfam Name: K-box region Pfam Description: K-box region
  misc_feature (1)..(230): Homolog of NCBI NO: 15234874 NR Description: MADS-box protein; protein id: At4g09960.1, by cDNA: 32791., supported by cDNA: gi_862639 [Arabidopsis
  misc_feature (1)..(230): Homolog of NCBI NO: 30681253 NR Description: MADS-box protein [Arabidopsis thaliana]
  misc_feature (1)..(230): Homolog of NCBI NO: 23194453 NR Description: MADS box protein GHMADS-2 [Gossypium hirsutum]
  misc_feature (1)..(230): Homolog of NCBI NO: 4103342 NR Description: agamous-like putative transcription factor
  misc_feature (1)..(230): Homolog of NCBI NO: 20385590 NR Description: MADS-box protein 5 [Vitis vinifera]
  misc_feature (1)..(230): Homolog of NCBI NO: 7446521 NR Description: MADS-box protein - cucumber
  misc_feature (1)..(230): Homolog of NCBI NO: 27763670 NR Description: mads-box transcription factor [Momordica
  misc_feature (1)..(230): Homolog of NCBI NO: 29467048 NR Description: MADS-box transcription factor AG [Agapanthus
  misc_feature (1)..(229): Homolog of NCBI NO: 1568513 NR Description: fbp11 [Petunia x hybrida]
  misc_feature (1)..(230): Homolog of NCBI NO: 21955182 NR Description: transcription factor MADS1 [Hyacinthus orientalis]

SEQ ID NO: 97562 - DNA, 1424 bp, Arabidopsis thaliana
  misc_feature (1)..(1424): Ceres Seq. ID no. 12738861
  misc_feature: MA Experiment ID: 108489 Result: Down-regulated in Transcription
  misc_feature: MA Experiment ID: 108573 Result: Down-regulated in Transcription
  misc_feature: MA Experiment 108573 PARAMETER Experiment Name: At_Drought_cDNA_P Parameter: Timepoint (hr) Value: 6
  misc_feature: MA Experiment 108573 PARAMETER Experiment Name: At_Drought_cDNA_P Parameter: Tissue Value: Aerial
  misc_feature: MA Experiment 108573 PARAMETER Experiment Name: At_Drought_cDNA_P Parameter: Treatment Value: Drought vs. No Drought
  misc_feature: MA Experiment ID: 108595 Result: Down-regulated in Transcription
  misc_feature: MA Experiment 108595 PARAMETER Experiment Name: At_Ler-pi_Ovule_cDNA_P Parameter: Plant Line Value: null
  misc_feature: MA Experiment ID: 108668 Result: Up-regulated in Transcription
  misc_feature: MA Experiment 108668 PARAMETER Experiment Name: At_2mM_SA_cDNA_P Parameter: Plant Line Value: WS
  misc_feature: MA Experiment 108668 PARAMETER Experiment Name: At_2mM_SA_cDNA_P Parameter: Timepoint (hr) Value: 6
  misc_feature: MA Experiment 108668 PARAMETER Experiment Name: At_2mM_SA_cDNA_P Parameter: Treatment Value: 2mM SA vs. No Treatment
  misc_feature: MA Experiment ID: 20000090 Result: Up-regulated in Transcription
  misc_feature: MA Experiment ID: 20000111 Result: Down-regulated in Transcription
  misc_feature: MA Experiment 20000111 PARAMETER Experiment Name: At_42deg_Heat_cDNA_P Parameter: Temperature (deg C) Value: 42 vs. 22
  misc_feature: MA Experiment 20000111 PARAMETER Experiment Name: At_42deg_Heat_cDNA_P Parameter: Timepoint (hr) Value: 6
  misc_feature: MA Experiment 20000111 PARAMETER Experiment Name: At_42deg_Heat_cDNA_P Parameter: Tissue Value: Aerial
  misc_feature: MA Experiment ID: 20000113 Result: Down-regulated in Transcription
  misc_feature: MA Experiment 20000113 PARAMETER Experiment Name: At_42deg_Heat_cDNA_P Parameter: Temperature (deg C) Value: 42 vs. 22
  misc_feature: MA Experiment 20000113 PARAMETER Experiment Name: At_42deg_Heat_cDNA_P Parameter: Timepoint (hr) Value: 8
  misc_feature: MA Experiment 20000113 PARAMETER Experiment Name: At_42deg_Heat_cDNA_P Parameter: Tissue Value: Aerial
  misc_feature: MA Experiment ID: 20000173 Result: Down-regulated in Transcription
  misc_feature: MA Experiment 20000173 PARAMETER Experiment Name: At_42deg_Heat_P Parameter: Age (day) Value: 14
  misc_feature: MA Experiment 20000173 PARAMETER Experiment Name: At_42deg_Heat_P Parameter: Organism Value: A. thaliana
  misc_feature: MA Experiment 20000173 PARAMETER Experiment Name: At_42deg_Heat_P Parameter: Plant Line Value: WS
  misc_feature: MA Experiment 20000173 PARAMETER Experiment Name: At_42deg_Heat_P Parameter: Temperature (deg C) Value: 42 vs. 22
  misc_feature: MA Experiment 20000173 PARAMETER Experiment Name: At_42deg_Heat_P Parameter: Timepoint (hr) Value: 6
  misc_feature: MA Experiment 20000173 PARAMETER Experiment Name: At_42deg_Heat_P Parameter: Tissue Value: Aerial
  misc_feature: MA Experiment ID: 20000182 Result: Up-regulated in Transcription
  misc_feature: MA Experiment 20000182 PARAMETER Experiment Name: At_2mM_SA_P Parameter: Age (day) Value: 14
  misc_feature: MA Experiment 20000182 PARAMETER Experiment Name: At_2mM_SA_P Parameter: Organism Value: A. thaliana
  misc_feature: MA Experiment 20000182 PARAMETER Experiment Name: At_2mM_SA_P Parameter: Plant Line Value: WS
  misc_feature: MA Experiment 20000182 PARAMETER Experiment Name: At_2mM_SA_P Parameter: Timepoint (hr) Value: 6
  misc_feature: MA Experiment 20000182 PARAMETER Experiment Name: At_2mM_SA_P Parameter: Tissue Value: Aerial
  misc_feature: MA Experiment 20000182 PARAMETER Experiment Name: At_2mM_SA_P Parameter: Treatment Value: 2mM SA vs. No Treatment
  misc_feature: MA Experiment ID: 20000184 Result: Down-regulated in Transcription
  misc_feature: MA Experiment 20000184 PARAMETER Experiment Name: At_Shoots__P Parameter: Age (day) Value: 7
  misc_feature: MA Experiment 20000184 PARAMETER Experiment Name: At_Shoots__P Parameter: Tissue Value: Shoots vs. Whole Plant
  misc_feature: MA Experiment ID: 20000185 Result: Down-regulated in Transcription
  misc_feature: MA Experiment 20000185 PARAMETER Experiment Name: At_Roots__P Parameter: Age (day) Value: 7 vs. 21
  misc_feature: MA Experiment 20000185 PARAMETER Experiment Name: At_Roots__P Parameter: Organism Value: A. thaliana
  misc_feature: MA Experiment 20000185 PARAMETER Experiment Name: At_Roots__P Parameter: Tissue Value: Roots vs. Whole Plant
  misc_feature: MA Experiment ID: 20000227 Result: Up-regulated in Transcription
  misc_feature: MA Experiment 20000227 PARAMETER Experiment Name: At_Root-Tips-vs-Tops_P Parameter: Tissue Value: Root Tips vs. Root Tops
  misc_feature: MA Experiment ID: 20000234 Result: Down-regulated in Transcription
  misc_feature: MA Experiment 20000234 PARAMETER Experiment Name: At_Siliques_P Parameter: Age (day) Value: 21
  misc_feature: MA Experiment 20000234 PARAMETER Experiment Name: At_Siliques_P Parameter: Organism Value: A. thaliana
  misc_feature: MA Experiment 20000234 PARAMETER Experiment Name: At_Siliques_P Parameter: Plant Line Value: WS
  misc_feature: MA Experiment 20000234 PARAMETER Experiment Name: At_Siliques_P Parameter: Tissue Value: Less Than 5mm Siliques vs. Whole Plant
  misc_feature: MA Experiment ID: 20000264 Result: Down-regulated in Transcription
  misc_feature: MA Experiment 20000264 PARAMETER Experiment Name: At_Open_Flower_P Parameter: Age (day) Value: 21
  misc_feature: MA Experiment 20000264 PARAMETER Experiment Name: At_Open_Flower_P Parameter: Plant Line Value: WS
  misc_feature: MA Experiment 20000264 PARAMETER Experiment Name: At_Open_Flower_P Parameter: Tissue Value: Open Flower vs. Whole Plant
  misc_feature: MA Experiment ID: 20000265 Result: Down-regulated in Transcription
  misc_feature: MA Experiment 20000265 PARAMETER Experiment Name: At_Open_Flower_P Parameter: Age (day) Value: 21
  misc_feature: MA Experiment 20000265 PARAMETER Experiment Name: At_Open_Flower_P Parameter: Plant Line Value: WS
  misc_feature: MA Experiment 20000265 PARAMETER Experiment Name: At_Open_Flower_P Parameter: Tissue Value: Closed Flower vs. Whole Plant
  misc_feature: MA Experiment ID: 20000286 Result: Down-regulated in Transcription
  misc_feature: MA Experiment 20000286 PARAMETER Experiment Name: At_Open_Flower_P Parameter: Age (day) Value: 21
  misc_feature: MA Experiment 20000286 PARAMETER Experiment Name: At_Open_Flower_P Parameter: Plant Line Value: WS
  misc_feature: MA Experiment 20000286 PARAMETER Experiment Name: At_Open_Flower_P Parameter: Tissue Value: Half Open vs. Whole Plant
  misc_feature: MA Experiment ID: 20000438 Result: Down-regulated in Transcription
  misc_feature: MA Experiment 20000438 PARAMETER Experiment Name: At_Shoots__P Parameter: Age (day) Value: 14
  misc_feature: MA Experiment 20000438 PARAMETER Experiment Name: At_Shoots__P Parameter: Tissue Value: Shoots vs. Whole Plant
  misc_feature: MA Experiment ID: 20000439 Result: Down-regulated in Transcription
  misc_feature: MA Experiment 20000439 PARAMETER Experiment Name: At_Roots__P Parameter: Age (day) Value: 14 vs. 21
  misc_feature: MA Experiment 20000439 PARAMETER Experiment Name: At_Roots__P Parameter: Organism Value: A. thaliana
  misc_feature: MA Experiment 20000439 PARAMETER Experiment Name: At_Roots__P Parameter: Tissue Value: Roots vs. Whole Plant
  misc_feature: MA Experiment ID: 20000527 Result: Down-regulated in Transcription
  misc_feature: MA Experiment 20000527 PARAMETER Experiment Name: At_10percent_PEG_P Parameter: Age (day) Value: 20
  misc_feature: MA Experiment 20000527 PARAMETER Experiment Name: At_10percent_PEG_P Parameter: Organism Value: A. thaliana
  misc_feature: MA Experiment 20000527 PARAMETER Experiment Name: At_10percent_PEG_P Parameter: Plant Line Value: WS
  misc_feature: MA Experiment 20000527 PARAMETER Experiment Name: At_10percent_PEG_P Parameter: Timepoint (day) Value: 20
  misc_feature: MA Experiment 20000527 PARAMETER Experiment Name: At_10percent_PEG_P Parameter: Tissue Value: Whole Plant
  misc_feature: MA Experiment 20000527 PARAMETER Experiment Name: At_10percent_PEG_P Parameter: Treatment Value: 10percent PEG vs. No Treatment
  misc_feature: MA Experiment ID: 20001555 Result: Down-regulated in Transcription
  misc_feature: MA Experiment 20001555 PARAMETER Experiment Name: At_Drought_Soil_Dry_P Parameter: Age (day) Value: 24
  misc_feature: MA Experiment 20001555 PARAMETER Experiment Name: At_Drought_Soil_Dry_P Parameter: Organism Value: A. thaliana
  misc_feature: MA Experiment 20001555 PARAMETER Experiment Name: At_Drought_Soil_Dry_P Parameter: Plant Line Value: WS
  misc_feature: MA Experiment 20001555 PARAMETER Experiment Name: At_Drought_Soil_Dry_P Parameter: Post Timepoint (hr) Value: None
  misc_feature: MA Experiment 20001555 PARAMETER Experiment Name: At_Drought_Soil_Dry_P Parameter: Post-Treatment Value: None
  misc_feature: MA Experiment 20001555 PARAMETER Experiment Name: At_Drought_Soil_Dry_P Parameter: Timepoint (day) Value: 10
  misc_feature: MA Experiment 20001555 PARAMETER Experiment Name: At_Drought_Soil_Dry_P Parameter: Treatment Value: Drought vs. No Drought
  misc_feature: MA Experiment ID: 20001556 Result: Down-regulated in Transcription
  misc_feature: MA Experiment 20001556 PARAMETER Experiment Name: At_Drought_Soil_Dry_P Parameter: Age (day) Value: 26
  misc_feature: MA Experiment 20001556 PARAMETER Experiment Name: At_Drought_Soil_Dry_P Parameter: Organism Value: A. thaliana
  misc_feature: MA Experiment 20001556 PARAMETER Experiment Name: At_Drought_Soil_Dry_P Parameter: Plant Line Value: WS
  misc_feature: MA Experiment 20001556 PARAMETER Experiment Name: At_Drought_Soil_Dry_P Parameter: Post Timepoint (hr) Value: None
  misc_feature: MA Experiment 20001556 PARAMETER Experiment Name: At_Drought_Soil_Dry_P Parameter: Post-Treatment Value: None
  misc_feature: MA Experiment 20001556 PARAMETER Experiment Name: At_Drought_Soil_Dry_P Parameter: Timepoint (day) Value: 12
  misc_feature: MA Experiment 20001556 PARAMETER Experiment Name: At_Drought_Soil_Dry_P Parameter: Treatment Value: Drought vs. No Drought
  misc_feature: MA Experiment ID: 20001557 Result: Down-regulated in Transcription
  misc_feature: MA Experiment 20001557 PARAMETER Experiment Name: At_Drought_Soil_Dry_P Parameter: Age (day) Value: 27
  misc_feature: MA Experiment 20001557 PARAMETER Experiment Name: At_Drought_Soil_Dry_P Parameter: Organism Value: A. thaliana
  misc_feature: MA Experiment 20001557 PARAMETER Experiment Name: At_Drought_Soil_Dry_P Parameter: Plant Line Value: WS
  misc_feature: MA Experiment 20001557 PARAMETER Experiment Name: At_Drought_Soil_Dry_P Parameter: Post Timepoint (hr) Value: 3
  misc_feature: MA Experiment 20001557 PARAMETER Experiment Name: At_Drought_Soil_Dry_P Parameter: Post-Treatment Value: Re-Water vs. No Drought
  misc_feature: MA Experiment 20001557 PARAMETER Experiment Name: At_Drought_Soil_Dry_P Parameter: Timepoint (day) Value: 13
  misc_feature: MA Experiment 20001557 PARAMETER Experiment Name: At_Drought_Soil_Dry_P Parameter: Treatment Value: Drought vs. No Drought
  misc_feature: MA Experiment ID: 20001558 Result: Down-regulated in Transcription
  misc_feature: MA Experiment 20001558 PARAMETER Experiment Name: At_Drought_Soil_Dry_P Parameter: Age (day) Value: 27
  misc_feature: MA Experiment 20001558 PARAMETER Experiment Name: At_Drought_Soil_Dry_P Parameter: Organism Value: A. thaliana
  misc_feature: MA Experiment 20001558 PARAMETER Experiment Name: At_Drought_Soil_Dry_P Parameter: Plant Line Value: WS
  misc_feature: MA Experiment 20001558 PARAMETER Experiment Name: At_Drought_Soil_Dry_P Parameter: Post Timepoint (hr) Value: 6
  misc_feature: MA Experiment 20001558 PARAMETER Experiment Name: At_Drought_Soil_Dry_P Parameter: Post-Treatment Value: Re-Water vs. No Drought
  misc_feature: MA Experiment 20001558 PARAMETER Experiment Name: At_Drought_Soil_Dry_P Parameter: Timepoint (day) Value: 13
  misc_feature: MA Experiment 20001558 PARAMETER Experiment Name: At_Drought_Soil_Dry_P Parameter: Treatment Value: Drought vs. No Drought
ccacgcgtccgaattctgaaaaatgggattacctcaaaataagctcagttttttctgcttcttcttcctcgtctctgtactaactcttgccccattggctttctccgagatcttcttagaggagcatttcgaaggtggatggaaaagtaggtgggtcttgtctgattggaaaagaaacgaaggcaaagctggaacctttaagcacactgccggtaaatggcccggcgatcctgacaataaaggtattcagacttataatgatgccaagcattatgcgatttctgcaaagattcctgagtttagcaacaaaaaccggactcttgttgtccagtactcagtcaagattgaacaagacattgaatgtggtggtgcttacattaagctcctgtctggctatgttaaccagaagcagtttggtggtgatactccatacagtctaatgtttggaccagatatatgcggaacacagacgaagaagcttcatgttatagtttcatatcagggacagaattatccaatcaaaaaggatttgcaatgtgaaacagacaaattaaatcatttctacacatttattctgcgtcctgacgcttcttacagcgttctggtggataataaagagagagaatttggcagtatgtacacagactgggacatccttcctccaaggaagatcaaggtcaagaatgcaaagaagccagaggactgggatgatagagagtacatcgatgaccccaacgatgtcaaacccgagggttttgattctattccacgtgaaattccagatcgtaaagctaaagagcccgaggactgggacgaggaagaaaatggtttgtgggaacctccaaagatcccaaattttgcgtacaaaggtccttggaaagcaaagagaatcaagaacccgaactacaagggaaaatggaagaacccatggatagataatccagaatttgaagatgatccagatctttacgttctgaagtctatcaaatatgcaggcattgaagtatggcaggtgaaggctggctcaatctttgacaatatattgatctgcgatgacccggcatatgcaagaagcatcgtggatgactattttgcccaacacagggagtctgagaaggagttatttgcggaagcagagaaagaaagaaaagctagagaagatgaggaagctcggatagcacgggaagaaggtgaacgcaggcggaaagaaagggaccaccggtatggagacaggaggaggcgttacaaacggccgaatccacgtgattatatggatgattaccatgacgagctatgaggcgcagagtggtgggcatttggcaaagcattgggggaaattatctatattttgctttgaatgtgtgtttgtaatttcataatttgtaaccttttgtattcatattcttataatgtattttggcatg

SEQ ID NO: 97563 - protein, 424 aa, Arabidopsis thaliana
  peptide (1)..(424): Ceres Seq. ID no. 12738862
  misc_feature (30)..(342): Pfam Name: Calreticulin family Pfam Description: Calreticulin family
  misc_feature (1)..(424): Homolog of NCBI NO: 12643531 NR Description: Calreticulin 3 precursor
  misc_feature (1)..(424): Homolog of NCBI NO: 18390896 NR Description: calreticulin, putative; protein id: At1g08450.1, by cDNA: gi_15810562, supported by cDNA: gi_2052382 [Arabidopsis >gi|15810563|gb|AAL07169.1| putative calreticulin protein
  misc_feature (1)..(424): Homolog of NCBI NO: 27311777 NR Description: calreticulin, putative [Arabidopsis thaliana]
  misc_feature (74)..(288): Homolog of NCBI NO: 6664320 NR Description: T27G7.13 [Arabidopsis thaliana]
  misc_feature (1)..(74): Homolog of NCBI NO: 6664320 NR Description: T27G7.13 [Arabidopsis thaliana]
  misc_feature (381)..(421): Homolog of NCBI NO: 6664320 NR Description: T27G7.13 [Arabidopsis thaliana]
  misc_feature (356)..(381): Homolog of NCBI NO: 6664320 NR Description: T27G7.13 [Arabidopsis thaliana]
  misc_feature (15)..(423): Homolog of NCBI NO: 9858814 NR Description: calreticulin [Pinus taeda]
  misc_feature (13)..(424): Homolog of NCBI NO: 11131631 NR Description: Calreticulin precursor >gi|7441494|pir||T14554
  misc_feature (19)..(424): Homolog of NCBI NO: 11131745 NR Description: Calreticulin precursor >gi|7441496|pir||T10172
MGLPQNKLSFFCFFFLVSVLTLAPLAFSEIFLEEHFEGGWKSRWVLSDWKRNEGKAGTFKHTAGKWPGDPDNKGIQTYNDAKHYAISAKIPEFSNKNRTLVVQYSVKIEQDIECGGAYIKLLSGYVNQKQFGGDTPYSLMFGPDICGTQTKKLHVIVSYQGQNYPIKKDLQCETDKLNHFYTFILRPDASYSVLVDNKEREFGSMYTDWDILPPRKIKVKNAKKPEDWDDREYIDDPNDVKPEGFDSIPREIPDRKAKEPEDWDEEENGLWEPPKIPNFAYKGPWKAKRIKNPNYKGKWKNPWIDNPEFEDDPDLYVLKSIKYAGIEVWQVKAGSIFDNILICDDPAYARSIVDDYFAQHRESEKELFAEAEKERKAREDEEARIAREEGERRRKERDHRYGDRRRRYKRPNPRDYMDDYHDEL

SEQ ID NO: 97564 - protein, 285 aa, Arabidopsis thaliana
  peptide (1)..(285): Ceres Seq. ID no. 12738863
  misc_feature (1)..(203): Pfam Name: Calreticulin family Pfam Description: Calreticulin family
  misc_feature (1)..(285): Homolog of NCBI NO: 12643531 NR Description: Calreticulin 3 precursor
  misc_feature (1)..(285): Homolog of NCBI NO: 18390896 NR Description: calreticulin, putative; protein id: At1g08450.1, by cDNA: gi_15810562, supported by cDNA: gi_2052382 [Arabidopsis >gi|15810563|gb|AAL07169.1| putative calreticulin protein
  misc_feature (1)..(285): Homolog of NCBI NO: 27311777 NR Description: calreticulin, putative [Arabidopsis thaliana]
  misc_feature (1)..(149): Homolog of NCBI NO: 6664320 NR Description: T27G7.13 [Arabidopsis thaliana]
  misc_feature (242)..(282): Homolog of NCBI NO: 6664320 NR Description: T27G7.13 [Arabidopsis thaliana]
  misc_feature (217)..(242): Homolog of NCBI NO: 6664320 NR Description: T27G7.13 [Arabidopsis thaliana]
  misc_feature (1)..(284): Homolog of NCBI NO: 9858814 NR Description: calreticulin [Pinus taeda]
  misc_feature (1)..(285): Homolog of NCBI NO: 11131631 NR Description: Calreticulin precursor >gi|7441494|pir||T14554
  misc_feature (1)..(285): Homolog of NCBI NO: 11131745 NR Description: Calreticulin precursor >gi|7441496|pir||T10172
  misc_feature (1)..(285): Homolog of NCBI NO: 11131769 NR Description: Calreticulin precursor >gi|7441495|pir||T16968
MFGPDICGTQTKKLHVIVSYQGQNYPIKKDLQCETDKLNHFYTFILRPDASYSVLVDNKEREFGSMYTDWDILPPRKIKVKNAKKPEDWDDREYIDDPNDVKPEGFDSIPREIPDRKAKEPEDWDEEENGLWEPPKIPNFAYKGPWKAKRIKNPNYKGKWKNPWIDNPEFEDDPDLYVLKSIKYAGIEVWQVKAGSIFDNILICDDPAYARSIVDDYFAQHRESEKELFAEAEKERKAREDEEARIAREEGERRRKERDHRYGDRRRRYKRPNPRDYMDDYHDEL

SEQ ID NO: 97565 - protein, 220 aa, Arabidopsis thaliana
  peptide (1)..(220): Ceres Seq. ID no. 12738864
  misc_feature (1)..(138): Pfam Name: Calreticulin family Pfam Description: Calreticulin family
  misc_feature (1)..(220): Homolog of NCBI NO: 12643531 NR Description: Calreticulin 3 precursor
  misc_feature (1)..(220): Homolog of NCBI NO: 18390896 NR Description: calreticulin, putative; protein id: At1g08450.1, by cDNA: gi_15810562, supported by cDNA: gi_2052382 [Arabidopsis >gi|15810563|gb|AAL07169.1| putative calreticulin protein
  misc_feature (1)..(220): Homolog of NCBI NO: 27311777 NR Description: calreticulin, putative [Arabidopsis thaliana]
  misc_feature (1)..(84): Homolog of NCBI NO: 6664320 NR Description: T27G7.13 [Arabidopsis thaliana]
  misc_feature (177)..(217): Homolog of NCBI NO: 6664320 NR Description: T27G7.13 [Arabidopsis thaliana]
  misc_feature (152)..(177): Homolog of NCBI NO: 6664320 NR Description: T27G7.13 [Arabidopsis thaliana]
  misc_feature (1)..(219): Homolog of NCBI NO: 9858814 NR Description: calreticulin [Pinus taeda]
  misc_feature (1)..(220): Homolog of NCBI NO: 11131631 NR Description: Calreticulin precursor >gi|7441494|pir||T14554
  misc_feature (1)..(220): Homolog of NCBI NO: 11131745 NR Description: Calreticulin precursor >gi|7441496|pir||T10172
  misc_feature (1)..(220): Homolog of NCBI NO: 11131769 NR Description: Calreticulin precursor >gi|7441495|pir||T16968
MYTDWDILPPRKIKVKNAKKPEDWDDREYIDDPNDVKPEGFDSIPREIPDRKAKEPEDWDEEENGLWEPPKIPNFAYKGPWKAKRIKNPNYKGKWKNPWIDNPEFEDDPDLYVLKSIKYAGIEVWQVKAGSIFDNILICDDPAYARSIVDDYFAQHRESEKELFAEAEKERKAREDEEARIAREEGERRRKERDHRYGDRRRRYKRPNPRDYMDDYHDEL

SEQ ID NO: 97566 - DNA, 1504 bp, Arabidopsis thaliana
  misc_feature (1)..(1504): Ceres Seq. ID no. 12738900
  misc_feature: MA Experiment ID: 108569 Result: Up-regulated in Transcription
  misc_feature: MA Experiment 108569 PARAMETER Experiment Name: At_0.001%_MeJA__cDNA_P Parameter: Timepoint (hr) Value: 6
  misc_feature: MA Experiment 108569 PARAMETER Experiment Name: At_0.001%_MeJA__cDNA_P Parameter: Tissue Value: Aerial
  misc_feature: MA Experiment 108569 PARAMETER Experiment Name: At_0.001%_MeJA__cDNA_P Parameter: Treatment Value: 0.001% MeJA vs. No Treatment
  misc_feature: MA Experiment ID: 108573 Result: Up-regulated in Transcription
  misc_feature: MA Experiment 108573 PARAMETER Experiment Name: At_Drought_cDNA_P Parameter: Timepoint (hr) Value: 6
  misc_feature: MA Experiment 108573 PARAMETER Experiment Name: At_Drought_cDNA_P Parameter: Tissue Value: Aerial
  misc_feature: MA Experiment 108573 PARAMETER Experiment Name: At_Drought_cDNA_P Parameter: Treatment Value: Drought vs. No Drought
  misc_feature: MA Experiment ID: 108577 Result: Down-regulated in Transcription
  misc_feature: MA Experiment 108577 PARAMETER Experiment Name: At_42deg_Heat_cDNA_P Parameter: Temperature (deg C) Value: 42 vs. 22
  misc_feature: MA Experiment 108577 PARAMETER Experiment Name: At_42deg_Heat_cDNA_P Parameter: Timepoint (hr) Value: 6
  misc_feature: MA Experiment 108577 PARAMETER Experiment Name: At_42deg_Heat_cDNA_P Parameter: Tissue Value: Aerial
  misc_feature: MA Experiment ID: 20000113 Result: Down-regulated in Transcription
  misc_feature: MA Experiment 20000113 PARAMETER Experiment Name: At_42deg_Heat_cDNA_P Parameter: Temperature (deg C) Value: 42 vs. 22
  misc_feature: MA Experiment 20000113 PARAMETER Experiment Name: At_42deg_Heat_cDNA_P Parameter: Timepoint (hr) Value: 8
  misc_feature: MA Experiment 20000113 PARAMETER Experiment Name: At_42deg_Heat_cDNA_P Parameter: Tissue Value: Aerial
  misc_feature: MA Experiment ID: 20000224 Result: Down-regulated in Transcription
  misc_feature: MA Experiment ID: 20000437 Result: Up-regulated in Transcription
  misc_feature: MA Experiment 20000437 PARAMETER Experiment Name: At_Drought_P Parameter: Age (day) Value: 8
  misc_feature: MA Experiment 20000437 PARAMETER Experiment Name: At_Drought_P Parameter: Organism Value: A. thaliana
  misc_feature: MA Experiment 20000437 PARAMETER Experiment Name: At_Drought_P Parameter: Plant Line Value: WS
  misc_feature: MA Experiment 20000437 PARAMETER Experiment Name: At_Drought_P Parameter: Timepoint (hr) Value: 24
  misc_feature: MA Experiment 20000437 PARAMETER Experiment Name: At_Drought_P Parameter: Tissue Value: Whole Plant
  misc_feature: MA Experiment 20000437 PARAMETER Experiment Name: At_Drought_P Parameter: Treatment Value: Drought vs. No Drought
ggcacgagctcgattctgtatgatctcttcgatctaatcgagtcttctaaacgttccgtgtagaatttcaaatctagggtttgctaaagcttgaacttttcttacccttttctctcgaagaggttttgattcctgggcatgaatttttccctaatcttgttaccttcgaagcataacaacaacgaaagatgtcagattcaatccaggaaagatacttagttggatacgcactcgcagccaagaaacagcatagtttcatccaaccttctttgatcgaacactcaaggcaacgaggcattgatctggtcaagcttgatccgacgaaatcgttgttggagcaagggaagcttgattgcataatccacaagctttacgatgtgtattggaaggagaatcttcatgagtttcgcgagaaatgtcctggtgttcctgtaatcgatttgcctgaggctatcgagcgattgcacaatagggtttcgatgcttgaggtgataactcaattgaggtttcctgtttcagatagcgagagatttggtgtcccggagcaagttgttgttatggattcgagcgtcttgagcggtggaggagctttaggggagcttaagtttccggtgattgctaagccgttggatgctgatgggagtgctaaatctcataagatgtttttgatttatgatcaagaagggatgaagattttgaaagctcctattgtgttgcaggagtttgtgaatcatggtggtgtgatctttaaggtctatgtggttggagatcatgtcaaatgtgtaaagagaagatctttacctgatatctctgaagagaagattgggacgtcgaaagggtctcttccgttttcgcagatatcgaatctgactgctcaagaggacaagaacattgagtatggtgaggataggagcttagagaaagtggaaatgcctccgttaagtttcttgacagatctagcaaaggccatgagggaatcaatgggactcaatctctttaacttcgacgtgattagggatgccaaagatgctaataggtaccttataattgatattaactactttcctggatatgctaagatgccctcttacgagcctgtgttgactgagttcttctgggacatggtcactaagaagaatcatgtctgagaaataatctgttggggagttagcaggaacattgttggggaggatttgtaccattgcaatgtgttgcaactgccattgcaattctggcctatggtgactagctgctttgctaattttcatttggattcttgaacttgtgctttttatatttttttagttgtttctcttttgtttacttccgagttttgcaaagccatgttcaaatgcataactgttgctactcttgaaaagcattgaatctctaaattcttggcaaaaaaaaaaaaaaaaaaaaaaaaaaaaaaaaaaaaaaaactcgagggggggcccggtacccaattcgccctatagtgagtcgtattacaattcactggccg

SEQ ID NO: 97567 - protein, 319 aa, Arabidopsis thaliana; identical to SEQ ID NO: 21613
  peptide (1)..(319): Ceres Seq. ID no. 12738901
  misc_feature (2)..(311): Pfam Name: Inositol 1, 3, 4-trisphosphate 5/6-kinase Pfam Description: Inositol 1, 3, 4-trisphosphate 5/6-kinase
  misc_feature (1)..(319): Homolog of NCBI NO: 15237403 NR Description: Inositol 1,3,4-Trisphosphate 5/6 kinase; protein At5g16760.1, supported by cDNA: 30653., supported by cDNA: supported by cDNA: gi_20465296, supported by cDNA: gi_3396078
  misc_feature (1)..(319): Homolog of NCBI NO: 7487924 NR Description: inositol 1,3,4-trisphosphate 5/6-kinase (EC
  misc_feature (3)..(315): Homolog of NCBI NO: 37537118 NR Description: putative inositol 1,3,4-trisphosphate 5/6-kinase
  misc_feature (8)..(315): Homolog of NCBI NO: 27549256 NR Description: inositol phosphate kinase [Zea mays]
  misc_feature (5)..(313): Homolog of NCBI NO: 18413088 NR Description: inositol 1,3,4-trisphosphate 5/6-kinase-like protein id: At4g08170.1, supported by cDNA: gi_15215757, by cDNA: gi_16323319 [Arabidopsis thaliana]
  misc_feature (7)..(316): Homolog of NCBI NO: 37530372 NR Description: putative inositol 1,3,4-trisphosphate 5/6-kinase
  misc_feature (8)..(316): Homolog of NCBI NO: 27311236 NR Description: Putative inositol 1,3,4-trisphosphate 5/6-kinase
  misc_feature (5)..(294): Homolog of NCBI NO: 7487925 NR Description: inositol 1,3,4-trisphosphate 5/6-kinase homolog
  misc_feature (66)..(313): Homolog of NCBI NO: 30680654 NR Description: inositol 1,3,4-trisphosphate 5/6-kinase-related
  misc_feature (85)..(316): Homolog of NCBI NO: 30689810 NR Description: expressed protein [Arabidopsis thaliana]

SEQ ID NO: 97568 - protein, 222 aa, Arabidopsis thaliana; identical to SEQ ID NO: 21614
  peptide (1)..(222): Ceres Seq. ID no. 12738902
  misc_feature (1)..(214): Pfam Name: Inositol 1, 3, 4-trisphosphate 5/6-kinase Pfam Description: Inositol 1, 3, 4-trisphosphate 5/6-kinase
  misc_feature (1)..(222): Homolog of NCBI NO: 15237403 NR Description: Inositol 1,3,4-Trisphosphate 5/6 kinase; protein At5g16760.1, supported by cDNA: 30653., supported by cDNA: supported by cDNA: gi_20465296, supported by cDNA: gi_3396078
  misc_feature (1)..(222): Homolog of NCBI NO: 7487924 NR Description: inositol 1,3,4-trisphosphate 5/6-kinase (EC
  misc_feature (1)..(218): Homolog of NCBI NO: 37537118 NR Description: putative inositol 1,3,4-trisphosphate 5/6-kinase
  misc_feature (1)..(218): Homolog of NCBI NO: 27549256 NR Description: inositol phosphate kinase [Zea mays]
  misc_feature (1)..(216): Homolog of NCBI NO: 18413088 NR Description: inositol 1,3,4-trisphosphate 5/6-kinase-like protein id: At4g08170.1, supported by cDNA: gi_15215757, by cDNA: gi_16323319 [Arabidopsis thaliana]
  misc_feature (1)..(219): Homolog of NCBI NO: 37530372 NR Description: putative inositol 1,3,4-trisphosphate 5/6-kinase
  misc_feature (1)..(219): Homolog of NCBI NO: 27311236 NR Description: Putative inositol 1,3,4-trisphosphate 5/6-kinase
  misc_feature (1)..(197): Homolog of NCBI NO: 7487925 NR Description: inositol 1,3,4-trisphosphate 5/6-kinase homolog
  misc_feature (1)..(216): Homolog of NCBI NO: 30680654 NR Description: inositol 1,3,4-trisphosphate 5/6-kinase-related
  misc_feature (1)..(219): Homolog of NCBI NO: 30689810 NR Description: expressed protein [Arabidopsis thaliana]

SEQ ID NO: 97569 - protein, 196 aa, Arabidopsis thaliana; identical to SEQ ID NO: 21615
  peptide (1)..(196): Ceres Seq. ID no. 12738903
  misc_feature (1)..(188): Pfam Name: Inositol 1, 3, 4-trisphosphate 5/6-kinase Pfam Description: Inositol 1, 3, 4-trisphosphate 5/6-kinase
  misc_feature (1)..(196): Homolog of NCBI NO: 15237403 NR Description: Inositol 1,3,4-Trisphosphate 5/6 kinase; protein At5g16760.1, supported by cDNA: 30653., supported by cDNA: supported by cDNA: gi_20465296, supported by cDNA: gi_3396078
  misc_feature (1)..(196): Homolog of NCBI NO: 7487924 NR Description: inositol 1,3,4-trisphosphate 5/6-kinase (EC
  misc_feature (1)..(192): Homolog of NCBI NO: 37537118 NR Description: putative inositol 1,3,4-trisphosphate 5/6-kinase
  misc_feature (1)..(192): Homolog of NCBI NO: 27549256 NR Description: inositol phosphate kinase [Zea mays]
  misc_feature (1)..(190): Homolog of NCBI NO: 18413088 NR Description: inositol 1,3,4-trisphosphate 5/6-kinase-like protein id: At4g08170.1, supported by cDNA: gi_15215757, by cDNA: gi_16323319 [Arabidopsis thaliana]
  misc_feature (1)..(193): Homolog of NCBI NO: 37530372 NR Description: putative inositol 1,3,4-trisphosphate 5/6-kinase
  misc_feature (1)..(193): Homolog of NCBI NO: 27311236 NR Description: Putative inositol 1,3,4-trisphosphate 5/6-kinase
  misc_feature (1)..(171): Homolog of NCBI NO: 7487925 NR Description: inositol 1,3,4-trisphosphate 5/6-kinase homolog
  misc_feature (1)..(190): Homolog of NCBI NO: 30680654 NR Description: inositol 1,3,4-trisphosphate 5/6-kinase-related
  misc_feature (1)..(193): Homolog of NCBI NO: 30689810 NR Description: expressed protein [Arabidopsis thaliana]

SEQ ID NO: 97570 - DNA, 1657 bp, Arabidopsis thaliana
  misc_feature (1)..(1657): Ceres Seq. ID no. 12738919
  misc_feature: MA Experiment ID: 108434 Result: Up-regulated in Transcription
  misc_feature: MA Experiment 108434 PARAMETER Experiment Name: At_Root_Tips_cDNA_P Parameter: Tissue Value: Root Tips
  misc_feature: MA Experiment ID: 108461 Result: Up-regulated in Transcription
  misc_feature: MA Experiment 108461 PARAMETER Experiment Name: At_Germinating_Seeds_cDNA_P Parameter: Age (day) Value: 1 vs. 0
  misc_feature: MA Experiment 108461 PARAMETER Experiment Name: At_Germinating_Seeds_cDNA_P Parameter: Tissue Value: Germinating Seeds
  misc_feature: MA Experiment ID: 108463 Result: Up-regulated in Transcription
  misc_feature: MA Experiment 108463 PARAMETER Experiment Name: At_Germinating_Seeds_cDNA_P Parameter: Age (day) Value: 3 vs. 0
  misc_feature: MA Experiment 108463 PARAMETER Experiment Name: At_Germinating_Seeds_cDNA_P Parameter: Tissue Value: Germinating Seeds
  misc_feature: MA Experiment ID: 108464 Result: Up-regulated in Transcription
  misc_feature: MA Experiment 108464 PARAMETER Experiment Name: At_Germinating_Seeds_cDNA_P Parameter: Age (day) Value: 4 vs. 0
  misc_feature: MA Experiment 108464 PARAMETER Experiment Name: At_Germinating_Seeds_cDNA_P Parameter: Tissue Value: Germinating Seeds
  misc_feature: MA Experiment ID: 108569 Result: Up-regulated in Transcription
  misc_feature: MA Experiment 108569 PARAMETER Experiment Name: At_0.001%_MeJA__cDNA_P Parameter: Timepoint (hr) Value: 6
  misc_feature: MA Experiment 108569 PARAMETER Experiment Name: At_0.001%_MeJA__cDNA_P Parameter: Tissue Value: Aerial
  misc_feature: MA Experiment 108569 PARAMETER Experiment Name: At_0.001%_MeJA__cDNA_P Parameter: Treatment Value: 0.001% MeJA vs. No Treatment
  misc_feature: MA Experiment ID: 108573 Result: Up-regulated in Transcription
  misc_feature: MA Experiment 108573 PARAMETER Experiment Name: At_Drought_cDNA_P Parameter: Timepoint (hr) Value: 6
  misc_feature: MA Experiment 108573 PARAMETER Experiment Name: At_Drought_cDNA_P Parameter: Tissue Value: Aerial
  misc_feature: MA Experiment 108573 PARAMETER Experiment Name: At_Drought_cDNA_P Parameter: Treatment Value: Drought vs. No Drought
  misc_feature: MA Experiment ID: 108595 Result: Down-regulated in Transcription
  misc_feature: MA Experiment 108595 PARAMETER Experiment Name: At_Ler-pi_Ovule_cDNA_P Parameter: Plant Line Value: null
  misc_feature: MA Experiment ID: 20000087 Result: Down-regulated in Transcription
  misc_feature: MA Experiment 20000087 PARAMETER Experiment Name: At_100uM_ABA_Mutants_cDNA_P Parameter: Plant Line Value: WS
  misc_feature: MA Experiment 20000087 PARAMETER Experiment Name: At_100uM_ABA_Mutants_cDNA_P Parameter: Timepoint (hr) Value: 6
  misc_feature: MA Experiment 20000087 PARAMETER Experiment Name: At_100uM_ABA_Mutants_cDNA_P Parameter: Tissue Value: Aerial
  misc_feature: MA Experiment 20000087 PARAMETER Experiment Name: At_100uM_ABA_Mutants_cDNA_P Parameter: Treatment Value: 100uM ABA vs. No Treatment
  misc_feature: MA Experiment ID: 20000113 Result: Down-regulated in Transcription
  misc_feature: MA Experiment 20000113 PARAMETER Experiment Name: At_42deg_Heat_cDNA_P Parameter: Temperature (deg C) Value: 42 vs. 22
  misc_feature: MA Experiment 20000113 PARAMETER Experiment Name: At_42deg_Heat_cDNA_P Parameter: Timepoint (hr) Value: 8
  misc_feature: MA Experiment 20000113 PARAMETER Experiment Name: At_42deg_Heat_cDNA_P Parameter: Tissue Value: Aerial
  misc_feature: MA Experiment ID: 20000306 Result: Up-regulated in Transcription
  misc_feature: MA Experiment 20000306 PARAMETER Experiment Name: At_Germinating_Seeds_Sub_P Parameter: Age (hr) Value: 6 vs. 0
  misc_feature: MA Experiment 20000306 PARAMETER Experiment Name: At_Germinating_Seeds_Sub_P Parameter: Organism Value: A. thaliana
  misc_feature: MA Experiment 20000306 PARAMETER Experiment Name: At_Germinating_Seeds_Sub_P Parameter: Plant Line Value: WS
  misc_feature: MA Experiment 20000306 PARAMETER Experiment Name: At_Germinating_Seeds_Sub_P Parameter: Tissue Value: Germinating Seeds
  misc_feature: MA Experiment ID: 20000307 Result: Up-regulated in Transcription
  misc_feature: MA Experiment 20000307 PARAMETER Experiment Name: At_Germinating_Seeds_Sub_P Parameter: Age (hr) Value: 24 vs. 0
  misc_feature: MA Experiment 20000307 PARAMETER Experiment Name: At_Germinating_Seeds_Sub_P Parameter: Organism Value: A. thaliana
  misc_feature: MA Experiment 20000307 PARAMETER Experiment Name: At_Germinating_Seeds_Sub_P Parameter: Plant Line Value: WS
  misc_feature: MA Experiment 20000307 PARAMETER Experiment Name: At_Germinating_Seeds_Sub_P Parameter: Tissue Value: Germinating Seeds
ttcttctaatagacttcttcgtcactgatctcccacgacgatctcccaaactcatttctctacgttcatcgatctctctctttctcgtttgctctacgaaaatcagccatggatgaagagtacgaggttattgttctcggcaccggtctcaaggagtgtatcctcagcggtctcctttccgtcgatggtgtcaaggtgcttcacatggacaggaatgactactatggtggagaatcaacttcccttaatctcaatcagctttggaagaagttcaggggagaagagaaggctcctgagcatttaggcgctagccgggattacaatgttgacatgatgcctaagtttatgatgggaaatggcaagcttgttcgtacccttattcatacagatgttacaaagtatttgtccttcaaagctgttgatggaagctatgttttcgtcaaaggaaaggttcaaaaggtgccagctactcctatggaggccctgaaatcttctctcatgggcatatttgagaaacgtcgagccggcaagtttttcagttttgttcaagaatacgatgagaaggacccaaaaacacacgatggaatggatttgaccagagttacaacaaaggaactgattgcgaaatatggtcttgatggcaacactattgactttattggtcacgcagtggcacttcacacgaatgaccaacatctcgatcaacccgcctttgatactgtaatgagaatgaagctctatgcggaatctcttgcacgtttccaaggaacatctccatatatttatcctctctatgggttgggagaactaccccaggcatttgcacgacttagtgctgtctatggtggcacatatatgttgaacaaacctgagtgcaaggtagagtttgacgagggaggtaaggttattggtgtaacatctgagggagagactgctaaatgcaaaaagattgtgtgtgacccttcatacctgccgaacaaggttaggaagattggcagggttgctcgggccatcgccattatgagccacccgattccaaacaccaatgattctcactcagtgcaggtcatcataccccagaaacagttggcccgcaaatcggatatgtatgtcttctgttgttcgtactcccacaacgttgctcccaagggaaaattcattgcatttgtgtctacagatgcagagactgataaccctcaaaccgaactaaagcctggaactgatcttttgggtcctgttgatgagatattcttcgacatgtatgatagatacgagcctgtcaacgagccagagttggacaactgctttatatcaacgagctatgatgctacaacacactttgagacaactgttgcggatgtgttgaacatgtatactctaatcaccggaaagcaactggacctaagtgttgacctgagtgccgcaagtgctgcagaggaatgaagaatcaccagatcgcgctctctctctctctctctagttgattttctaaaagcttgttttgctcatttctctgtttccgactcttgctttcgtgttcttttttggtttgaactttgaatacaaaatcagaatgatccttcatgtttagcaactaacaaccatgtgtctccgtttgatgttggattcctcggttaaagacttataaatgctcttt

SEQ ID NO: 97571 - protein, 444 aa, Arabidopsis thaliana; identical to SEQ ID NO: 26953
  peptide (1)..(444): Ceres Seq. ID no. 12738920
  misc_feature (1)..(438): Pfam Name: GDP dissociation inhibitor Pfam Description: GDP dissociation inhibitor
  misc_feature (1)..(444): Homolog of NCBI NO: 15232210 NR Description: Rab GDP dissociation inhibitor; protein id: supported by cDNA: gi_19698844, supported by cDNA: gi_2446980
  misc_feature (1)..(444): Homolog of NCBI NO: 15224814 NR Description: GDP dissociation inhibitor; protein id: supported by cDNA: 29536., supported by cDNA: gi_13605640, by cDNA: gi_15215777, supported by cDNA: gi_1655423, supported by
  misc_feature (1)..(444): Homolog of NCBI NO: 1550740 NR Description: GDP-associated inhibitor [Arabidopsis thaliana]
  misc_feature (1)..(444): Homolog of NCBI NO: 17473582 NR Description: GDP dissociation inhibitor [Arabidopsis thaliana]
  misc_feature (1)..(444): Homolog of NCBI NO: 21592535 NR Description: GDP dissociation inhibitor [Arabidopsis thaliana]
  misc_feature (1)..(444): Homolog of NCBI NO: 3175990 NR Description: GDP dissociation inhibitor [Cicer arietinum]
  misc_feature (1)..(444): Homolog of NCBI NO: 7489133 NR Description: GDP dissociation inhibitor - common tobacco
  misc_feature (1)..(444): Homolog of NCBI NO: 7489478 NR Description: GDP dissociation inhibitor protein - rice
  misc_feature (1)..(444): Homolog of NCBI NO: 7489479 NR Description: GDP dissociation inhibitor protein - rice
  misc_feature (1)..(444): Homolog of NCBI NO: 15242440 NR Description: GDP dissociation inhibitor; protein id:

SEQ ID NO: 97572 - protein, 412 aa, Arabidopsis thaliana; identical to SEQ ID NO: 26954
  peptide (1)..(412): Ceres Seq. ID no. 12738921
  misc_feature (1)..(406): Pfam Name: GDP dissociation inhibitor Pfam Description: GDP dissociation inhibitor
  misc_feature (1)..(412): Homolog of NCBI NO: 15232210 NR Description: Rab GDP dissociation inhibitor; protein id: supported by cDNA: gi_19698844, supported by cDNA: gi_2446980
  misc_feature (1)..(412): Homolog of NCBI NO: 15224814 NR Description: GDP dissociation inhibitor; protein id: supported by cDNA: 29536., supported by cDNA: gi_13605640, by cDNA: gi_15215777, supported by cDNA: gi_1655423, supported by
  misc_feature (1)..(412): Homolog of NCBI NO: 1550740 NR Description: GDP-associated inhibitor [Arabidopsis thaliana]
  misc_feature (1)..(412): Homolog of NCBI NO: 17473582 NR Description: GDP dissociation inhibitor [Arabidopsis thaliana]
  misc_feature (1)..(412): Homolog of NCBI NO: 21592535 NR Description: GDP dissociation inhibitor [Arabidopsis thaliana]
  misc_feature (1)..(412): Homolog of NCBI NO: 3175990 NR Description: GDP dissociation inhibitor [Cicer arietinum]
  misc_feature (1)..(412): Homolog of NCBI NO: 7489133 NR Description: GDP dissociation inhibitor - common tobacco
  misc_feature (1)..(412): Homolog of NCBI NO: 7489478 NR Description: GDP dissociation inhibitor protein - rice
  misc_feature (1)..(412): Homolog of NCBI NO: 7489479 NR Description: GDP dissociation inhibitor protein - rice
  misc_feature (1)..(412): Homolog of NCBI NO: 15242440 NR Description: GDP dissociation inhibitor; protein id:

SEQ ID NO: 97573 - protein, 370 aa, Arabidopsis thaliana; identical to SEQ ID NO: 26955
  peptide (1)..(370): Ceres Seq. ID no. 12738922
  misc_feature (1)..(364): Pfam Name: GDP dissociation inhibitor Pfam Description: GDP dissociation inhibitor
  misc_feature (1)..(370): Homolog of NCBI NO: 15232210 NR Description: Rab GDP dissociation inhibitor; protein id: supported by cDNA: gi_19698844, supported by cDNA: gi_2446980
  misc_feature (1)..(370): Homolog of NCBI NO: 15224814 NR Description: GDP dissociation inhibitor; protein id: supported by cDNA: 29536., supported by cDNA: gi_13605640, by cDNA: gi_15215777, supported by cDNA: gi_1655423, supported by
  misc_feature (1)..(370): Homolog of NCBI NO: 1550740 NR Description: GDP-associated inhibitor [Arabidopsis thaliana]
  misc_feature (1)..(370): Homolog of NCBI NO: 17473582 NR Description: GDP dissociation inhibitor [Arabidopsis thaliana]
  misc_feature (1)..(370): Homolog of NCBI NO: 21592535 NR Description: GDP dissociation inhibitor [Arabidopsis thaliana]
  misc_feature (1)..(370): Homolog of NCBI NO: 3175990 NR Description: GDP dissociation inhibitor [Cicer arietinum]
  misc_feature (1)..(370): Homolog of NCBI NO: 7489133 NR Description: GDP dissociation inhibitor - common tobacco
  misc_feature (1)..(370): Homolog of NCBI NO: 7489478 NR Description: GDP dissociation inhibitor protein - rice
  misc_feature (1)..(370): Homolog of NCBI NO: 7489479 NR Description: GDP dissociation inhibitor protein - rice
  misc_feature (1)..(370): Homolog of NCBI NO: 15242440 NR Description: GDP dissociation inhibitor; protein id:

SEQ ID NO: 97574 - DNA, 1302 bp, Arabidopsis thaliana
  misc_feature (1)..(1302): Ceres Seq. ID no. 12738937
  misc_feature: MA Experiment ID: 20000438 Result: Down-regulated in Transcription
  misc_feature: MA Experiment 20000438 PARAMETER Experiment Name: At_Shoots__P Parameter: Age (day) Value: 14
  misc_feature: MA Experiment 20000438 PARAMETER Experiment Name: At_Shoots__P Parameter: Tissue Value: Shoots vs. Whole Plant
  misc_feature: MA Experiment ID: 20000794 Result: Up-regulated in Transcription
  misc_feature: MA Experiment 20000794 PARAMETER Experiment Name: At_Petals_P Parameter: Age (day) Value: 23-25 days
  misc_feature: MA Experiment 20000794 PARAMETER Experiment Name: At_Petals_P Parameter: Plant Line Value: WS
  misc_feature: MA Experiment 20000794 PARAMETER Experiment Name: At_Petals_P Parameter: Tissue Value: Petals vs. Whole plant
  misc_feature: MA Experiment ID: 20001773 Result: Up-regulated in Transcription
  misc_feature: MA Experiment 20001773 PARAMETER Experiment Name: At_Far-red-enriched-adult_P Parameter: Age (day) Value: 30
  misc_feature: MA Experiment 20001773 PARAMETER Experiment Name: At_Far-red-enriched-adult_P Parameter: Light Value: Far-red enriched vs. White
  misc_feature: MA Experiment 20001773 PARAMETER Experiment Name: At_Far-red-enriched-adult_P Parameter: Organism Value: A. thaliana
  misc_feature: MA Experiment 20001773 PARAMETER Experiment Name: At_Far-red-enriched-adult_P Parameter: Plant Line Value: Columbia
  misc_feature: MA Experiment 20001773 PARAMETER Experiment Name: At_Far-red-enriched-adult_P Parameter: Timepoint (hr) Value: 48
  misc_feature: MA Experiment 20001773 PARAMETER Experiment Name: At_Far-red-enriched-adult_P Parameter: Tissue Value: Aerial
  misc_feature: MA Experiment ID: 20001911 Result: Down-regulated in Transcription
  misc_feature: MA Experiment 20001911 PARAMETER Experiment Name: At_Drought_Reproduction_P Parameter: Age (day) Value: 40
  misc_feature: MA Experiment 20001911 PARAMETER Experiment Name: At_Drought_Reproduction_P Parameter: Organism Value: A. thaliana
  misc_feature: MA Experiment 20001911 PARAMETER Experiment Name: At_Drought_Reproduction_P Parameter: Plant Line Value: WS
  misc_feature: MA Experiment 20001911 PARAMETER Experiment Name: At_Drought_Reproduction_P Parameter: Timepoint (day) Value: 10
  misc_feature: MA Experiment 20001911 PARAMETER Experiment Name: At_Drought_Reproduction_P Parameter: Tissue Value: Flowers
  misc_feature: MA Experiment 20001911 PARAMETER Experiment Name: At_Drought_Reproduction_P Parameter: Treatment Value: Drought vs. No Drought
cgaacacaatctgcttcaagaattagggttttgatcagacacaaaaagtatctctctccggtcttgtgtcaaggttatgcaagaagcggcactaggtatgatgggagccaccgtaggcggagacggagacaccgcggtcgtggcggagcagaatagacagttgaaaggtgagatagcgacacatccgatgtatgagcaattattagccgcacacgtggcgtgtttaagagtagctactccaatagatcaacttccgatcattgaagctcagctttctcaatctcatcatcttctccgttcttacgcttccacggccgttggataccatcatgatcgtcacgagctcgataatttcttggcacaatatgtaatggtgttgtgtagcttcaaagaacagctgcaacagcacgtgagggttcatgccgtcgaagctgttatggcttgccgtgaaattgagaacaaccttcattctcttacaggagcaactttaggagaagggtcgggtgcgactatgtcggaggatgaggatgatcttccgatggatttctcgtcagataattccggcgttgattttagcggcggccacgatatgacgggatttggtccgttgctaccgactgaatcggaaagatcccttatggaaagagtcagacaagaactcaaactagaactcaaacagggttttaaatcgagaatcgaagatgtaagagaagagataatgaggaagagaagggctgggaaattgccaggagacacaactactgtcttgaaaaattggtggcaacaacattgcaaatggccttaccctacggaagatgacaaggcaaaattggtggaggagacaggattgcagttgaagcaaatcaacaattggttcattaaccaacgcaagaggaattggcacaacaactctcactccctcacttccttgaagtccaagcgcaaacactaatctcttcttactatattagttactacctctacatatattcatactaattacactgctaagacatgcatgatacatacgtaattcatgttactgataataacgaggtgtgatcattaatatcatgtacttacttagcttattagatccaccgactactatatgatttgtgcgttgcgtgattactggttgttactagattgtaattcattttgtttgtattgtgcattcaaatttatctttttggtaagaacactgattttgtaacgtgttttgtaacgtgttttccgtggatgactagaccatcatttggaaatataaagtaatgatgccgacaaaaaaggcagtgtttt

SEQ ID NO: 97575 - protein, 291 aa, Arabidopsis thaliana; identical to SEQ ID NO: 86004
  peptide (1)..(291): Ceres Seq. ID no. 12738938
  misc_feature (80)..(135): Pfam Name: KNOX2 domain Pfam Description: KNOX2 domain
  misc_feature (1)..(291): Homolog of NCBI NO: 18407708 NR Description: homeodomain-containing protein HD1, putative; id: At1g62990.1, supported by cDNA: 106887., supported by cDNA: [Arabidopsis thaliana] >gi|11878230|gb|AAG40858.1|AF308451_1
  misc_feature (8)..(291): Homolog of NCBI NO: 26451690 NR Description: putative homeodomain transcription factor KNAT6
  misc_feature (9)..(291): Homolog of NCBI NO: 25386223 NR Description: hypothetical protein F16P17.16 [imported] - thaliana >gi|8493589|gb|AAF75812.1|AC011000_15 Strong similarity Homeobox Protein HD1 from Brassica napus gi|1170191, and contains
  misc_feature (9)..(291): Homolog of NCBI NO: 21618231 NR Description: homeodomain-containing protein HD1, putative
  misc_feature (1)..(291): Homolog of NCBI NO: 1170191 NR Description: Homeobox protein HD1 >gi|1076449|pir||S47535
  misc_feature (28)..(290): Homolog of NCBI NO: 4098246 NR Description: homeobox 2 protein [Lycopersicon esculentum]
  misc_feature (20)..(290): Homolog of NCBI NO: 14149141 NR Description: KNOX family class 2 homeodomain protein [Oryza
  misc_feature (14)..(290): Homolog of NCBI NO: 3023961 NR Description: Homeobox protein knotted-1 like 3 (KNAP3)
  misc_feature (15)..(290): Homolog of NCBI NO: 15238743 NR Description: KNAT3 homeodomain protein; protein id:
  misc_feature (15)..(290): Homolog of NCBI NO: 21554222 NR Description: KNAT3 homeodomain protein [Arabidopsis thaliana]

SEQ ID NO: 97576 - protein, 284 aa, Arabidopsis thaliana; identical to SEQ ID NO: 39455
  peptide (1)..(284): Ceres Seq. ID no. 12738939
  misc_feature (73)..(128): Pfam Name: KNOX2 domain Pfam Description: KNOX2 domain
  misc_feature (1)..(284): Homolog of NCBI NO: 18407708 NR Description: homeodomain-containing protein HD1, putative; id: At1g62990.1, supported by cDNA: 106887., supported by cDNA: [Arabidopsis thaliana] >gi|11878230|gb|AAG40858.1|AF308451_1
  misc_feature (1)..(284): Homolog of NCBI NO: 26451690 NR Description: putative homeodomain transcription factor KNAT6
  misc_feature (2)..(284): Homolog of NCBI NO: 25386223 NR Description: hypothetical protein F16P17.16 [imported] - thaliana >gi|8493589|gb|AAF75812.1|AC011000_15 Strong similarity Homeobox Protein HD1 from Brassica napus gi|1170191, and contains
  misc_feature (2)..(284): Homolog of NCBI NO: 21618231 NR Description: homeodomain-containing protein HD1, putative
  misc_feature (1)..(284): Homolog of NCBI NO: 1170191 NR Description: Homeobox protein HD1 >gi|1076449|pir||S47535
  misc_feature (21)..(283): Homolog of NCBI NO: 4098246 NR Description: homeobox 2 protein [Lycopersicon esculentum]
  misc_feature (13)..(283): Homolog of NCBI NO: 14149141 NR Description: KNOX family class 2 homeodomain protein [Oryza
  misc_feature (7)..(283): Homolog of NCBI NO: 3023961 NR Description: Homeobox protein knotted-1 like 3 (KNAP3)
  misc_feature (8)..(283): Homolog of NCBI NO: 15238743 NR Description: KNAT3 homeodomain protein; protein id:
  misc_feature (8)..(283): Homolog of NCBI NO: 21554222 NR Description: KNAT3 homeodomain protein [Arabidopsis thaliana]

SEQ ID NO: 97577 - protein, 283 aa, Arabidopsis thaliana; identical to SEQ ID NO: 39456
  peptide (1)..(283): Ceres Seq. ID no. 12738940
  misc_feature (72)..(127): Pfam Name: KNOX2 domain Pfam Description: KNOX2 domain
  misc_feature (1)..(283): Homolog of NCBI NO: 18407708 NR Description: homeodomain-containing protein HD1, putative; id: At1g62990.1, supported by cDNA: 106887., supported by cDNA: [Arabidopsis thaliana] >gi|11878230|gb|AAG40858.1|AF308451_1
  misc_feature (1)..(283): Homolog of NCBI NO: 26451690 NR Description: putative homeodomain transcription factor KNAT6
  misc_feature (1)..(283): Homolog of NCBI NO: 25386223 NR Description: hypothetical protein F16P17.16 [imported] - thaliana >gi|8493589|gb|AAF75812.1|AC011000_15 Strong similarity Homeobox Protein HD1 from Brassica napus gi|1170191, and contains
  misc_feature (1)..(283): Homolog of NCBI NO: 21618231 NR Description: homeodomain-containing protein HD1, putative
  misc_feature (1)..(283): Homolog of NCBI NO: 1170191 NR Description: Homeobox protein HD1 >gi|1076449|pir||S47535
  misc_feature (20)..(282): Homolog of NCBI NO: 4098246 NR Description: homeobox 2 protein [Lycopersicon esculentum]
  misc_feature (12)..(282): Homolog of NCBI NO: 14149141 NR Description: KNOX family class 2 homeodomain protein [Oryza
  misc_feature (6)..(282): Homolog of NCBI NO: 3023961 NR Description: Homeobox protein knotted-1 like 3 (KNAP3)
  misc_feature (7)..(282): Homolog of NCBI NO: 15238743 NR Description: KNAT3 homeodomain protein; protein id:
  misc_feature (7)..(282): Homolog of NCBI NO: 21554222 NR Description: KNAT3 homeodomain protein [Arabidopsis thaliana]

SEQ ID NO: 97578 - DNA, 1004 bp, Arabidopsis thaliana
  misc_feature (1)..(1004): Ceres Seq. ID no. 12738974
  misc_feature: MA Experiment ID: 108462 Result: Up-regulated in Transcription
  misc_feature: MA Experiment 108462 PARAMETER Experiment Name: At_Germinating_Seeds_cDNA_P Parameter: Age (day) Value: 2 vs. 0
  misc_feature: MA Experiment 108462 PARAMETER Experiment Name: At_Germinating_Seeds_cDNA_P Parameter: Tissue Value: Germinating Seeds
  misc_feature: MA Experiment ID: 108463 Result: Up-regulated in Transcription
  misc_feature: MA Experiment 108463 PARAMETER Experiment Name: At_Germinating_Seeds_cDNA_P Parameter: Age (day) Value: 3 vs. 0
  misc_feature: MA Experiment 108463 PARAMETER Experiment Name: At_Germinating_Seeds_cDNA_P Parameter: Tissue Value: Germinating Seeds
  misc_feature: MA Experiment ID: 20000185 Result: Up-regulated in Transcription
  misc_feature: MA Experiment 20000185 PARAMETER Experiment Name: At_Roots__P Parameter: Age (day) Value: 7 vs. 21
  misc_feature: MA Experiment 20000185 PARAMETER Experiment Name: At_Roots__P Parameter: Organism Value: A. thaliana
  misc_feature: MA Experiment 20000185 PARAMETER Experiment Name: At_Roots__P Parameter: Tissue Value: Roots vs. Whole Plant
  misc_feature: MA Experiment ID: 20000267 Result: Up-regulated in Transcription
  misc_feature: MA Experiment 20000267 PARAMETER Experiment Name: At_Drought_P Parameter: Age (day) Value: 7
  misc_feature: MA Experiment 20000267 PARAMETER Experiment Name: At_Drought_P Parameter: Organism Value: A. thaliana
  misc_feature: MA Experiment 20000267 PARAMETER Experiment Name: At_Drought_P Parameter: Plant Line Value: WS
  misc_feature: MA Experiment 20000267 PARAMETER Experiment Name: At_Drought_P Parameter: Timepoint (hr) Value: 6
  misc_feature: MA Experiment 20000267 PARAMETER Experiment Name: At_Drought_P Parameter: Tissue Value: Whole Plant
  misc_feature: MA Experiment 20000267 PARAMETER Experiment Name: At_Drought_P Parameter: Treatment Value: Drought vs. No Drought
  misc_feature: MA Experiment ID: 20000439 Result: Up-regulated in Transcription
  misc_feature: MA Experiment 20000439 PARAMETER Experiment Name: At_Roots__P Parameter: Age (day) Value: 14 vs. 21
  misc_feature: MA Experiment 20000439 PARAMETER Experiment Name: At_Roots__P Parameter: Organism Value: A. thaliana
  misc_feature: MA Experiment 20000439 PARAMETER Experiment Name: At_Roots__P Parameter: Tissue Value: Roots vs. Whole Plant
gaagatcataaagatcaaaaggagagaggtattaaaaaatgatgtgtagtcgaggccattggagacctgcagaagacgagaagctaagagaactcgtcgagcaatttggtcctcataattggaacgccatagctcagaagctctctggtcgatctggtaagagttgtagattgagatggtttaatcaattggatcctaggattaaccgaaaccctttcacggaggaagaagaagaaaggcttttagcgcctcatcggatccatgggaacagatggtctgtgatcgctagattttttcccggtcgaactgataacgctgttaaaaaccattggcacgtcatcatggctcgtcgtggccgagaacggtccaagctccgtccacgaggccttggccatgatggcacggtggctgcgactgggatgattggtaattataaagactgcgataaggagagaagattggcaaccacaaccgctatcaattttccttatcaattctctcatattaatcattttcaagtcctcaaagagtccttgaccggaaagatcgggttcagaaatagtactactccaatacaagaaggagcaatagaccaaactaaacgaccgatggagttctacaattttctccaagtaaacacggattcgaagatacacgaattgatagataattcaagaaaagacgaagaagaagatgtcgatcaaaacaaccgaattcgtaacgagaattgtgttccatttttcgactttttgtctgttggaaactctgcctctcagggtttatgttaatttgtccgtaccacatgtactataaggtggaccatatgttaactaaagataatgtagaaagtactaatcaattagagctcctgtttgagccaaatgtgaaaattagttaagacatcccaaacattttcttgtataacacatataaggttgtacttttatcaggtctaattttctatttttattttaaggatgtttaatcagacccataaccattcg

SEQ ID NO: 97579 - protein, 249 aa, Arabidopsis thaliana
  peptide (1)..(249): Ceres Seq. ID no. 12738975
  misc_feature (5)..(51): Pfam Name: Myb-like DNA-binding domain Pfam Description: Myb-like DNA-binding domain
  misc_feature (1)..(249): Homolog of NCBI NO: 11358541 NR Description: myb-related transcription factor MYB52 [imported] Arabidopsis thaliana >gi|3941468|gb|AAC83610.1| putative
  misc_feature (1)..(249): Homolog of NCBI NO: 15220910 NR Description: myb family trnscription factor; protein id: supported by cDNA: 267121., supported by cDNA: gi_3941467
  misc_feature (2)..(249): Homolog of NCBI NO: 25513679 NR Description: F2H15.17 protein - Arabidopsis thaliana
  misc_feature (1)..(249): Homolog of NCBI NO: 21554916 NR Description: myb-like protein, putative [Arabidopsis thaliana]
  misc_feature (1)..(245): Homolog of NCBI NO: 15219462 NR Description: myb family transcription factor(MYB54); protein
  misc_feature (1)..(245): Homolog of NCBI NO: 11358543 NR Description: myb-related transcription factor MYB54 [imported] Arabidopsis thaliana >gi|3941472|gb|AAC83612.1| putative
  misc_feature (2)..(246): Homolog of NCBI NO: 21321780 NR Description: putative Myb/Myb-related protein [Oryza sativa
  misc_feature (2)..(115): Homolog of NCBI NO: 31980093 NR Description: MYB transcription factor R2R3 type [Populus
  misc_feature (3)..(115): Homolog of NCBI NO: 6979341 NR Description: myb-like protein [Oryza sativa]
  misc_feature (2)..(110): Homolog of NCBI NO: 34903242 NR Description: unnamed protein product [Oryza sativa (japonica group)] >gi|6539552|dbj|BAA88169.1| unnamed protein product
MMCSRGHWRPAEDEKLRELVEQFGPHNWNAIAQKLSGRSGKSCRLRWFNQLDPRINRNPFTEEEEERLLAPHRIHGNRWSVIARFFPGRTDNAVKNHWHVIMARRGRERSKLRPRGLGHDGTVAATGMIGNYKDCDKERRLATTTAINFPYQFSHINHFQVLKESLTGKIGFRNSTTPIQEGAIDQTKRPMEFYNFLQVNTDSKIHELIDNSRKDEEEDVDQNNRIRNENCVPFFDFLSVGNSASQGLC

SEQ ID NO: 97580 - protein, 248 aa, Arabidopsis thaliana
  peptide (1)..(248): Ceres Seq. ID no. 12738976
  misc_feature (4)..(50): Pfam Name: Myb-like DNA-binding domain Pfam Description: Myb-like DNA-binding domain
  misc_feature (1)..(248): Homolog of NCBI NO: 11358541 NR Description: myb-related transcription factor MYB52 [imported] Arabidopsis thaliana >gi|3941468|gb|AAC83610.1| putative
  misc_feature (1)..(248): Homolog of NCBI NO: 15220910 NR Description: myb family trnscription factor; protein id: supported by cDNA: 267121., supported by cDNA: gi_3941467
  misc_feature (1)..(248): Homolog of NCBI NO: 25513679 NR Description: F2H15.17 protein - Arabidopsis thaliana
  misc_feature (1)..(248): Homolog of NCBI NO: 21554916 NR Description: myb-like protein, putative [Arabidopsis thaliana]
  misc_feature (1)..(244): Homolog of NCBI NO: 15219462 NR Description: myb family transcription factor(MYB54); protein
  misc_feature (1)..(244): Homolog of NCBI NO: 11358543 NR Description: myb-related transcription factor MYB54 [imported] Arabidopsis thaliana >gi|3941472|gb|AAC83612.1| putative
  misc_feature (1)..(245): Homolog of NCBI NO: 21321780 NR Description: putative Myb/Myb-related protein [Oryza sativa
  misc_feature (1)..(114): Homolog of NCBI NO: 31980093 NR Description: MYB transcription factor R2R3 type [Populus
  misc_feature (2)..(114): Homolog of NCBI NO: 6979341 NR Description: myb-like protein [Oryza sativa]
  misc_feature (1)..(109): Homolog of NCBI NO: 34903242 NR Description: unnamed protein product [Oryza sativa (japonica group)] >gi|6539552|dbj|BAA88169.1| unnamed protein product
MCSRGHWRPAEDEKLRELVEQFGPHNWNAIAQKLSGRSGKSCRLRWFNQLDPRINRNPFTEEEEERLLAPHRIHGNRWSVIARFFPGRTDNAVKNHWHVIMARRGRERSKLRPRGLGHDGTVAATGMIGNYKDCDKERRLATTTAINFPYQFSHINHFQVLKESLTGKIGFRNSTTPIQEGAIDQTKRPMEFYNFLQVNTDSKIHELIDNSRKDEEEDVDQNNRIRNENCVPFFDFLSVGNSASQGLC

SEQ ID NO: 97581 - protein, 148 aa, Arabidopsis thaliana
  peptide (1)..(148): Ceres Seq. ID no. 12738977
  misc_feature (1)..(148): Homolog of NCBI NO: 11358541 NR Description: myb-related transcription factor MYB52 [imported] Arabidopsis thaliana >gi|3941468|gb|AAC83610.1| putative
  misc_feature (1)..(148): Homolog of NCBI NO: 15220910 NR Description: myb family trnscription factor; protein id: supported by cDNA: 267121., supported by cDNA: gi_3941467
  misc_feature (1)..(148): Homolog of NCBI NO: 25513679 NR Description: F2H15.17 protein - Arabidopsis thaliana
  misc_feature (1)..(148): Homolog of NCBI NO: 21554916 NR Description: myb-like protein, putative [Arabidopsis thaliana]
  misc_feature (1)..(144): Homolog of NCBI NO: 15219462 NR Description: myb family transcription factor(MYB54); protein
  misc_feature (1)..(144): Homolog of NCBI NO: 11358543 NR Description: myb-related transcription factor MYB54 [imported] Arabidopsis thaliana >gi|3941472|gb|AAC83612.1| putative
  misc_feature (1)..(145): Homolog of NCBI NO: 21321780 NR Description: putative Myb/Myb-related protein [Oryza sativa
  misc_feature (1)..(14): Homolog of NCBI NO: 31980093 NR Description: MYB transcription factor R2R3 type [Populus
  misc_feature (1)..(14): Homolog of NCBI NO: 6979341 NR Description: myb-like protein [Oryza sativa]
  misc_feature (1)..(142): Homolog of NCBI NO: 9759057 NR Description: Myb-like transcription factor-like protein
MARRGRERSKLRPRGLGHDGTVAATGMIGNYKDCDKERRLATTTAINFPYQFSHINHFQVLKESLTGKIGFRNSTTPIQEGAIDQTKRPMEFYNFLQVNTDSKIHELIDNSRKDEEEDVDQNNRIRNENCVPFFDFLSVGNSASQGLC

SEQ ID NO: 97582 - DNA, 1554 bp, Arabidopsis thaliana
  misc_feature (1)..(1554): Ceres Seq. ID no. 12738991
  misc_feature: MA Experiment ID: 20000169 Result: Up-regulated in Transcription
  misc_feature: MA Experiment 20000169 PARAMETER Experiment Name: At_100uM_ABA_P Parameter: Age (day) Value: 14
  misc_feature: MA Experiment 20000169 PARAMETER Experiment Name: At_100uM_ABA_P Parameter: Organism Value: A. thaliana
  misc_feature: MA Experiment 20000169 PARAMETER Experiment Name: At_100uM_ABA_P Parameter: Plant Line Value: WS
  misc_feature: MA Experiment 20000169 PARAMETER Experiment Name: At_100uM_ABA_P Parameter: Timepoint (hr) Value: 6
  misc_feature: MA Experiment 20000169 PARAMETER Experiment Name: At_100uM_ABA_P Parameter: Tissue Value: Aerial
  misc_feature: MA Experiment 20000169 PARAMETER Experiment Name: At_100uM_ABA_P Parameter: Treatment Value: 100uM ABA vs. No Treatment
  misc_feature: MA Experiment ID: 20000173 Result: Down-regulated in Transcription
  misc_feature: MA Experiment 20000173 PARAMETER Experiment Name: At_42deg_Heat_P Parameter: Age (day) Value: 14
  misc_feature: MA Experiment 20000173 PARAMETER Experiment Name: At_42deg_Heat_P Parameter: Organism Value: A. thaliana
  misc_feature: MA Experiment 20000173 PARAMETER Experiment Name: At_42deg_Heat_P Parameter: Plant Line Value: WS
  misc_feature: MA Experiment 20000173 PARAMETER Experiment Name: At_42deg_Heat_P Parameter: Temperature (deg C) Value: 42 vs. 22
  misc_feature: MA Experiment 20000173 PARAMETER Experiment Name: At_42deg_Heat_P Parameter: Timepoint (hr) Value: 6
  misc_feature: MA Experiment 20000173 PARAMETER Experiment Name: At_42deg_Heat_P Parameter: Tissue Value: Aerial
  misc_feature: MA Experiment ID: 20000179 Result: Down-regulated in Transcription
  misc_feature: MA Experiment 20000179 PARAMETER Experiment Name: At_Germinating_Seeds_P Parameter: Age (hr) Value: 6 vs. 0
  misc_feature: MA Experiment 20000179 PARAMETER Experiment Name: At_Germinating_Seeds_P Parameter: Tissue Value: Germinating Seeds
  misc_feature: MA Experiment ID: 20000182 Result: Up-regulated in Transcription
  misc_feature: MA Experiment 20000182 PARAMETER Experiment Name: At_2mM_SA_P Parameter: Age (day) Value: 14
  misc_feature: MA Experiment 20000182 PARAMETER Experiment Name: At_2mM_SA_P Parameter: Organism Value: A. thaliana
  misc_feature: MA Experiment 20000182 PARAMETER Experiment Name: At_2mM_SA_P Parameter: Plant Line Value: WS
  misc_feature: MA Experiment 20000182 PARAMETER Experiment Name: At_2mM_SA_P Parameter: Timepoint (hr) Value: 6
  misc_feature: MA Experiment 20000182 PARAMETER Experiment Name: At_2mM_SA_P Parameter: Tissue Value: Aerial
  misc_feature: MA Experiment 20000182 PARAMETER Experiment Name: At_2mM_SA_P Parameter: Treatment Value: 2mM SA vs. No Treatment
  misc_feature: MA Experiment ID: 20000185 Result: Down-regulated in Transcription
  misc_feature: MA Experiment 20000185 PARAMETER Experiment Name: At_Roots__P Parameter: Age (day) Value: 7 vs. 21
  misc_feature: MA Experiment 20000185 PARAMETER Experiment Name: At_Roots__P Parameter: Organism Value: A. thaliana
  misc_feature: MA Experiment 20000185 PARAMETER Experiment Name: At_Roots__P Parameter: Tissue Value: Roots vs. Whole Plant
  misc_feature: MA Experiment ID: 20000234 Result: Down-regulated in Transcription
  misc_feature: MA Experiment 20000234 PARAMETER Experiment Name: At_Siliques_P Parameter: Age (day) Value: 21
  misc_feature: MA Experiment 20000234 PARAMETER Experiment Name: At_Siliques_P Parameter: Organism Value: A. thaliana
  misc_feature: MA Experiment 20000234 PARAMETER Experiment Name: At_Siliques_P Parameter: Plant Line Value: WS
  misc_feature: MA Experiment 20000234 PARAMETER Experiment Name: At_Siliques_P Parameter: Tissue Value: Less Than 5mm Siliques vs. Whole Plant
  misc_feature: MA Experiment ID: 20000235 Result: Down-regulated in Transcription
  misc_feature: MA Experiment 20000235 PARAMETER Experiment Name: At_Siliques_P Parameter: Age (day) Value: 21
  misc_feature: MA Experiment 20000235 PARAMETER Experiment Name: At_Siliques_P Parameter: Organism Value: A. thaliana
  misc_feature: MA Experiment 20000235 PARAMETER Experiment Name: At_Siliques_P Parameter: Plant Line Value: WS
  misc_feature: MA Experiment 20000235 PARAMETER Experiment Name: At_Siliques_P Parameter: Tissue Value: 5-10mm Siliques vs. Whole Plant
  misc_feature: MA Experiment ID: 20000264 Result: Down-regulated in Transcription
  misc_feature: MA Experiment 20000264 PARAMETER Experiment Name: At_Open_Flower_P Parameter: Age (day) Value: 21
  misc_feature: MA Experiment 20000264 PARAMETER Experiment Name: At_Open_Flower_P Parameter: Plant Line Value: WS
  misc_feature: MA Experiment 20000264 PARAMETER Experiment Name: At_Open_Flower_P Parameter: Tissue Value: Open Flower vs. Whole Plant
  misc_feature: MA Experiment ID: 20000267 Result: Up-regulated in Transcription
  misc_feature: MA Experiment 20000267 PARAMETER Experiment Name: At_Drought_P Parameter: Age (day) Value: 7
  misc_feature: MA Experiment 20000267 PARAMETER Experiment Name: At_Drought_P Parameter: Organism Value: A. thaliana
  misc_feature: MA Experiment 20000267 PARAMETER Experiment Name: At_Drought_P Parameter: Plant Line Value: WS
  misc_feature: MA Experiment 20000267 PARAMETER Experiment Name: At_Drought_P Parameter: Timepoint (hr) Value: 6
  misc_feature: MA Experiment 20000267 PARAMETER Experiment Name: At_Drought_P Parameter: Tissue Value: Whole Plant
  misc_feature: MA Experiment 20000267 PARAMETER Experiment Name: At_Drought_P Parameter: Treatment Value: Drought vs. No Drought
  misc_feature: MA Experiment ID: 20000268 Result: Up-regulated in Transcription
  misc_feature: MA Experiment 20000268 PARAMETER Experiment Name: At_100mM_NaCl__P Parameter: Age (day) Value: 14
  misc_feature: MA Experiment 20000268 PARAMETER Experiment Name: At_100mM_NaCl__P Parameter: Organism Value: A. thaliana
  misc_feature: MA Experiment 20000268 PARAMETER Experiment Name: At_100mM_NaCl__P Parameter: Plant Line Value: WS
  misc_feature: MA Experiment 20000268 PARAMETER Experiment Name: At_100mM_NaCl__P Parameter: Timepoint (hr) Value: 6
  misc_feature: MA Experiment 20000268 PARAMETER Experiment Name: At_100mM_NaCl__P Parameter: Tissue Value: Whole Plant
  misc_feature: MA Experiment 20000268 PARAMETER Experiment Name: At_100mM_NaCl__P Parameter: Treatment Value: 100mM NaCl vs. No Treatment
  misc_feature: MA Experiment ID: 20000286 Result: Down-regulated in Transcription
  misc_feature: MA Experiment 20000286 PARAMETER Experiment Name: At_Open_Flower_P Parameter: Age (day) Value: 21
  misc_feature: MA Experiment 20000286 PARAMETER Experiment Name: At_Open_Flower_P Parameter: Plant Line Value: WS
  misc_feature: MA Experiment 20000286 PARAMETER Experiment Name: At_Open_Flower_P Parameter: Tissue Value: Half Open vs. Whole Plant
  misc_feature: MA Experiment ID: 20000436 Result: Up-regulated in Transcription
  misc_feature: MA Experiment 20000436 PARAMETER Experiment Name: At_Drought_P Parameter: Age (day) Value: 7
  misc_feature: MA Experiment 20000436 PARAMETER Experiment Name: At_Drought_P Parameter: Organism Value: A. thaliana
  misc_feature: MA Experiment 20000436 PARAMETER Experiment Name: At_Drought_P Parameter: Plant Line Value: WS
  misc_feature: MA Experiment 20000436 PARAMETER Experiment Name: At_Drought_P Parameter: Timepoint (hr) Value: 12
  misc_feature: MA Experiment 20000436 PARAMETER Experiment Name: At_Drought_P Parameter: Tissue Value: Whole Plant
  misc_feature: MA Experiment 20000436 PARAMETER Experiment Name: At_Drought_P Parameter: Treatment Value: Drought vs. No Drought
  misc_feature: MA Experiment ID: 20000437 Result: Up-regulated in Transcription
  misc_feature: MA Experiment 20000437 PARAMETER Experiment Name: At_Drought_P Parameter: Age (day) Value: 8
  misc_feature: MA Experiment 20000437 PARAMETER Experiment Name: At_Drought_P Parameter: Organism Value: A. thaliana
  misc_feature: MA Experiment 20000437 PARAMETER Experiment Name: At_Drought_P Parameter: Plant Line Value: WS
  misc_feature: MA Experiment 20000437 PARAMETER Experiment Name: At_Drought_P Parameter: Timepoint (hr) Value: 24
  misc_feature: MA Experiment 20000437 PARAMETER Experiment Name: At_Drought_P Parameter: Tissue Value: Whole Plant
  misc_feature: MA Experiment 20000437 PARAMETER Experiment Name: At_Drought_P Parameter: Treatment Value: Drought vs. No Drought
  misc_feature: MA Experiment ID: 20000439 Result: Down-regulated in Transcription
  misc_feature: MA Experiment 20000439 PARAMETER Experiment Name: At_Roots__P Parameter: Age (day) Value: 14 vs. 21
  misc_feature: MA Experiment 20000439 PARAMETER Experiment Name: At_Roots__P Parameter: Organism Value: A. thaliana
  misc_feature: MA Experiment 20000439 PARAMETER Experiment Name: At_Roots__P Parameter: Tissue Value: Roots vs. Whole Plant
  misc_feature: MA Experiment ID: 20000441 Result: Up-regulated in Transcription
  misc_feature: MA Experiment 20000441 PARAMETER Experiment Name: At_1uM_BR-BRZ__P Parameter: Tissue Value: Shoot Apices
  misc_feature: MA Experiment 20000441 PARAMETER Experiment Name: At_1uM_BR-BRZ__P Parameter: Treatment Value: 1uM BR vs. No Treatment
  misc_feature: MA Experiment ID: 20000453 Result: Up-regulated in Transcription
  misc_feature: MA Experiment 20000453 PARAMETER Experiment Name: At_100uM_ABA_P Parameter: Age (day) Value: 15
  misc_feature: MA Experiment 20000453 PARAMETER Experiment Name: At_100uM_ABA_P Parameter: Organism Value: A. thaliana
  misc_feature: MA Experiment 20000453 PARAMETER Experiment Name: At_100uM_ABA_P Parameter: Plant Line Value: WS
  misc_feature: MA Experiment 20000453 PARAMETER Experiment Name: At_100uM_ABA_P Parameter: Timepoint (hr) Value: 24
  misc_feature: MA Experiment 20000453 PARAMETER Experiment Name: At_100uM_ABA_P Parameter: Tissue Value: Aerial
  misc_feature: MA Experiment 20000453 PARAMETER Experiment Name: At_100uM_ABA_P Parameter: Treatment Value: 100uM ABA vs. No Treatment
  misc_feature: MA Experiment ID: 20000455 Result: Up-regulated in Transcription
  misc_feature: MA Experiment 20000455 PARAMETER Experiment Name: At_100uM_ABA_P Parameter: Age (day) Value: 16
  misc_feature: MA Experiment 20000455 PARAMETER Experiment Name: At_100uM_ABA_P Parameter: Organism Value: A. thaliana
  misc_feature: MA Experiment 20000455 PARAMETER Experiment Name: At_100uM_ABA_P Parameter: Plant Line Value: WS
  misc_feature: MA Experiment 20000455 PARAMETER Experiment Name: At_100uM_ABA_P Parameter: Timepoint (hr) Value: 48
  misc_feature: MA Experiment 20000455 PARAMETER Experiment Name: At_100uM_ABA_P Parameter: Tissue Value: Aerial
  misc_feature: MA Experiment 20000455 PARAMETER Experiment Name: At_100uM_ABA_P Parameter: Treatment Value: 100uM ABA vs. No Treatment
  misc_feature: MA Experiment ID: 20000496 Result: Up-regulated in Transcription
  misc_feature: MA Experiment 20000496 PARAMETER Experiment Name: At_Guard_Cells_P Parameter: Harvest Date Value: 7/19/2002
  misc_feature: MA Experiment 20000496 PARAMETER Experiment Name: At_Guard_Cells_P Parameter: Organism Value: Canola
  misc_feature: MA Experiment 20000496 PARAMETER Experiment Name: At_Guard_Cells_P Parameter: Tissue Value: Guard Cells vs. Leaves
  misc_feature: MA Experiment ID: 20000573 Result: Up-regulated in Transcription
  misc_feature: MA Experiment 20000573 PARAMETER Experiment Name: At_100uM_ABA_Mutants__P Parameter: Organism Value: A. thaliana
  misc_feature: MA Experiment 20000573 PARAMETER Experiment Name: At_100uM_ABA_Mutants__P Parameter: Plant Line Value: CS22 vs. Ler wt
  misc_feature: MA Experiment 20000573 PARAMETER Experiment Name: At_100uM_ABA_Mutants__P Parameter: Timepoint (hr) Value: N/A
  misc_feature: MA Experiment 20000573 PARAMETER Experiment Name: At_100uM_ABA_Mutants__P Parameter: Tissue Value: Whole Plant
  misc_feature: MA Experiment 20000573 PARAMETER Experiment Name: At_100uM_ABA_Mutants__P Parameter: Treatment Value: None
  misc_feature: MA Experiment ID: 20001247 Result: Up-regulated in Transcription
  misc_feature: MA Experiment 20001247 PARAMETER Experiment Name: At_Far-red-induction_P Parameter: Age (day) Value: 7
  misc_feature: MA Experiment 20001247 PARAMETER Experiment Name: At_Far-red-induction_P Parameter: Light Value: Far-red vs. White
  misc_feature: MA Experiment 20001247 PARAMETER Experiment Name: At_Far-red-induction_P Parameter: Organism Value: A. thaliana
  misc_feature: MA Experiment 20001247 PARAMETER Experiment Name: At_Far-red-induction_P Parameter: Plant Line Value: Columbia
  misc_feature: MA Experiment 20001247 PARAMETER Experiment Name: At_Far-red-induction_P Parameter: Timepoint (hr) Value: 1
  misc_feature: MA Experiment 20001247 PARAMETER Experiment Name: At_Far-red-induction_P Parameter: Tissue Value: Whole Plant
  misc_feature: MA Experiment ID: 20001450 Result: Up-regulated in Transcription
  misc_feature: MA Experiment 20001450 PARAMETER Experiment Name: At_Far-red-induction_P Parameter: Age (day) Value: 7
  misc_feature: MA Experiment 20001450 PARAMETER Experiment Name: At_Far-red-induction_P Parameter: Light Value: Far-red vs. White
  misc_feature: MA Experiment 20001450 PARAMETER Experiment Name: At_Far-red-induction_P Parameter: Organism Value: A. thaliana
  misc_feature: MA Experiment 20001450 PARAMETER Experiment Name: At_Far-red-induction_P Parameter: Plant Line Value: Columbia
  misc_feature: MA Experiment 20001450 PARAMETER Experiment Name: At_Far-red-induction_P Parameter: Timepoint (hr) Value: 8
  misc_feature: MA Experiment 20001450 PARAMETER Experiment Name: At_Far-red-induction_P Parameter: Tissue Value: Whole Plant
  misc_feature: MA Experiment ID: 20001451 Result: Up-regulated in Transcription
  misc_feature: MA Experiment 20001451 PARAMETER Experiment Name: At_Far-red-induction_P Parameter: Age (day) Value: 7
  misc_feature: MA Experiment 20001451 PARAMETER Experiment Name: At_Far-red-induction_P Parameter: Light Value: Far-red vs. White
  misc_feature: MA Experiment 20001451 PARAMETER Experiment Name: At_Far-red-induction_P Parameter: Organism Value: A. thaliana
  misc_feature: MA Experiment 20001451 PARAMETER Experiment Name: At_Far-red-induction_P Parameter: Plant Line Value: Columbia
  misc_feature: MA Experiment 20001451 PARAMETER Experiment Name: At_Far-red-induction_P Parameter: Timepoint (hr) Value: 24
  misc_feature: MA Experiment 20001451 PARAMETER Experiment Name: At_Far-red-induction_P Parameter: Tissue Value: Whole Plant
  misc_feature: MA Experiment ID: 20001554 Result: Up-regulated in Transcription
  misc_feature: MA Experiment 20001554 PARAMETER Experiment Name: At_Drought_Soil_Dry_P Parameter: Age (day) Value: 21
  misc_feature: MA Experiment 20001554 PARAMETER Experiment Name: At_Drought_Soil_Dry_P Parameter: Organism Value: A. thaliana
  misc_feature: MA Experiment 20001554 PARAMETER Experiment Name: At_Drought_Soil_Dry_P Parameter: Plant Line Value: WS
  misc_feature: MA Experiment 20001554 PARAMETER Experiment Name: At_Drought_Soil_Dry_P Parameter: Post Timepoint (hr) Value: None
  misc_feature: MA Experiment 20001554 PARAMETER Experiment Name: At_Drought_Soil_Dry_P Parameter: Post-Treatment Value: None
  misc_feature: MA Experiment 20001554 PARAMETER Experiment Name: At_Drought_Soil_Dry_P Parameter: Timepoint (day) Value: 7
  misc_feature: MA Experiment 20001554 PARAMETER Experiment Name: At_Drought_Soil_Dry_P Parameter: Treatment Value: Drought vs. No Drought
  misc_feature: MA Experiment ID: 20001555 Result: Up-regulated in Transcription
  misc_feature: MA Experiment 20001555 PARAMETER Experiment Name: At_Drought_Soil_Dry_P Parameter: Age (day) Value: 24
  misc_feature: MA Experiment 20001555 PARAMETER Experiment Name: At_Drought_Soil_Dry_P Parameter: Organism Value: A. thaliana
  misc_feature: MA Experiment 20001555 PARAMETER Experiment Name: At_Drought_Soil_Dry_P Parameter: Plant Line Value: WS
  misc_feature: MA Experiment 20001555 PARAMETER Experiment Name: At_Drought_Soil_Dry_P Parameter: Post Timepoint (hr) Value: None
  misc_feature: MA Experiment 20001555 PARAMETER Experiment Name: At_Drought_Soil_Dry_P Parameter: Post-Treatment Value: None
  misc_feature: MA Experiment 20001555 PARAMETER Experiment Name: At_Drought_Soil_Dry_P Parameter: Timepoint (day) Value: 10
  misc_feature: MA Experiment 20001555 PARAMETER Experiment Name: At_Drought_Soil_Dry_P Parameter: Treatment Value: Drought vs. No Drought
  misc_feature: MA Experiment ID: 20001559 Result: Up-regulated in Transcription
  misc_feature: MA Experiment 20001559 PARAMETER Experiment Name: At_Drought_Soil_Dry_P Parameter: Age (day) Value: 28
  misc_feature: MA Experiment 20001559 PARAMETER Experiment Name: At_Drought_Soil_Dry_P Parameter: Organism Value: A. thaliana
  misc_feature: MA Experiment 20001559 PARAMETER Experiment Name: At_Drought_Soil_Dry_P Parameter: Plant Line Value: WS
  misc_feature: MA Experiment 20001559 PARAMETER Experiment Name: At_Drought_Soil_Dry_P Parameter: Post Timepoint (hr) Value: 29
  misc_feature: MA Experiment 20001559 PARAMETER Experiment Name: At_Drought_Soil_Dry_P Parameter: Post-Treatment Value: Re-Water vs. No Drought
  misc_feature: MA Experiment 20001559 PARAMETER Experiment Name: At_Drought_Soil_Dry_P Parameter: Timepoint (day) Value: 14
  misc_feature: MA Experiment 20001559 PARAMETER Experiment Name: At_Drought_Soil_Dry_P Parameter: Treatment Value: Drought vs. No Drought
  misc_feature: MA Experiment ID: 20001757 Result: Down-regulated in Transcription
  misc_feature: MA Experiment 20001757 PARAMETER Experiment Name: At_50mM_NH4NO3_L-to-H_P Parameter: Timepoint (hr) Value: 6
  misc_feature: MA Experiment 20001757 PARAMETER Experiment Name: At_50mM_NH4NO3_L-to-H_P Parameter: Tissue Value: Leaf
  misc_feature: MA Experiment 20001757 PARAMETER Experiment Name: At_50mM_NH4NO3_L-to-H_P Parameter: Treatment Value: 50mM NH4NO3 vs 100mM Mannitol
  misc_feature: MA Experiment ID: 20001904 Result: Up-regulated in Transcription
  misc_feature: MA Experiment 20001904 PARAMETER Experiment Name: At_Drought_Reproduction_P Parameter: Age (day) Value: 37
  misc_feature: MA Experiment 20001904 PARAMETER Experiment Name: At_Drought_Reproduction_P Parameter: Organism Value: A. thaliana
  misc_feature: MA Experiment 20001904 PARAMETER Experiment Name: At_Drought_Reproduction_P Parameter: Plant Line Value: WS
  misc_feature: MA Experiment 20001904 PARAMETER Experiment Name: At_Drought_Reproduction_P Parameter: Timepoint (day) Value: 7
  misc_feature: MA Experiment 20001904 PARAMETER Experiment Name: At_Drought_Reproduction_P Parameter: Tissue Value: Rosettes
  misc_feature: MA Experiment 20001904 PARAMETER Experiment Name: At_Drought_Reproduction_P Parameter: Treatment Value: Drought vs. No Drought
gggcgatctggtttgctagatccaaaacccttgtttctagcttgagacataatctaaatttgtcgacaattctcataaaacgtgattactctcatcgtcccatcttctatacaacttctcagttatcttcaacggcgtatttgagtcccttcggtagcctccgtcatgagtctacggccgtggagacacaggctgatcatttggttcagcagattgatgaagtcgatgcccaggaactggatttcccaggaggcaaagtcggttacacatcggagatgaaattcataccggaatcatcttcaaggaggattccatgttaccgggttcttgacgaagacggacgaatcatccccgatagcgattttattccggtgagtgagaaactcgctgttagaatgtacgaacaaatggcgacgctacaagtaatggatcacatcttctacgaagctcaacgtcaaggaagaatatctttttatcttacttccgtcggagaagaagccattaacatcgcttcagcagctgctctcagtcctgacgacgtcgttttacctcagtaccgagaacctggagttcttttgtggcgtggcttcacgttggaggagtttgctaatcagtgttttgggaacaaagctgattatggcaaaggcagacaaatgccaattcattacggttccaatcgtcttaattacttcactatctcctctccaattgccacgcaacttcctcaagctgctggagttggttattctttgaaaatggacaagaagaatgcttgtactgttacattcatcggagatggtggcacaagcgagggagattttcacgccggattgaattttgcggccgtaatggaagctccggttgtgtttatatgtcggaacaacggttgggcgattagtactcatatctcagaacagtttagaagtgatggaatagttgtgaaaggtcaagcttacggtatcccgaagcatcccgtgtgggacggtaccgatgcacttgcggtttatagtgctgtacgctcagctcgagaaatggctgtaacagaacaaagacctgttctcattgagatgatgacatatagagtaggacatcattctacatcagatgattcaactaagtacagggcggcggatgaaatccagtactggaaaatgtcgagaaaccctgtgaatagatttcggaaatgggtcgaagataacggatggtggagtgaggaagatgaatccaagctaagatctaacgcaagaaaacagcttctgcaagcgattcaggctgcggagaagtgggagaaacaaccattgacagagttgtttaacgatgtatatgatgttaaaccgaagaacctagaagagcaagaacttggtttgaaggaattagtaaagaaacaacctcaagattatcctcctggctttcatgtttgaatctagaggaactgtgtggttaaaatacctcgcggaccgcgaattcgatatcaagcttctcattgcagactatttatattgtccacgtatcgaatagtaatcaagtatcaatgtagagaccagcatttggagc

SEQ ID NO: 97583 - protein, 472 aa, Arabidopsis thaliana
  peptide (1)..(472): Ceres Seq. ID no. 12738992
  misc_feature (133)..(434): Pfam Name: Dehydrogenase E1 component Pfam Description: Dehydrogenase E1 component
  misc_feature (1)..(472): Homolog of NCBI NO: 11357201 NR Description: branched-chain alpha keto-acid dehydrogenase E1
  misc_feature (1)..(472): Homolog of NCBI NO: 15218984 NR Description: branched-chain alpha keto-acid dehydrogenase, protein id: At1g21400.1, supported by cDNA: gi_20466297
  misc_feature (4)..(467): Homolog of NCBI NO: 18415939 NR Description: branched-chain alpha keto-acid dehydrogenase E1
  misc_feature (77)..(467): Homolog of NCBI NO: 9955517 NR Description: branched-chain alpha keto-acid dehydrogenase E1
  misc_feature (65)..(470): Homolog of NCBI NO: 7431561 NR Description: 3-methyl-2-oxobutanoate dehydrogenase (lipoamide)
  misc_feature (244)..(466): Homolog of NCBI NO: 15242835 NR Description: 3-methyl-2-oxobutanoate dehydrogenase-like
  misc_feature (85)..(467): Homolog of NCBI NO: 30145768 NR Description: Hypothetical protein Y39E4A.3 [Caenorhabditis
  misc_feature (81)..(467): Homolog of NCBI NO: 12964598 NR Description: branched-chain alpha-keto acid dehydrogenase
  misc_feature (214)..(467): Homolog of NCBI NO: 17555798 NR Description: Dehydrogenase E1 component (54.9 kD)
  misc_feature (85)..(230): Homolog of NCBI NO: 17555798 NR Description: Dehydrogenase E1 component (54.9 kD)
AIWFARSKTLVSSLRHNLNLSTILIKRDYSHRPIFYTTSQLSSTAYLSPFGSLRHESTAVETQADHLVQQIDEVDAQELDFPGGKVGYTSEMKFIPESSSRRIPCYRVLDEDGRIIPDSDFIPVSEKLAVRMYEQMATLQVMDHIFYEAQRQGRISFYLTSVGEEAINIASAAALSPDDVVLPQYREPGVLLWRGFTLEEFANQCFGNKADYGKGRQMPIHYGSNRLNYFTISSPIATQLPQAAGVGYSLKMDKKNACTVTFIGDGGTSEGDFHAGLNFAAVMEAPVVFICRNNGWAISTHISEQFRSDGIVVKGQAYGIPKHPVWDGTDALAVYSAVRSAREMAVTEQRPVLIEMMTYRVGHHSTSDDSTKYRAADEIQYWKMSRNPVNRFRKWVEDNGWWSEEDESKLRSNARKQLLQAIQAAEKWEKQPLTELFNDVYDVKPKNLEEQELGLKELVKKQPQDYPPGFHV

SEQ ID NO: 97584 - protein, 381 aa, Arabidopsis thaliana
  peptide (1)..(381): Ceres Seq. ID no. 12738993
  misc_feature (42)..(343): Pfam Name: Dehydrogenase E1 component Pfam Description: Dehydrogenase E1 component
  misc_feature (1)..(381): Homolog of NCBI NO: 11357201 NR Description: branched-chain alpha keto-acid dehydrogenase E1
  misc_feature (1)..(381): Homolog of NCBI NO: 15218984 NR Description: branched-chain alpha keto-acid dehydrogenase, protein id: At1g21400.1, supported by cDNA: gi_20466297
  misc_feature (1)..(376): Homolog of NCBI NO: 18415939 NR Description: branched-chain alpha keto-acid dehydrogenase E1
  misc_feature (1)..(376): Homolog of NCBI NO: 9955517 NR Description: branched-chain alpha keto-acid dehydrogenase E1
  misc_feature (1)..(379): Homolog of NCBI NO: 7431561 NR Description: 3-methyl-2-oxobutanoate dehydrogenase (lipoamide)
  misc_feature (153)..(375): Homolog of NCBI NO: 15242835 NR Description: 3-methyl-2-oxobutanoate dehydrogenase-like
  misc_feature (1)..(376): Homolog of NCBI NO: 30145768 NR Description: Hypothetical protein Y39E4A.3 [Caenorhabditis
  misc_feature (1)..(376): Homolog of NCBI NO: 12964598 NR Description: branched-chain alpha-keto acid dehydrogenase
  misc_feature (123)..(376): Homolog of NCBI NO: 17555798 NR Description: Dehydrogenase E1 component (54.9 kD)
  misc_feature (1)..(139): Homolog of NCBI NO: 17555798 NR Description: Dehydrogenase E1 component (54.9 kD)
MKFIPESSSRRIPCYRVLDEDGRIIPDSDFIPVSEKLAVRMYEQMATLQVMDHIFYEAQRQGRISFYLTSVGEEAINIASAAALSPDDVVLPQYREPGVLLWRGFTLEEFANQCFGNKADYGKGRQMPIHYGSNRLNYFTISSPIATQLPQAAGVGYSLKMDKKNACTVTFIGDGGTSEGDFHAGLNFAAVMEAPVVFICRNNGWAISTHISEQFRSDGIVVKGQAYGIPKHPVWDGTDALAVYSAVRSAREMAVTEQRPVLIEMMTYRVGHHSTSDDSTKYRAADEIQYWKMSRNPVNRFRKWVEDNGWWSEEDESKLRSNARKQLLQAIQAAEKWEKQPLTELFNDVYDVKPKNLEEQELGLKELVKKQPQDYPPGFHV

SEQ ID NO: 97585 - protein, 341 aa, Arabidopsis thaliana
  peptide (1)..(341): Ceres Seq. ID no. 12738994
  misc_feature (2)..(303): Pfam Name: Dehydrogenase E1 component Pfam Description: Dehydrogenase E1 component
  misc_feature (1)..(341): Homolog of NCBI NO: 11357201 NR Description: branched-chain alpha keto-acid dehydrogenase E1
  misc_feature (1)..(341): Homolog of NCBI NO: 15218984 NR Description: branched-chain alpha keto-acid dehydrogenase, protein id: At1g21400.1, supported by cDNA: gi_20466297
  misc_feature (1)..(336): Homolog of NCBI NO: 18415939 NR Description: branched-chain alpha keto-acid dehydrogenase E1
  misc_feature (1)..(336): Homolog of NCBI NO: 9955517 NR Description: branched-chain alpha keto-acid dehydrogenase E1
  misc_feature (1)..(339): Homolog of NCBI NO: 7431561 NR Description: 3-methyl-2-oxobutanoate dehydrogenase (lipoamide)
  misc_feature (113)..(335): Homolog of NCBI NO: 15242835 NR Description: 3-methyl-2-oxobutanoate dehydrogenase-like
  misc_feature (1)..(336): Homolog of NCBI NO: 30145768 NR Description: Hypothetical protein Y39E4A.3 [Caenorhabditis
  misc_feature (1)..(336): Homolog of NCBI NO: 12964598 NR Description: branched-chain alpha-keto acid dehydrogenase
  misc_feature (83)..(336): Homolog of NCBI NO: 17555798 NR Description: Dehydrogenase E1 component (54.9 kD)
  misc_feature (1)..(99): Homolog of NCBI NO: 17555798 NR Description: Dehydrogenase E1 component (54.9 kD)
MYEQMATLQVMDHIFYEAQRQGRISFYLTSVGEEAINIASAAALSPDDVVLPQYREPGVLLWRGFTLEEFANQCFGNKADYGKGRQMPIHYGSNRLNYFTISSPIATQLPQAAGVGYSLKMDKKNACTVTFIGDGGTSEGDFHAGLNFAAVMEAPVVFICRNNGWAISTHISEQFRSDGIVVKGQAYGIPKHPVWDGTDALAVYSAVRSAREMAVTEQRPVLIEMMTYRVGHHSTSDDSTKYRAADEIQYWKMSRNPVNRFRKWVEDNGWWSEEDESKLRSNARKQLLQAIQAAEKWEKQPLTELFNDVYDVKPKNLEEQELGLKELVKKQPQDYPPGFHV

SEQ ID NO: 97586 - DNA, 2234 bp, Arabidopsis thaliana
  misc_feature (1)..(2234): Ceres Seq. ID no. 12738995
  misc_feature: MA Experiment ID: 108573 Result: Up-regulated in Transcription
  misc_feature: MA Experiment 108573 PARAMETER Experiment Name: At_Drought_cDNA_P Parameter: Timepoint (hr) Value: 6
  misc_feature: MA Experiment 108573 PARAMETER Experiment Name: At_Drought_cDNA_P Parameter: Tissue Value: Aerial
  misc_feature: MA Experiment 108573 PARAMETER Experiment Name: At_Drought_cDNA_P Parameter: Treatment Value: Drought vs. No Drought
  misc_feature: MA Experiment ID: 108595 Result: Down-regulated in Transcription
  misc_feature: MA Experiment 108595 PARAMETER Experiment Name: At_Ler-pi_Ovule_cDNA_P Parameter: Plant Line Value: null
  misc_feature: MA Experiment ID: 20000068 Result: Down-regulated in Transcription
  misc_feature: MA Experiment ID: 20000069 Result: Down-regulated in Transcription
  misc_feature: MA Experiment 20000069 PARAMETER Experiment Name: At_100uM_ABA_Mutants_cDNA_P Parameter: Plant Line Value: CS23
  misc_feature: MA Experiment 20000069 PARAMETER Experiment Name: At_100uM_ABA_Mutants_cDNA_P Parameter: Timepoint (hr) Value: 6
  misc_feature: MA Experiment 20000069 PARAMETER Experiment Name: At_100uM_ABA_Mutants_cDNA_P Parameter: Tissue Value: Aerial
  misc_feature: MA Experiment 20000069 PARAMETER Experiment Name: At_100uM_ABA_Mutants_cDNA_P Parameter: Treatment Value: 100uM ABA vs. No Treatment
  misc_feature: MA Experiment ID: 20000087 Result: Down-regulated in Transcription
  misc_feature: MA Experiment 20000087 PARAMETER Experiment Name: At_100uM_ABA_Mutants_cDNA_P Parameter: Plant Line Value: WS
  misc_feature: MA Experiment 20000087 PARAMETER Experiment Name: At_100uM_ABA_Mutants_cDNA_P Parameter: Timepoint (hr) Value: 6
  misc_feature: MA Experiment 20000087 PARAMETER Experiment Name: At_100uM_ABA_Mutants_cDNA_P Parameter: Tissue Value: Aerial
  misc_feature: MA Experiment 20000087 PARAMETER Experiment Name: At_100uM_ABA_Mutants_cDNA_P Parameter: Treatment Value: 100uM ABA vs. No Treatment
  misc_feature: MA Experiment ID: 20000113 Result: Down-regulated in Transcription
  misc_feature: MA Experiment 20000113 PARAMETER Experiment Name: At_42deg_Heat_cDNA_P Parameter: Temperature (deg C) Value: 42 vs. 22
  misc_feature: MA Experiment 20000113 PARAMETER Experiment Name: At_42deg_Heat_cDNA_P Parameter: Timepoint (hr) Value: 8
  misc_feature: MA Experiment 20000113 PARAMETER Experiment Name: At_42deg_Heat_cDNA_P Parameter: Tissue Value: Aerial
  misc_feature: MA Experiment ID: 20000224 Result: Down-regulated in Transcription
  misc_feature: Pfam Name: Dynamin_M Pfam Description: Dynamin central region
cggcacgagcttcatcgactcaaattcaaaaactcatctctctctatctctatttctctggttccatagctcaccgtcgcatcgcagatctactccttccgcaataaattttaccggcggaggtatcagatctcgccgatctgttgtagcagctactgtattttgggcttctcatttgatattggggaaacgaggagtagaggacgatggaaaatctgatctctctggttaacaagatacagagagcttgcacggctttaggagaccatggagactccagcgctttacctactctttgggattccttgcctgcgatcgccgtcgttggtggtcagagctcagggaagtcttcagtcctggagagcatcgtgggaaaggactttttaccccgtggatctggcattgttactcgaaggccccttgtcttacagttgcaaaagatcgatgatggaacccgggagtatgcagagtttcttcacctcccgaggaaaaagtttactgattttgctgctgtgaggaaggagattcaagatgagactgacagagagactggacgcagcaaggctatttctagtgttcccattcaccttagcatatactctcccaatgttgtcaacttgacactgatagatcttccagggcttacaaaagttgctgttgatggacaatctgatagtatagtgaaggacattgaaaacatggttcggtcctacattgaaaagcccaactgcatcattttggcaatctcacctgcaaaccaagatcttgctacctcagatgcaattaaaatttcccgtgaggttgatccatcgggggacagaacatttggtgtcttgacaaagattgatcttatggacaaggggacggatgcagtggaaattctggaagggagatcttttaaacttaaatatccgtgggttggtgtcgtcaaccgttcccaagcagatattaacaagaatgtcgacatgattgcggctcggaaaagagagagggagtacttttccaatactactgagtataggcaccttgctaataaaatgggttccgagcatttggcaaagatgctctccaagcatctagaacgtgtgatcaagtcgagaattcctggcattcagtcacttattaacaaaacagtattagagctggaaactgaactaagtcgccttggaaagcctattgcagctgatgcaggggggaagttgtactcaataatggagatatgtcggctttttgatcaaatattcaaagagcatcttgatggagtgcgtgctggtggtgaaaaagtgtacaacgtgtttgataaccagcttcctgcggctctgaagagactccaatttgacaagcagctagcgatggacaacatccggaagctggtcactgaggctgatggttaccagcctcacttgattgctcctgagcaaggttaccgtcgtctcattgagtcttctattgtctccatcagaggccctgctgaagcatctgttgacaccgttcatgctatcttaaaggatctggttcacaagtctgtgaatgaaactgtggaactaaaacaatacccagctctgagagtggaggtgacaaatgcggcgatagagtcgctggataaaatgcgggaaggaagtaagaaagcaacactgcagctggttgacatggagtgcagttacctcactgttgatttcttcaggaaacttccccaggatgttgagaagggtggtaaccccacacactccattttcgaccgctacaacgattcctatctcagacgaatcggatccaatgttttgtcttacgtgaacatggtctgtgctggcctgcggaattcaatccccaagtccatcgtatactgccaagtccgagaagcgaagcgcagtctcctcgaccatttctttgcggagctcggtaccatggatatgaagaggctctcgtcgctattgaacgaagatccagcaatcatggagagacgcagtgccatctcaaagcggctagaattgtatcgagcagcccaatccgagatcgatgctgttgcttggtccaagtgataccggcatgtcatgtccactgttttgctcggttctggtcggtgtggctcagactcggagcagagatttagggtctgtaatttgtataagatgatcttcccgataccatgcagtatcgttttatataacatccacattgtttgtcctacctctatgttttttgtccatcacccgatatgttacgtatcgttttat

SEQ ID NO: 97587 - protein, 610 aa, Arabidopsis thaliana
  peptide (1)..(610): Ceres Seq. ID no. 12738996
  misc_feature: Pfam Name: Dynamin_M Pfam Description: Dynamin central region
  misc_feature (1)..(610): Homolog of NCBI NO: 2129826 NR Description: phragmoplastin 5 - soybean
  misc_feature (1)..(610): Homolog of NCBI NO: 2129825 NR Description: phragmoplastin 12 - soybean
  misc_feature (1)..(610): Homolog of NCBI NO: 5931765 NR Description: phragmoplastin [Nicotiana tabacum]
  misc_feature (1)..(610): Homolog of NCBI NO: 2267213 NR Description: dynamin-like GTP binding protein [Arabidopsis
  misc_feature (74)..(610): Homolog of NCBI NO: 11357274 NR Description: dynamin-like protein - Arabidopsis thaliana
  misc_feature (1)..(123): Homolog of NCBI NO: 11357274 NR Description: dynamin-like protein - Arabidopsis thaliana
  misc_feature (1)..(610): Homolog of NCBI NO: 30695480 NR Description: dynamin-related protein [Arabidopsis thaliana]
  misc_feature (134)..(610): Homolog of NCBI NO: 34911188 NR Description: putative dynamin-like protein [Oryza sativa
  misc_feature (1)..(152): Homolog of NCBI NO: 34911188 NR Description: putative dynamin-like protein [Oryza sativa
  misc_feature (1)..(608): Homolog of NCBI NO: 30689768 NR Description: phragmoplastin -related [Arabidopsis thaliana]
MENLISLVNKIQRACTALGDHGDSSALPTLWDSLPAIAVVGGQSSGKSSVLESIVGKDFLPRGSGIVTRRPLVLQLQKIDDGTREYAEFLHLPRKKFTDFAAVRKEIQDETDRETGRSKAISSVPIHLSIYSPNVVNLTLIDLPGLTKVAVDGQSDSIVKDIENMVRSYIEKPNCIILAISPANQDLATSDAIKISREVDPSGDRTFGVLTKIDLMDKGTDAVEILEGRSFKLKYPWVGVVNRSQADINKNVDMIAARKREREYFSNTTEYRHLANKMGSEHLAKMLSKHLERVIKSRIPGIQSLINKTVLELETELSRLGKPIAADAGGKLYSIMEICRLFDQIFKEHLDGVRAGGEKVYNVFDNQLPAALKRLQFDKQLAMDNIRKLVTEADGYQPHLIAPEQGYRRLIESSIVSIRGPAEASVDTVHAILKDLVHKSVNETVELKQYPALRVEVTNAAIESLDKMREGSKKATLQLVDMECSYLTVDFFRKLPQDVEKGGNPTHSIFDRYNDSYLRRIGSNVLSYVNMVCAGLRNSIPKSIVYCQVREAKRSLLDHFFAELGTMDMKRLSSLLNEDPAIMERRSAISKRLELYRAAQSEIDAVAWSK

SEQ ID NO: 97588 - protein, 446 aa, Arabidopsis thaliana
  peptide (1)..(446): Ceres Seq. ID no. 12738997
  misc_feature: Pfam Name: Dynamin_M Pfam Description: Dynamin central region
  misc_feature (1)..(446): Homolog of NCBI NO: 2129826 NR Description: phragmoplastin 5 - soybean
  misc_feature (1)..(446): Homolog of NCBI NO: 2129825 NR Description: phragmoplastin 12 - soybean
  misc_feature (1)..(446): Homolog of NCBI NO: 5931765 NR Description: phragmoplastin [Nicotiana tabacum]
  misc_feature (1)..(446): Homolog of NCBI NO: 2267213 NR Description: dynamin-like GTP binding protein [Arabidopsis
  misc_feature (1)..(446): Homolog of NCBI NO: 11357274 NR Description: dynamin-like protein - Arabidopsis thaliana
  misc_feature (1)..(446): Homolog of NCBI NO: 30695480 NR Description: dynamin-related protein [Arabidopsis thaliana]
  misc_feature (1)..(446): Homolog of NCBI NO: 34911188 NR Description: putative dynamin-like protein [Oryza sativa
  misc_feature (1)..(444): Homolog of NCBI NO: 30689768 NR Description: phragmoplastin -related [Arabidopsis thaliana]
  misc_feature (1)..(444): Homolog of NCBI NO: 30689765 NR Description: phragmoplastin -related [Arabidopsis thaliana]
  misc_feature (1)..(444): Homolog of NCBI NO: 30689760 NR Description: phragmoplastin -related [Arabidopsis thaliana]
MVRSYIEKPNCIILAISPANQDLATSDAIKISREVDPSGDRTFGVLTKIDLMDKGTDAVEILEGRSFKLKYPWVGVVNRSQADINKNVDMIAARKREREYFSNTTEYRHLANKMGSEHLAKMLSKHLERVIKSRIPGIQSLINKTVLELETELSRLGKPIAADAGGKLYSIMEICRLFDQIFKEHLDGVRAGGEKVYNVFDNQLPAALKRLQFDKQLAMDNIRKLVTEADGYQPHLIAPEQGYRRLIESSIVSIRGPAEASVDTVHAILKDLVHKSVNETVELKQYPALRVEVTNAAIESLDKMREGSKKATLQLVDMECSYLTVDFFRKLPQDVEKGGNPTHSIFDRYNDSYLRRIGSNVLSYVNMVCAGLRNSIPKSIVYCQVREAKRSLLDHFFAELGTMDMKRLSSLLNEDPAIMERRSAISKRLELYRAAQSEIDAVAWSK

SEQ ID NO: 97589 - protein, 395 aa, Arabidopsis thaliana
  peptide (1)..(395): Ceres Seq. ID no. 12738998
  misc_feature: Pfam Name: Dynamin_M Pfam Description: Dynamin central region
  misc_feature (1)..(395): Homolog of NCBI NO: 2129826 NR Description: phragmoplastin 5 - soybean
  misc_feature (1)..(395): Homolog of NCBI NO: 2129825 NR Description: phragmoplastin 12 - soybean
  misc_feature (1)..(395): Homolog of NCBI NO: 5931765 NR Description: phragmoplastin [Nicotiana tabacum]
  misc_feature (1)..(395): Homolog of NCBI NO: 2267213 NR Description: dynamin-like GTP binding protein [Arabidopsis
  misc_feature (1)..(395): Homolog of NCBI NO: 11357274 NR Description: dynamin-like protein - Arabidopsis thaliana
  misc_feature (1)..(395): Homolog of NCBI NO: 30695480 NR Description: dynamin-related protein [Arabidopsis thaliana]
  misc_feature (1)..(395): Homolog of NCBI NO: 34911188 NR Description: putative dynamin-like protein [Oryza sativa
  misc_feature (1)..(393): Homolog of NCBI NO: 30689768 NR Description: phragmoplastin -related [Arabidopsis thaliana]
  misc_feature (1)..(393): Homolog of NCBI NO: 30689765 NR Description: phragmoplastin -related [Arabidopsis thaliana]
  misc_feature (1)..(393): Homolog of NCBI NO: 30689760 NR Description: phragmoplastin -related [Arabidopsis thaliana]
MDKGTDAVEILEGRSFKLKYPWVGVVNRSQADINKNVDMIAARKREREYFSNTTEYRHLANKMGSEHLAKMLSKHLERVIKSRIPGIQSLINKTVLELETELSRLGKPIAADAGGKLYSIMEICRLFDQIFKEHLDGVRAGGEKVYNVFDNQLPAALKRLQFDKQLAMDNIRKLVTEADGYQPHLIAPEQGYRRLIESSIVSIRGPAEASVDTVHAILKDLVHKSVNETVELKQYPALRVEVTNAAIESLDKMREGSKKATLQLVDMECSYLTVDFFRKLPQDVEKGGNPTHSIFDRYNDSYLRRIGSNVLSYVNMVCAGLRNSIPKSIVYCQVREAKRSLLDHFFAELGTMDMKRLSSLLNEDPAIMERRSAISKRLELYRAAQSEIDAVAWSK

SEQ ID NO: 97590 - DNA, 585 bp, Arabidopsis thaliana
  misc_feature (1)..(585): Ceres Seq. ID no. 12739040
  misc_feature: MA Experiment ID: 20000496 Result: Up-regulated in Transcription
  misc_feature: MA Experiment 20000496 PARAMETER Experiment Name: At_Guard_Cells_P Parameter: Harvest Date Value: 7/19/2002
  misc_feature: MA Experiment 20000496 PARAMETER Experiment Name: At_Guard_Cells_P Parameter: Organism Value: Canola
  misc_feature: MA Experiment 20000496 PARAMETER Experiment Name: At_Guard_Cells_P Parameter: Tissue Value: Guard Cells vs. Leaves
ttcatgggccatcataccaagatatgagaatcagagtcaatggaggcgaatgggaaatatatccccaggtcactgctytctgcgtaggaaacgcaaaatactttggtggtggaatgaaaatcacacccaacgccatccctggaaatggaaatcttgaggttgtggttcttcaaaacttcaaatggtatgatttcgtacttaaacttcataagctgtacaacgggactcatctttcggttaacaatgtgacttcaagaagtgtacaaagcatcgaagttgaagagattacagacaatggaagtatytatgtgcagtcagatggagaacatcttggattcctacctagaaagtttcaggtgttacccggtgccatagacataatcagctgatcaaaaccgcagatttcttaggataaacttgtcaagtaaagtgtagaatacttcaactttatattcttcctgtaatatgattcattgtttagcgaatcagatttatgctcgtgttacttgtgtaactcgttactatcactatttattgtgtggtctctgttaaccacaaatagatactttaaaacattttaaagct

SEQ ID NO: 97591 - protein, 128 aa, Arabidopsis thaliana
  peptide (1)..(128): Ceres Seq. ID no. 12739041
  misc_feature (2)..(128): Homolog of NCBI NO: 18406971 NR Description: expressed protein; protein id: At2g46090.1, by cDNA: gi_14423553 [Arabidopsis thaliana]
  misc_feature (5)..(126): Homolog of NCBI NO: 13472344 NR Description: hypothetical protein [Mesorhizobium loti]
  misc_feature (28)..(127): Homolog of NCBI NO: 17230373 NR Description: hypothetical protein [Nostoc sp. PCC 7120]
  misc_feature (12)..(128): Homolog of NCBI NO: 23125055 NR Description: hypothetical protein [Nostoc punctiforme]
  misc_feature (9)..(127): Homolog of NCBI NO: 15643126 NR Description: conserved hypothetical protein [Thermotoga
  misc_feature (9)..(127): Homolog of NCBI NO: 33413155 NR Description: hypothetical protein [Thermotoga sp. RQ2]
  misc_feature (26)..(26): Xaa is any aa, unknown or other
  misc_feature (101)..(101): Xaa is any aa, unknown or other
HGPSYQDMRIRVNGGEWEIYPQVTAXCVGNAKYFGGGMKITPNAIPGNGNLEVVVLQNFKWYDFVLKLHKLYNGTHLSVNNVTSRSVQSIEVEEITDNGSXYVQSDGEHLGFLPRKFQVLPGAIDIIS

SEQ ID NO: 97592 - protein, 121 aa, Arabidopsis thaliana
  peptide (1)..(121): Ceres Seq. ID no. 12739042
  misc_feature (1)..(121): Homolog of NCBI NO: 18406971 NR Description: expressed protein; protein id: At2g46090.1, by cDNA: gi_14423553 [Arabidopsis thaliana]
  misc_feature (1)..(119): Homolog of NCBI NO: 13472344 NR Description: hypothetical protein [Mesorhizobium loti]
  misc_feature (21)..(120): Homolog of NCBI NO: 17230373 NR Description: hypothetical protein [Nostoc sp. PCC 7120]
  misc_feature (5)..(121): Homolog of NCBI NO: 23125055 NR Description: hypothetical protein [Nostoc punctiforme]
  misc_feature (2)..(120): Homolog of NCBI NO: 15643126 NR Description: conserved hypothetical protein [Thermotoga
  misc_feature (2)..(120): Homolog of NCBI NO: 33413155 NR Description: hypothetical protein [Thermotoga sp. RQ2]
  misc_feature (19)..(19): Xaa is any aa, unknown or other
  misc_feature (94)..(94): Xaa is any aa, unknown or other
MRIRVNGGEWEIYPQVTAXCVGNAKYFGGGMKITPNAIPGNGNLEVVVLQNFKWYDFVLKLHKLYNGTHLSVNNVTSRSVQSIEVEEITDNGSXYVQSDGEHLGFLPRKFQVLPGAIDIIS

SEQ ID NO: 97593 - protein, 91 aa, Arabidopsis thaliana
  peptide (1)..(91): Ceres Seq. ID no. 12739043
  misc_feature (1)..(91): Homolog of NCBI NO: 18406971 NR Description: expressed protein; protein id: At2g46090.1, by cDNA: gi_14423553 [Arabidopsis thaliana]
  misc_feature (1)..(89): Homolog of NCBI NO: 13472344 NR Description: hypothetical protein [Mesorhizobium loti]
  misc_feature (1)..(90): Homolog of NCBI NO: 17230373 NR Description: hypothetical protein [Nostoc sp. PCC 7120]
  misc_feature (1)..(91): Homolog of NCBI NO: 23125055 NR Description: hypothetical protein [Nostoc punctiforme]
  misc_feature (1)..(90): Homolog of NCBI NO: 15643126 NR Description: conserved hypothetical protein [Thermotoga
  misc_feature (1)..(90): Homolog of NCBI NO: 33413155 NR Description: hypothetical protein [Thermotoga sp. RQ2]
  misc_feature (64)..(64): Xaa is any aa, unknown or other
MKITPNAIPGNGNLEVVVLQNFKWYDFVLKLHKLYNGTHLSVNNVTSRSVQSIEVEEITDNGSXYVQSDGEHLGFLPRKFQVLPGAIDIIS

SEQ ID NO: 97594 - DNA, 762 bp, Arabidopsis thaliana
  misc_feature (1)..(762): Ceres Seq. ID no. 12739174
  misc_feature: MA Experiment ID: 20000180 Result: Up-regulated in Transcription
  misc_feature: MA Experiment 20000180 PARAMETER Experiment Name: At_Germinating_Seeds_P Parameter: Age (hr) Value: 24 vs. 0
  misc_feature: MA Experiment 20000180 PARAMETER Experiment Name: At_Germinating_Seeds_P Parameter: Tissue Value: Germinating Seeds
  misc_feature: MA Experiment ID: 20000184 Result: Up-regulated in Transcription
  misc_feature: MA Experiment 20000184 PARAMETER Experiment Name: At_Shoots__P Parameter: Age (day) Value: 7
  misc_feature: MA Experiment 20000184 PARAMETER Experiment Name: At_Shoots__P Parameter: Tissue Value: Shoots vs. Whole Plant
  misc_feature: MA Experiment ID: 20000185 Result: Down-regulated in Transcription
  misc_feature: MA Experiment 20000185 PARAMETER Experiment Name: At_Roots__P Parameter: Age (day) Value: 7 vs. 21
  misc_feature: MA Experiment 20000185 PARAMETER Experiment Name: At_Roots__P Parameter: Organism Value: A. thaliana
  misc_feature: MA Experiment 20000185 PARAMETER Experiment Name: At_Roots__P Parameter: Tissue Value: Roots vs. Whole Plant
  misc_feature: MA Experiment ID: 20000264 Result: Down-regulated in Transcription
  misc_feature: MA Experiment 20000264 PARAMETER Experiment Name: At_Open_Flower_P Parameter: Age (day) Value: 21
  misc_feature: MA Experiment 20000264 PARAMETER Experiment Name: At_Open_Flower_P Parameter: Plant Line Value: WS
  misc_feature: MA Experiment 20000264 PARAMETER Experiment Name: At_Open_Flower_P Parameter: Tissue Value: Open Flower vs. Whole Plant
  misc_feature: MA Experiment ID: 20000437 Result: Down-regulated in Transcription
  misc_feature: MA Experiment 20000437 PARAMETER Experiment Name: At_Drought_P Parameter: Age (day) Value: 8
  misc_feature: MA Experiment 20000437 PARAMETER Experiment Name: At_Drought_P Parameter: Organism Value: A. thaliana
  misc_feature: MA Experiment 20000437 PARAMETER Experiment Name: At_Drought_P Parameter: Plant Line Value: WS
  misc_feature: MA Experiment 20000437 PARAMETER Experiment Name: At_Drought_P Parameter: Timepoint (hr) Value: 24
  misc_feature: MA Experiment 20000437 PARAMETER Experiment Name: At_Drought_P Parameter: Tissue Value: Whole Plant
  misc_feature: MA Experiment 20000437 PARAMETER Experiment Name: At_Drought_P Parameter: Treatment Value: Drought vs. No Drought
  misc_feature: MA Experiment ID: 20000438 Result: Up-regulated in Transcription
  misc_feature: MA Experiment 20000438 PARAMETER Experiment Name: At_Shoots__P Parameter: Age (day) Value: 14
  misc_feature: MA Experiment 20000438 PARAMETER Experiment Name: At_Shoots__P Parameter: Tissue Value: Shoots vs. Whole Plant
  misc_feature: MA Experiment ID: 20000439 Result: Down-regulated in Transcription
  misc_feature: MA Experiment 20000439 PARAMETER Experiment Name: At_Roots__P Parameter: Age (day) Value: 14 vs. 21
  misc_feature: MA Experiment 20000439 PARAMETER Experiment Name: At_Roots__P Parameter: Organism Value: A. thaliana
  misc_feature: MA Experiment 20000439 PARAMETER Experiment Name: At_Roots__P Parameter: Tissue Value: Roots vs. Whole Plant
  misc_feature: MA Experiment ID: 20000495 Result: Down-regulated in Transcription
  misc_feature: MA Experiment 20000495 PARAMETER Experiment Name: At_Guard_Cells_P Parameter: Harvest Date Value: 8/2/2002
  misc_feature: MA Experiment 20000495 PARAMETER Experiment Name: At_Guard_Cells_P Parameter: Organism Value: A. thaliana
  misc_feature: MA Experiment 20000495 PARAMETER Experiment Name: At_Guard_Cells_P Parameter: Tissue Value: Guard Cells vs. Leaves
  misc_feature: MA Experiment ID: 20000496 Result: Down-regulated in Transcription
  misc_feature: MA Experiment 20000496 PARAMETER Experiment Name: At_Guard_Cells_P Parameter: Harvest Date Value: 7/19/2002
  misc_feature: MA Experiment 20000496 PARAMETER Experiment Name: At_Guard_Cells_P Parameter: Organism Value: Canola
  misc_feature: MA Experiment 20000496 PARAMETER Experiment Name: At_Guard_Cells_P Parameter: Tissue Value: Guard Cells vs. Leaves
  misc_feature: MA Experiment ID: 20000794 Result: Down-regulated in Transcription
  misc_feature: MA Experiment 20000794 PARAMETER Experiment Name: At_Petals_P Parameter: Age (day) Value: 23-25 days
  misc_feature: MA Experiment 20000794 PARAMETER Experiment Name: At_Petals_P Parameter: Plant Line Value: WS
  misc_feature: MA Experiment 20000794 PARAMETER Experiment Name: At_Petals_P Parameter: Tissue Value: Petals vs. Whole plant
  misc_feature: MA Experiment ID: 20001248 Result: Down-regulated in Transcription
  misc_feature: MA Experiment 20001248 PARAMETER Experiment Name: At_Far-red-induction_P Parameter: Age (day) Value: 7
  misc_feature: MA Experiment 20001248 PARAMETER Experiment Name: At_Far-red-induction_P Parameter: Light Value: Far-red vs. White
  misc_feature: MA Experiment 20001248 PARAMETER Experiment Name: At_Far-red-induction_P Parameter: Organism Value: A. thaliana
  misc_feature: MA Experiment 20001248 PARAMETER Experiment Name: At_Far-red-induction_P Parameter: Plant Line Value: Columbia
  misc_feature: MA Experiment 20001248 PARAMETER Experiment Name: At_Far-red-induction_P Parameter: Timepoint (hr) Value: 4
  misc_feature: MA Experiment 20001248 PARAMETER Experiment Name: At_Far-red-induction_P Parameter: Tissue Value: Whole Plant
  misc_feature: MA Experiment ID: 20001450 Result: Down-regulated in Transcription
  misc_feature: MA Experiment 20001450 PARAMETER Experiment Name: At_Far-red-induction_P Parameter: Age (day) Value: 7
  misc_feature: MA Experiment 20001450 PARAMETER Experiment Name: At_Far-red-induction_P Parameter: Light Value: Far-red vs. White
  misc_feature: MA Experiment 20001450 PARAMETER Experiment Name: At_Far-red-induction_P Parameter: Organism Value: A. thaliana
  misc_feature: MA Experiment 20001450 PARAMETER Experiment Name: At_Far-red-induction_P Parameter: Plant Line Value: Columbia
  misc_feature: MA Experiment 20001450 PARAMETER Experiment Name: At_Far-red-induction_P Parameter: Timepoint (hr) Value: 8
  misc_feature: MA Experiment 20001450 PARAMETER Experiment Name: At_Far-red-induction_P Parameter: Tissue Value: Whole Plant
  misc_feature: MA Experiment ID: 20001451 Result: Down-regulated in Transcription
  misc_feature: MA Experiment 20001451 PARAMETER Experiment Name: At_Far-red-induction_P Parameter: Age (day) Value: 7
  misc_feature: MA Experiment 20001451 PARAMETER Experiment Name: At_Far-red-induction_P Parameter: Light Value: Far-red vs. White
  misc_feature: MA Experiment 20001451 PARAMETER Experiment Name: At_Far-red-induction_P Parameter: Organism Value: A. thaliana
  misc_feature: MA Experiment 20001451 PARAMETER Experiment Name: At_Far-red-induction_P Parameter: Plant Line Value: Columbia
  misc_feature: MA Experiment 20001451 PARAMETER Experiment Name: At_Far-red-induction_P Parameter: Timepoint (hr) Value: 24
  misc_feature: MA Experiment 20001451 PARAMETER Experiment Name: At_Far-red-induction_P Parameter: Tissue Value: Whole Plant
  misc_feature: MA Experiment ID: 20001555 Result: Down-regulated in Transcription
  misc_feature: MA Experiment 20001555 PARAMETER Experiment Name: At_Drought_Soil_Dry_P Parameter: Age (day) Value: 24
  misc_feature: MA Experiment 20001555 PARAMETER Experiment Name: At_Drought_Soil_Dry_P Parameter: Organism Value: A. thaliana
  misc_feature: MA Experiment 20001555 PARAMETER Experiment Name: At_Drought_Soil_Dry_P Parameter: Plant Line Value: WS
  misc_feature: MA Experiment 20001555 PARAMETER Experiment Name: At_Drought_Soil_Dry_P Parameter: Post Timepoint (hr) Value: None
  misc_feature: MA Experiment 20001555 PARAMETER Experiment Name: At_Drought_Soil_Dry_P Parameter: Post-Treatment Value: None
  misc_feature: MA Experiment 20001555 PARAMETER Experiment Name: At_Drought_Soil_Dry_P Parameter: Timepoint (day) Value: 10
  misc_feature: MA Experiment 20001555 PARAMETER Experiment Name: At_Drought_Soil_Dry_P Parameter: Treatment Value: Drought vs. No Drought
  misc_feature: MA Experiment ID: 20001757 Result: Up-regulated in Transcription
  misc_feature: MA Experiment 20001757 PARAMETER Experiment Name: At_50mM_NH4NO3_L-to-H_P Parameter: Timepoint (hr) Value: 6
  misc_feature: MA Experiment 20001757 PARAMETER Experiment Name: At_50mM_NH4NO3_L-to-H_P Parameter: Tissue Value: Leaf
  misc_feature: MA Experiment 20001757 PARAMETER Experiment Name: At_50mM_NH4NO3_L-to-H_P Parameter: Treatment Value: 50mM NH4NO3 vs 100mM Mannitol
  misc_feature: MA Experiment ID: 20001904 Result: Down-regulated in Transcription
  misc_feature: MA Experiment 20001904 PARAMETER Experiment Name: At_Drought_Reproduction_P Parameter: Age (day) Value: 37
  misc_feature: MA Experiment 20001904 PARAMETER Experiment Name: At_Drought_Reproduction_P Parameter: Organism Value: A. thaliana
  misc_feature: MA Experiment 20001904 PARAMETER Experiment Name: At_Drought_Reproduction_P Parameter: Plant Line Value: WS
  misc_feature: MA Experiment 20001904 PARAMETER Experiment Name: At_Drought_Reproduction_P Parameter: Timepoint (day) Value: 7
  misc_feature: MA Experiment 20001904 PARAMETER Experiment Name: At_Drought_Reproduction_P Parameter: Tissue Value: Rosettes
  misc_feature: MA Experiment 20001904 PARAMETER Experiment Name: At_Drought_Reproduction_P Parameter: Treatment Value: Drought vs. No Drought
  misc_feature: MA Experiment ID: 20001905 Result: Down-regulated in Transcription
  misc_feature: MA Experiment 20001905 PARAMETER Experiment Name: At_Drought_Reproduction_P Parameter: Age (day) Value: 40
  misc_feature: MA Experiment 20001905 PARAMETER Experiment Name: At_Drought_Reproduction_P Parameter: Organism Value: A. thaliana
  misc_feature: MA Experiment 20001905 PARAMETER Experiment Name: At_Drought_Reproduction_P Parameter: Plant Line Value: WS
  misc_feature: MA Experiment 20001905 PARAMETER Experiment Name: At_Drought_Reproduction_P Parameter: Timepoint (day) Value: 10
  misc_feature: MA Experiment 20001905 PARAMETER Experiment Name: At_Drought_Reproduction_P Parameter: Tissue Value: Rosettes
  misc_feature: MA Experiment 20001905 PARAMETER Experiment Name: At_Drought_Reproduction_P Parameter: Treatment Value: Drought vs. No Drought
  misc_feature: MA Experiment ID: 20001906 Result: Down-regulated in Transcription
  misc_feature: MA Experiment 20001906 PARAMETER Experiment Name: At_Drought_Reproduction_P Parameter: Age (day) Value: 35
  misc_feature: MA Experiment 20001906 PARAMETER Experiment Name: At_Drought_Reproduction_P Parameter: Organism Value: A. thaliana
  misc_feature: MA Experiment 20001906 PARAMETER Experiment Name: At_Drought_Reproduction_P Parameter: Plant Line Value: WS
  misc_feature: MA Experiment 20001906 PARAMETER Experiment Name: At_Drought_Reproduction_P Parameter: Timepoint (day) Value: 5
  misc_feature: MA Experiment 20001906 PARAMETER Experiment Name: At_Drought_Reproduction_P Parameter: Tissue Value: Siliques
  misc_feature: MA Experiment 20001906 PARAMETER Experiment Name: At_Drought_Reproduction_P Parameter: Treatment Value: Drought vs. No Drought
  misc_feature: MA Experiment ID: 20001907 Result: Down-regulated in Transcription
  misc_feature: MA Experiment 20001907 PARAMETER Experiment Name: At_Drought_Reproduction_P Parameter: Age (day) Value: 37
  misc_feature: MA Experiment 20001907 PARAMETER Experiment Name: At_Drought_Reproduction_P Parameter: Organism Value: A. thaliana
  misc_feature: MA Experiment 20001907 PARAMETER Experiment Name: At_Drought_Reproduction_P Parameter: Plant Line Value: WS
  misc_feature: MA Experiment 20001907 PARAMETER Experiment Name: At_Drought_Reproduction_P Parameter: Timepoint (day) Value: 7
  misc_feature: MA Experiment 20001907 PARAMETER Experiment Name: At_Drought_Reproduction_P Parameter: Tissue Value: Siliques
  misc_feature: MA Experiment 20001907 PARAMETER Experiment Name: At_Drought_Reproduction_P Parameter: Treatment Value: Drought vs. No Drought
aagtcagtaagtaaacgagcaaaagaagaagagaaacaacaagaagtagtaatggcttcctctatgctctcctccgccgctgtggttacatccccggctcaggccaccatggtcgctccattcaccggcttgaagtcatccgctgcattcccggtcacccgcaagaccaacaaggacatcacttccatcgcaagcaacgggggaagagttagctgcatgaaggtgtggccaccaattggaaagaagaagtttgagactctatcttacctccctgaccttagtgacgtcgaattggctaaggaagttgactaccttctccgcaacaagtggattccttgtgttgaattcgagttagagcacggatttgtgtaccgtgagcacggaaacactcccggatactacgatggacggtactggacaatgtggaagcttccattgttcggatgcaccgactccgctcaagtgttgaaggaagttgaagaatgcaagaaggagtacccgggcgccttcattaggatcatcggattcgacaacacccgtcaagtccaatgcatcagtttcattgcctacaagcccccaagcttcaccgaagcttaatttcttttctaaaacattcttatgaattatctctgctcatttcatttcctattgtctgtgttctttttctctttatgagacaatttctatcggattgtcaaatgtctgatttatgaatatgtaatttatatatccgtgcgtcttgattttttccgatggttaact

SEQ ID NO: 97595 - protein, 198 aa, Arabidopsis thaliana; identical to SEQ ID NO: 36038
  peptide (1)..(198): Ceres Seq. ID no. 12739175
  misc_feature (18)..(198): Homolog of NCBI NO: 15240901 NR Description: ribulose bisphosphate carboxylase small chain 3b (RuBisCO small subunit 3b) (sp|P10798); protein id: At5g38410.1, by cDNA: gi_13430423, supported by cDNA: gi_15293182, supported
  misc_feature (18)..(198): Homolog of NCBI NO: 68060 NR Description: ribulose-bisphosphate carboxylase (EC 4.1.1.39)
  misc_feature (18)..(198): Homolog of NCBI NO: 68061 NR Description: ribulose-bisphosphate carboxylase (EC 4.1.1.39)
  misc_feature (18)..(198): Homolog of NCBI NO: 15240912 NR Description: ribulose bisphosphate carboxylase small chain 1b (RuBisCO small subunit 1b) (sp|P10796); protein id: At5g38430.1, by cDNA: gi_15294183 [Arabidopsis thaliana]
  misc_feature (18)..(198): Homolog of NCBI NO: 15240903 NR Description: ribulose bisphosphate carboxylase small chain 2b (RuBisCO small subunit 2b) (sp|P10797); protein id: At5g38420.1, by cDNA: gi_16649138, supported by cDNA: gi_17064721, supported
  misc_feature (18)..(198): Homolog of NCBI NO: 132154 NR Description: Ribulose bisphosphate carboxylase small chain,
  misc_feature (18)..(198): Homolog of NCBI NO: 132091 NR Description: Ribulose bisphosphate carboxylase small chain F1,
  misc_feature (18)..(198): Homolog of NCBI NO: 266891 NR Description: Ribulose bisphosphate carboxylase small chain,
  misc_feature (18)..(198): Homolog of NCBI NO: 480983 NR Description: ribulose-bisphosphate carboxylase (EC 4.1.1.39)
  misc_feature (18)..(196): Homolog of NCBI NO: 15219826 NR Description: ribulose-bisphosphate carboxylase small unit, protein id: At1g67090.1, supported by cDNA: gi_11762169, by cDNA: gi_13358196, supported by cDNA: gi_15294199, supported

SEQ ID NO: 97596 - protein, 181 aa, Arabidopsis thaliana; identical to SEQ ID NO: 36039
  peptide (1)..(181): Ceres Seq. ID no. 12739176
  misc_feature (1)..(181): Homolog of NCBI NO: 15240901 NR Description: ribulose bisphosphate carboxylase small chain 3b (RuBisCO small subunit 3b) (sp|P10798); protein id: At5g38410.1, by cDNA: gi_13430423, supported by cDNA: gi_15293182, supported
  misc_feature (1)..(181): Homolog of NCBI NO: 68060 NR Description: ribulose-bisphosphate carboxylase (EC 4.1.1.39)
  misc_feature (1)..(181): Homolog of NCBI NO: 68061 NR Description: ribulose-bisphosphate carboxylase (EC 4.1.1.39)
  misc_feature (1)..(181): Homolog of NCBI NO: 15240912 NR Description: ribulose bisphosphate carboxylase small chain 1b (RuBisCO small subunit 1b) (sp|P10796); protein id: At5g38430.1, by cDNA: gi_15294183 [Arabidopsis thaliana]
  misc_feature (1)..(181): Homolog of NCBI NO: 15240903 NR Description: ribulose bisphosphate carboxylase small chain 2b (RuBisCO small subunit 2b) (sp|P10797); protein id: At5g38420.1, by cDNA: gi_16649138, supported by cDNA: gi_17064721, supported
  misc_feature (1)..(181): Homolog of NCBI NO: 132154 NR Description: Ribulose bisphosphate carboxylase small chain,
  misc_feature (1)..(181): Homolog of NCBI NO: 132091 NR Description: Ribulose bisphosphate carboxylase small chain F1,
  misc_feature (1)..(181): Homolog of NCBI NO: 266891 NR Description: Ribulose bisphosphate carboxylase small chain,
  misc_feature (1)..(181): Homolog of NCBI NO: 480983 NR Description: ribulose-bisphosphate carboxylase (EC 4.1.1.39)
  misc_feature (1)..(179): Homolog of NCBI NO: 15219826 NR Description: ribulose-bisphosphate carboxylase small unit, protein id: At1g67090.1, supported by cDNA: gi_11762169, by cDNA: gi_13358196, supported by cDNA: gi_15294199, supported

SEQ ID NO: 97597 - protein, 177 aa, Arabidopsis thaliana; identical to SEQ ID NO: 36040
  peptide (1)..(177): Ceres Seq. ID no. 12739177
  misc_feature (1)..(177): Homolog of NCBI NO: 15240901 NR Description: ribulose bisphosphate carboxylase small chain 3b (RuBisCO small subunit 3b) (sp|P10798); protein id: At5g38410.1, by cDNA: gi_13430423, supported by cDNA: gi_15293182, supported
  misc_feature (1)..(177): Homolog of NCBI NO: 68060 NR Description: ribulose-bisphosphate carboxylase (EC 4.1.1.39)
  misc_feature (1)..(177): Homolog of NCBI NO: 68061 NR Description: ribulose-bisphosphate carboxylase (EC 4.1.1.39)
  misc_feature (1)..(177): Homolog of NCBI NO: 15240912 NR Description: ribulose bisphosphate carboxylase small chain 1b (RuBisCO small subunit 1b) (sp|P10796); protein id: At5g38430.1, by cDNA: gi_15294183 [Arabidopsis thaliana]
  misc_feature (1)..(177): Homolog of NCBI NO: 15240903 NR Description: ribulose bisphosphate carboxylase small chain 2b (RuBisCO small subunit 2b) (sp|P10797); protein id: At5g38420.1, by cDNA: gi_16649138, supported by cDNA: gi_17064721, supported
  misc_feature (1)..(177): Homolog of NCBI NO: 132154 NR Description: Ribulose bisphosphate carboxylase small chain,
  misc_feature (1)..(177): Homolog of NCBI NO: 132091 NR Description: Ribulose bisphosphate carboxylase small chain F1,
  misc_feature (1)..(177): Homolog of NCBI NO: 266891 NR Description: Ribulose bisphosphate carboxylase small chain,
  misc_feature (1)..(177): Homolog of NCBI NO: 480983 NR Description: ribulose-bisphosphate carboxylase (EC 4.1.1.39)
  misc_feature (1)..(175): Homolog of NCBI NO: 15219826 NR Description: ribulose-bisphosphate carboxylase small unit, protein id: At1g67090.1, supported by cDNA: gi_11762169, by cDNA: gi_13358196, supported by cDNA: gi_15294199, supported

SEQ ID NO: 97598 - DNA, 1027 bp, Arabidopsis thaliana
  misc_feature (1)..(1027): Ceres Seq. ID no. 12739208
  misc_feature: MA Experiment ID: 108462 Result: Up-regulated in Transcription
  misc_feature: MA Experiment 108462 PARAMETER Experiment Name: At_Germinating_Seeds_cDNA_P Parameter: Age (day) Value: 2 vs. 0
  misc_feature: MA Experiment 108462 PARAMETER Experiment Name: At_Germinating_Seeds_cDNA_P Parameter: Tissue Value: Germinating Seeds
  misc_feature: MA Experiment ID: 108464 Result: Up-regulated in Transcription
  misc_feature: MA Experiment 108464 PARAMETER Experiment Name: At_Germinating_Seeds_cDNA_P Parameter: Age (day) Value: 4 vs. 0
  misc_feature: MA Experiment 108464 PARAMETER Experiment Name: At_Germinating_Seeds_cDNA_P Parameter: Tissue Value: Germinating Seeds
  misc_feature: MA Experiment ID: 108488 Result: Up-regulated in Transcription
  misc_feature: MA Experiment ID: 20000111 Result: Up-regulated in Transcription
  misc_feature: MA Experiment 20000111 PARAMETER Experiment Name: At_42deg_Heat_cDNA_P Parameter: Temperature (deg C) Value: 42 vs. 22
  misc_feature: MA Experiment 20000111 PARAMETER Experiment Name: At_42deg_Heat_cDNA_P Parameter: Timepoint (hr) Value: 6
  misc_feature: MA Experiment 20000111 PARAMETER Experiment Name: At_42deg_Heat_cDNA_P Parameter: Tissue Value: Aerial
  misc_feature: MA Experiment ID: 20000314 Result: Down-regulated in Transcription
  misc_feature: MA Experiment 20000314 PARAMETER Experiment Name: At_14day_Shoots-Roots_Sub_P Parameter: Age (day) Value: 14
  misc_feature: MA Experiment 20000314 PARAMETER Experiment Name: At_14day_Shoots-Roots_Sub_P Parameter: Organism Value: A. thaliana
  misc_feature: MA Experiment 20000314 PARAMETER Experiment Name: At_14day_Shoots-Roots_Sub_P Parameter: Plant Line Value: WS
  misc_feature: MA Experiment 20000314 PARAMETER Experiment Name: At_14day_Shoots-Roots_Sub_P Parameter: Tissue Value: Roots vs. Whole Plant
  misc_feature: MA Experiment ID: 20000315 Result: Up-regulated in Transcription
  misc_feature: MA Experiment 20000315 PARAMETER Experiment Name: At_14day_Shoots-Roots_Sub_P Parameter: Age (day) Value: 14
  misc_feature: MA Experiment 20000315 PARAMETER Experiment Name: At_14day_Shoots-Roots_Sub_P Parameter: Organism Value: A. thaliana
  misc_feature: MA Experiment 20000315 PARAMETER Experiment Name: At_14day_Shoots-Roots_Sub_P Parameter: Plant Line Value: WS
  misc_feature: MA Experiment 20000315 PARAMETER Experiment Name: At_14day_Shoots-Roots_Sub_P Parameter: Tissue Value: Shoots vs. Whole Plant
  misc_feature: MA Experiment ID: 20000328 Result: Up-regulated in Transcription
  misc_feature: MA Experiment 20000328 PARAMETER Experiment Name: At_42deg_Heat_Sub_P Parameter: Age (day) Value: 14
  misc_feature: MA Experiment 20000328 PARAMETER Experiment Name: At_42deg_Heat_Sub_P Parameter: Organism Value: A. thaliana
  misc_feature: MA Experiment 20000328 PARAMETER Experiment Name: At_42deg_Heat_Sub_P Parameter: Plant Line Value: WS
  misc_feature: MA Experiment 20000328 PARAMETER Experiment Name: At_42deg_Heat_Sub_P Parameter: Temperature (deg C) Value: 42 vs. 22
  misc_feature: MA Experiment 20000328 PARAMETER Experiment Name: At_42deg_Heat_Sub_P Parameter: Timepoint (hr) Value: 6
  misc_feature: MA Experiment 20000328 PARAMETER Experiment Name: At_42deg_Heat_Sub_P Parameter: Tissue Value: Aerial
actctcactcacaagttagtcataaaaaaaaaaaaaacacaaaaaagtttcaatggccgcctcaacaatggctctctcctcccctgctttcgccggaaaggctgtgaacctttcccctgcggcatcagaagtccttggaagcggccgtgtgacaatgaggaagactgttgccaagccaaagggtccatcaggcagcccatggtacggatccgaccgagtcaagtacttgggtccattctctggcgagtcacccagctaccttaccggagagttccctggagactacggatgggacacagctggtctatccgctgaccccgagacattcgcaaggaaccgtgagctagaagttatccacagcaggtgggccatgctcggagccctaggctgcgtcttccctgagcttttggccaggaacggagtcaagtttggagaggcagtttggttcaaggctggttcacagatcttcagcgatggagggctcgattacttgggaaaccctagcttggttcacgctcagagcattttggccatttgggccacacaagttattttgatgggagccgttgaaggttacagagtcgcaggaaatgggccattgggagaggccgaggacttgctttaccccggtggcagtttcgacccattgggtttggctaccgacccagaggccttcgctgagttgaaggtaaaggagctcaagaacggaagattggctatgttctctatgtttggattcttcgttcaagccatcgtcactggtaagggaccgatagagaaccttgctgaccatttggccgatccagtcaacaacaacgcttgggcctttgccaccaactttgttcccggaaagtgagccaagttctatctgtttgtaatttacttttctttcaatcttttgaattcgagtgagagacaggaggagaaagagtaggtttgtgtttgtggtggatggtagagactttcagatgtaaatttgcaaagactttgtatgatttgtcattaatcaaataactcattgttctct

SEQ ID NO: 97599 - protein, 267 aa, Arabidopsis thaliana; identical to SEQ ID NO: 21212
  peptide (1)..(267): Ceres Seq. ID no. 12739209
  misc_feature (65)..(234): Pfam Name: Chlorophyll A-B binding protein Pfam Description: Chlorophyll A-B binding protein
  misc_feature (1)..(267): Homolog of NCBI NO: 18397286 NR Description: photosystem II type I chlorophyll a /b binding putative; protein id: At1g29910.1, supported by cDNA: gi_17473827
  misc_feature (1)..(267): Homolog of NCBI NO: 15220615 NR Description: light-harvesting chlorophyll a/b binding protein; id: At1g29930.1, supported by cDNA: gi_15010743, supported by
  misc_feature (1)..(267): Homolog of NCBI NO: 17473828 NR Description: chlorophyll a/b-binding protein [Arabidopsis
  misc_feature (1)..(267): Homolog of NCBI NO: 18403546 NR Description: photosystem II type I chlorophyll a /b binding protein id: At2g34420.1, supported by cDNA: gi_13926259, by cDNA: gi_14517451, supported by cDNA: gi_15027898, supported
  misc_feature (1)..(267): Homolog of NCBI NO: 115778 NR Description: Chlorophyll A-B binding protein 1, chloroplast
  misc_feature (1)..(267): Homolog of NCBI NO: 18403549 NR Description: photosystem II type I chlorophyll a /b binding protein id: At2g34430.1, supported by cDNA: 23727., supported by
  misc_feature (1)..(267): Homolog of NCBI NO: 18266039 NR Description: chlorophyll a/b binding protein [Brassica
  misc_feature (1)..(267): Homolog of NCBI NO: 21592428 NR Description: putative photosystem II type I chlorophyll a b
  misc_feature (20)..(267): Homolog of NCBI NO: 12324161 NR Description: chlorophyll A-B-binding protein 2 precursor, 5'
  misc_feature (1)..(267): Homolog of NCBI NO: 115819 NR Description: Chlorophyll A-B binding protein 1B, chloroplast

SEQ ID NO: 97600 - protein, 262 aa, Arabidopsis thaliana; identical to SEQ ID NO: 21213
  peptide (1)..(262): Ceres Seq. ID no. 12739210
  misc_feature (60)..(229): Pfam Name: Chlorophyll A-B binding protein Pfam Description: Chlorophyll A-B binding protein
  misc_feature (1)..(262): Homolog of NCBI NO: 18397286 NR Description: photosystem II type I chlorophyll a /b binding putative; protein id: At1g29910.1, supported by cDNA: gi_17473827
  misc_feature (1)..(262): Homolog of NCBI NO: 15220615 NR Description: light-harvesting chlorophyll a/b binding protein; id: At1g29930.1, supported by cDNA: gi_15010743, supported by
  misc_feature (1)..(262): Homolog of NCBI NO: 17473828 NR Description: chlorophyll a/b-binding protein [Arabidopsis
  misc_feature (1)..(262): Homolog of NCBI NO: 18403546 NR Description: photosystem II type I chlorophyll a /b binding protein id: At2g34420.1, supported by cDNA: gi_13926259, by cDNA: gi_14517451, supported by cDNA: gi_15027898, supported
  misc_feature (1)..(262): Homolog of NCBI NO: 115778 NR Description: Chlorophyll A-B binding protein 1, chloroplast
  misc_feature (1)..(262): Homolog of NCBI NO: 18403549 NR Description: photosystem II type I chlorophyll a /b binding protein id: At2g34430.1, supported by cDNA: 23727., supported by
  misc_feature (1)..(262): Homolog of NCBI NO: 18266039 NR Description: chlorophyll a/b binding protein [Brassica
  misc_feature (1)..(262): Homolog of NCBI NO: 21592428 NR Description: putative photosystem II type I chlorophyll a b
  misc_feature (15)..(262): Homolog of NCBI NO: 12324161 NR Description: chlorophyll A-B-binding protein 2 precursor, 5'
  misc_feature (1)..(262): Homolog of NCBI NO: 115819 NR Description: Chlorophyll A-B binding protein 1B, chloroplast

SEQ ID NO: 97601 - protein, 233 aa, Arabidopsis thaliana; identical to SEQ ID NO: 21214
  peptide (1)..(233): Ceres Seq. ID no. 12739211
  misc_feature (31)..(200): Pfam Name: Chlorophyll A-B binding protein Pfam Description: Chlorophyll A-B binding protein
  misc_feature (1)..(233): Homolog of NCBI NO: 18397286 NR Description: photosystem II type I chlorophyll a /b binding putative; protein id: At1g29910.1, supported by cDNA: gi_17473827
  misc_feature (1)..(233): Homolog of NCBI NO: 15220615 NR Description: light-harvesting chlorophyll a/b binding protein; id: At1g29930.1, supported by cDNA: gi_15010743, supported by
  misc_feature (1)..(233): Homolog of NCBI NO: 17473828 NR Description: chlorophyll a/b-binding protein [Arabidopsis
  misc_feature (1)..(233): Homolog of NCBI NO: 18403546 NR Description: photosystem II type I chlorophyll a /b binding protein id: At2g34420.1, supported by cDNA: gi_13926259, by cDNA: gi_14517451, supported by cDNA: gi_15027898, supported
  misc_feature (1)..(233): Homolog of NCBI NO: 115778 NR Description: Chlorophyll A-B binding protein 1, chloroplast
  misc_feature (1)..(233): Homolog of NCBI NO: 18403549 NR Description: photosystem II type I chlorophyll a /b binding protein id: At2g34430.1, supported by cDNA: 23727., supported by
  misc_feature (1)..(233): Homolog of NCBI NO: 18266039 NR Description: chlorophyll a/b binding protein [Brassica
  misc_feature (1)..(233): Homolog of NCBI NO: 21592428 NR Description: putative photosystem II type I chlorophyll a b
  misc_feature (1)..(233): Homolog of NCBI NO: 12324161 NR Description: chlorophyll A-B-binding protein 2 precursor, 5'
  misc_feature (1)..(233): Homolog of NCBI NO: 115819 NR Description: Chlorophyll A-B binding protein 1B, chloroplast

SEQ ID NO: 97602 - DNA, 2374 bp, Arabidopsis thaliana
  misc_feature (1)..(2374): Ceres Seq. ID no. 12739212
  misc_feature: MA Experiment ID: 20000328 Result: Up-regulated in Transcription
  misc_feature: MA Experiment 20000328 PARAMETER Experiment Name: At_42deg_Heat_Sub_P Parameter: Age (day) Value: 14
  misc_feature: MA Experiment 20000328 PARAMETER Experiment Name: At_42deg_Heat_Sub_P Parameter: Organism Value: A. thaliana
  misc_feature: MA Experiment 20000328 PARAMETER Experiment Name: At_42deg_Heat_Sub_P Parameter: Plant Line Value: WS
  misc_feature: MA Experiment 20000328 PARAMETER Experiment Name: At_42deg_Heat_Sub_P Parameter: Temperature (deg C) Value: 42 vs. 22
  misc_feature: MA Experiment 20000328 PARAMETER Experiment Name: At_42deg_Heat_Sub_P Parameter: Timepoint (hr) Value: 6
  misc_feature: MA Experiment 20000328 PARAMETER Experiment Name: At_42deg_Heat_Sub_P Parameter: Tissue Value: Aerial
gtatcaatcaacacttctctgctctctaaagaaaattttgctctctttatctctcgatttgattcataaaccctagctcttagattttttttccgatcaacgagaatggcggacgcagaaacctttgctttccaagctgagatcaaccagttgctctccctcatcatcaataccttttactctaacaaggagatcttccttcgtgaactcatcagtaactcttctgatgctttggacaagattaggtttgagtccttgacagacaagagcaagctcgatggtcagccagagctcttcattcacatcattcccgacaagactaacaacaccttgacgattatcgatagtggtattgggatgaccaaggctgatctggtgaacaaccttggaacaattgcaagatctggaaccaaagaattcatggaggcgttggctgctggagctgatgttagcatgattggacagtttggtgttggtttctactctgcttacttggttgctgacaaggttgttgttactaccaagcacaatgacgatgagcagtacgtgtgggagtctcaggccggtggatctttcaccgtcaccagagacacctctggtgaggctcttggtagaggaactaagatggtcctttacctcaaggaagaccagatggagtacattgaggagcgaaggcttaaggatttggtgaagaagcactctgagttcatcagctacccaatctctctctggattgagaagaccattgagaaggagatctctgatgatgaagaggaggaagagaagaaggatgaggaaggcaaggttgaggaagttgatgaggagaaagaaaaggaggagaagaaaaagaagaagattaaggaggtttctcatgagtgggatttggtgaacaagcagaaaccgatttggatgaggaagccagaggagatcaacaaggaggagtacgctgctttctacaagagtttgagcaatgactgggaagagcatttggctgtgaagcatttctcagttgaaggacagcttgagttcaaagctatcctctttgttcccaagagagctccttttgatctctttgacactaagaagaagcccaacaacatcaagctctatgtccgtcgtgtcttcatcatggacaactgtgaagacatcattcctgagtaccttgggtttgtcaagggtattgttgactctgaagatcttcctctcaacatctcaagagaaacattgcagcagaacaagatcctcaaggtcatccgcaagaaccttgtgaagaagtgtcttgagctcttctttgagattgctgagaacaaggaggactacaacaagttctatgaggctttctctaagaacctgaagctcggtatccatgaggactcccaaaacagaaccaagattgctgagttgctccgttaccactcaaccaagagcggtgatgaattgaccagtctcaaggactacgtgacaaggatgaaggaaggtcagaacgatatcttctatatcactggtgagagcaagaaggctgttgagaactctccattccttgagaagctcaagaagaagggtattgaagttctctacatggttgacgctatcgatgagtatgctattggtcagctcaaggaattcgaaggaaagaagcttgtctctgcaaccaaggaaggtctgaaactggatgagactgaagacgagaagaagaagaaagaagagctcaaggagaagtttgagggactctgcaaagtgatcaaggacgttttgggagacaaggttgagaaggttatcgtctctgaccgtgttgtggactcaccctgctgtcttgtaacaggcgagtatggctggactgcaaacatggagaggatcatgaaagctcaagccttgagagacagcagcatgggtggctacatgtcgagcaagaagacaatggagattaacccagagaactccatcatggatgagctgagaaagagagctgatgcagacaagaacgacaagtctgtgaaggaccttgtacttcttctctttgagaccgctcttctcacttctggtttcagcctcgatgagcccaacactttcgggagcaggattcacaggatgttgaagcttggattgagcattgatgacgatgatgttgttgaagccgatgctgacatgcctccacttgaagatgatgccgatgctgaaggtagcaagatggaggaagttgactaaattatcacacacagtcgacttaatcattaggggtgttgagacattggttatctttttatcttttttttttatgttttcgtttgaactaatattttggaactattttctggagtttatttcttctatcgcttgttttcgtgaagattttttctctgaattcggtttgatg

SEQ ID NO: 97603 - protein, 699 aa, Arabidopsis thaliana; identical to SEQ ID NO: 49702
  peptide (1)..(699): Ceres Seq. ID no. 12739213
  misc_feature (27)..(181): Pfam Name: Histidine kinase-, DNA gyrase B-, and HSP90-like ATPase Pfam Description: Histidine kinase-, DNA gyrase B-, and
  misc_feature (211)..(699): Homolog of NCBI NO: 29145077 NR Description: heat shock protein, 1 [Mus musculus]
  misc_feature (3)..(280): Homolog of NCBI NO: 29145077 NR Description: heat shock protein, 1 [Mus musculus]
  misc_feature (1)..(699): Homolog of NCBI NO: 12005809 NR Description: 90-kDa heat shock protein HSP83 [Spodoptera
  misc_feature (4)..(697): Homolog of NCBI NO: 6755863 NR Description: tumor rejection antigen gp96; tumor rejection (gp96) 1 [Mus musculus] >gi|119362|sp|P08113|ENPL_MOUSE
  misc_feature (4)..(697): Homolog of NCBI NO: 14714615 NR Description: tumor rejection antigen gp96 [Mus musculus]
  misc_feature (4)..(699): Homolog of NCBI NO: 27807263 NR Description: tumor rejection antigen (gp96) 1 [Bos taurus]
  misc_feature (4)..(699): Homolog of NCBI NO: 4507677 NR Description: tumor rejection antigen (gp96) 1; Tumor rejection (gp96) [Homo sapiens] >gi|119360|sp|P14625|ENPL_HUMAN Endoplasmin
  misc_feature (4)..(699): Homolog of NCBI NO: 7441885 NR Description: protein kinase ppk98 (EC 2.7.1.-) precursor,
  misc_feature (4)..(699): Homolog of NCBI NO: 2239253 NR Description: gp96/GRP94 [Sus scrofa]
  misc_feature (4)..(699): Homolog of NCBI NO: 17865698 NR Description: Endoplasmin precursor (94 kDa glucose-regulated (GRP94) (GP96 homolog) (98 kDa protein kinase) (PPK 98) (ppk98)

SEQ ID NO: 97604 - protein, 615 aa, Arabidopsis thaliana; identical to SEQ ID NO: 49703
  peptide (1)..(615): Ceres Seq. ID no. 12739214
  misc_feature (1)..(97): Pfam Name: Histidine kinase-, DNA gyrase B-, and HSP90-like ATPase Pfam Description: Histidine kinase-, DNA gyrase B-, and
  misc_feature (127)..(615): Homolog of NCBI NO: 29145077 NR Description: heat shock protein, 1 [Mus musculus]
  misc_feature (1)..(196): Homolog of NCBI NO: 29145077 NR Description: heat shock protein, 1 [Mus musculus]
  misc_feature (1)..(615): Homolog of NCBI NO: 12005809 NR Description: 90-kDa heat shock protein HSP83 [Spodoptera
  misc_feature (1)..(613): Homolog of NCBI NO: 6755863 NR Description: tumor rejection antigen gp96; tumor rejection (gp96) 1 [Mus musculus] >gi|119362|sp|P08113|ENPL_MOUSE
  misc_feature (1)..(613): Homolog of NCBI NO: 14714615 NR Description: tumor rejection antigen gp96 [Mus musculus]
  misc_feature (1)..(615): Homolog of NCBI NO: 27807263 NR Description: tumor rejection antigen (gp96) 1 [Bos taurus]
  misc_feature (1)..(615): Homolog of NCBI NO: 4507677 NR Description: tumor rejection antigen (gp96) 1; Tumor rejection (gp96) [Homo sapiens] >gi|119360|sp|P14625|ENPL_HUMAN Endoplasmin
  misc_feature (1)..(615): Homolog of NCBI NO: 7441885 NR Description: protein kinase ppk98 (EC 2.7.1.-) precursor,
  misc_feature (1)..(615): Homolog of NCBI NO: 2239253 NR Description: gp96/GRP94 [Sus scrofa]
  misc_feature (1)..(615): Homolog of NCBI NO: 17865698 NR Description: Endoplasmin precursor (94 kDa glucose-regulated (GRP94) (GP96 homolog) (98 kDa protein kinase) (PPK 98) (ppk98)

SEQ ID NO: 97605 - protein, 594 aa, Arabidopsis thaliana; identical to SEQ ID NO: 70018
  peptide (1)..(594): Ceres Seq. ID no. 12739215
  misc_feature (1)..(76): Pfam Name: Histidine kinase-, DNA gyrase B-, and HSP90-like ATPase Pfam Description: Histidine kinase-, DNA gyrase B-, and
  misc_feature (106)..(594): Homolog of NCBI NO: 29145077 NR Description: heat shock protein, 1 [Mus musculus]
  misc_feature (1)..(175): Homolog of NCBI NO: 29145077 NR Description: heat shock protein, 1 [Mus musculus]
  misc_feature (1)..(594): Homolog of NCBI NO: 12005809 NR Description: 90-kDa heat shock protein HSP83 [Spodoptera
  misc_feature (1)..(592): Homolog of NCBI NO: 6755863 NR Description: tumor rejection antigen gp96; tumor rejection (gp96) 1 [Mus musculus] >gi|119362|sp|P08113|ENPL_MOUSE
  misc_feature (1)..(592): Homolog of NCBI NO: 14714615 NR Description: tumor rejection antigen gp96 [Mus musculus]
  misc_feature (1)..(594): Homolog of NCBI NO: 27807263 NR Description: tumor rejection antigen (gp96) 1 [Bos taurus]
  misc_feature (1)..(594): Homolog of NCBI NO: 4507677 NR Description: tumor rejection antigen (gp96) 1; Tumor rejection (gp96) [Homo sapiens] >gi|119360|sp|P14625|ENPL_HUMAN Endoplasmin
  misc_feature (1)..(594): Homolog of NCBI NO: 7441885 NR Description: protein kinase ppk98 (EC 2.7.1.-) precursor,
  misc_feature (1)..(594): Homolog of NCBI NO: 2239253 NR Description: gp96/GRP94 [Sus scrofa]
  misc_feature (1)..(594): Homolog of NCBI NO: 17865698 NR Description: Endoplasmin precursor (94 kDa glucose-regulated (GRP94) (GP96 homolog) (98 kDa protein kinase) (PPK 98) (ppk98)

SEQ ID NO: 97606 - DNA, 1601 bp, Arabidopsis thaliana
  misc_feature (1)..(1601): Ceres Seq. ID no. 12739224
  misc_feature: MA Experiment ID: 20000437 Result: Down-regulated in Transcription
  misc_feature: MA Experiment 20000437 PARAMETER Experiment Name: At_Drought_P Parameter: Age (day) Value: 8
  misc_feature: MA Experiment 20000437 PARAMETER Experiment Name: At_Drought_P Parameter: Organism Value: A. thaliana
  misc_feature: MA Experiment 20000437 PARAMETER Experiment Name: At_Drought_P Parameter: Plant Line Value: WS
  misc_feature: MA Experiment 20000437 PARAMETER Experiment Name: At_Drought_P Parameter: Timepoint (hr) Value: 24
  misc_feature: MA Experiment 20000437 PARAMETER Experiment Name: At_Drought_P Parameter: Tissue Value: Whole Plant
  misc_feature: MA Experiment 20000437 PARAMETER Experiment Name: At_Drought_P Parameter: Treatment Value: Drought vs. No Drought
  misc_feature: MA Experiment ID: 20001451 Result: Down-regulated in Transcription
  misc_feature: MA Experiment 20001451 PARAMETER Experiment Name: At_Far-red-induction_P Parameter: Age (day) Value: 7
  misc_feature: MA Experiment 20001451 PARAMETER Experiment Name: At_Far-red-induction_P Parameter: Light Value: Far-red vs. White
  misc_feature: MA Experiment 20001451 PARAMETER Experiment Name: At_Far-red-induction_P Parameter: Organism Value: A. thaliana
  misc_feature: MA Experiment 20001451 PARAMETER Experiment Name: At_Far-red-induction_P Parameter: Plant Line Value: Columbia
  misc_feature: MA Experiment 20001451 PARAMETER Experiment Name: At_Far-red-induction_P Parameter: Timepoint (hr) Value: 24
  misc_feature: MA Experiment 20001451 PARAMETER Experiment Name: At_Far-red-induction_P Parameter: Tissue Value: Whole Plant
  misc_feature: MA Experiment ID: 20001557 Result: Up-regulated in Transcription
  misc_feature: MA Experiment 20001557 PARAMETER Experiment Name: At_Drought_Soil_Dry_P Parameter: Age (day) Value: 27
  misc_feature: MA Experiment 20001557 PARAMETER Experiment Name: At_Drought_Soil_Dry_P Parameter: Organism Value: A. thaliana
  misc_feature: MA Experiment 20001557 PARAMETER Experiment Name: At_Drought_Soil_Dry_P Parameter: Plant Line Value: WS
  misc_feature: MA Experiment 20001557 PARAMETER Experiment Name: At_Drought_Soil_Dry_P Parameter: Post Timepoint (hr) Value: 3
  misc_feature: MA Experiment 20001557 PARAMETER Experiment Name: At_Drought_Soil_Dry_P Parameter: Post-Treatment Value: Re-Water vs. No Drought
  misc_feature: MA Experiment 20001557 PARAMETER Experiment Name: At_Drought_Soil_Dry_P Parameter: Timepoint (day) Value: 13
  misc_feature: MA Experiment 20001557 PARAMETER Experiment Name: At_Drought_Soil_Dry_P Parameter: Treatment Value: Drought vs. No Drought
  misc_feature: MA Experiment ID: 20001558 Result: Up-regulated in Transcription
  misc_feature: MA Experiment 20001558 PARAMETER Experiment Name: At_Drought_Soil_Dry_P Parameter: Age (day) Value: 27
  misc_feature: MA Experiment 20001558 PARAMETER Experiment Name: At_Drought_Soil_Dry_P Parameter: Organism Value: A. thaliana
  misc_feature: MA Experiment 20001558 PARAMETER Experiment Name: At_Drought_Soil_Dry_P Parameter: Plant Line Value: WS
  misc_feature: MA Experiment 20001558 PARAMETER Experiment Name: At_Drought_Soil_Dry_P Parameter: Post Timepoint (hr) Value: 6
  misc_feature: MA Experiment 20001558 PARAMETER Experiment Name: At_Drought_Soil_Dry_P Parameter: Post-Treatment Value: Re-Water vs. No Drought
  misc_feature: MA Experiment 20001558 PARAMETER Experiment Name: At_Drought_Soil_Dry_P Parameter: Timepoint (day) Value: 13
  misc_feature: MA Experiment 20001558 PARAMETER Experiment Name: At_Drought_Soil_Dry_P Parameter: Treatment Value: Drought vs. No Drought
  misc_feature: MA Experiment ID: 20001757 Result: Up-regulated in Transcription
  misc_feature: MA Experiment 20001757 PARAMETER Experiment Name: At_50mM_NH4NO3_L-to-H_P Parameter: Timepoint (hr) Value: 6
  misc_feature: MA Experiment 20001757 PARAMETER Experiment Name: At_50mM_NH4NO3_L-to-H_P Parameter: Tissue Value: Leaf
  misc_feature: MA Experiment 20001757 PARAMETER Experiment Name: At_50mM_NH4NO3_L-to-H_P Parameter: Treatment Value: 50mM NH4NO3 vs 100mM Mannitol
gtgcgctctcatatttctcacattttcgtagccgcaagactcctttcagattcttacttgcagctatgggtaaagagaagtttcacattaacattgtggtcattggtcatgttgattctggaaaatcgaccacaactggtcacttgatctataagcttggtggtattgacaagcgtgtcatcgagaggttcgagaaggaggctgctgagatgaacaagaggtccttcaagtacgcatgggtgttggacaaacttaaggccgagcgtgagcgtggtattaccatcgatattgctctatggaagttcgagaccaccaagtactactgcacagtcattgatgccccaggacatcgtgatttcatcaagaacatgattactggtacctcccaggctgattgtgctgttcttatcattgactccaccactggaggttttgaggctggtatctctaaggatggtcagacccgtgagcacgctcttcttgctttcacccttggtgtcaagcagatgatttgctgttgtaacaagatggatgccaccacccccaaatactccaaggctaggtacgatgaaatcatcaaggaggtgtcttcatacctgaagaaggtcggatacaaccctgacaaaatcccatttgtgccaatctctggattcgagggagacaacatgattgagaggtcaaccaaccttgactggtacaagggaccaactcttcttgaggctcttgaccagatcaacgagcccaagaggccatcagacaagccccttcgtcttccacttcaggatgtctacaagattggtggtattggaacggtgccagtgggacgtgttgagactggtatgatcaagcctggtatggttgttacctttgctcccacagggttgaccactgaggttaagtctgttgagatgcaccacgagtctcttcttgaggcacttcccggtgacaatgttggattcaatgtcaagaatgttgctgtcaaggatcttaagagaggatacgttgcctctaactccaaggatgatccagctaagggtgccgccaacttcacctcccaggtcatcatcatgaaccaccctggtcagattggtaacggttacgccccagttctcgattgccacacctctcacattgcagtcaagttctctgagatcttgaccaagattgacaggcgttctggtaaggagattgagaaggagcccaagtttttgaagaatggtgacgctggtatggttaagatgaccccaaccaagcccatggttgttgagactttctccgagtacccacctttgggacgtttcgctgttagggacatgaggcagaccgttgctgttggtgttattaagagcgtggacaagaaggacccaactggagccaaggtcaccaaggctgcagtgaagaagggtgccaaatgatgagactttcgttatgatcgactctcttatggttttctttggttcttaaaactttgatggcgtttgagcctttttcttttttctctttatttctgtgactttctctctccctcctttttggatatctctgagactttttattatggttttcaattatgcagtttccggataattttgcttgaaact

SEQ ID NO: 97607 - protein, 470 aa, Arabidopsis thaliana; identical to SEQ ID NO: 40875
  peptide (1)..(470): Ceres Seq. ID no. 12739225
  misc_feature (26)..(248): Pfam Name: Elongation factor Tu GTP binding domain Pfam Description: Elongation factor Tu GTP binding domain
  misc_feature (17)..(470): Homolog of NCBI NO: 25407012 NR Description: protein T6D22.2 [imported] - Arabidopsis thaliana
  misc_feature (22)..(470): Homolog of NCBI NO: 15239308 NR Description: elongation factor 1-alpha (EF-1-alpha); protein At5g60390.1, supported by cDNA: gi_13430509, supported by cDNA: supported by cDNA: gi_16930464, supported by cDNA: supported by
  misc_feature (22)..(470): Homolog of NCBI NO: 99688 NR Description: translation elongation factor eEF-1 alpha chain
  misc_feature (22)..(470): Homolog of NCBI NO: 13605682 NR Description: At1g07930/T6D22_3 [Arabidopsis thaliana]
  misc_feature (22)..(470): Homolog of NCBI NO: 13430510 NR Description: putative translation elongation factor eEF-1
  misc_feature (22)..(470): Homolog of NCBI NO: 25407012 NR Description: protein T6D22.2 [imported] - Arabidopsis thaliana
  misc_feature (22)..(470): Homolog of NCBI NO: 23397097 NR Description: putative translation elongation factor eEF-1
  misc_feature (22)..(470): Homolog of NCBI NO: 18086389 NR Description: At1g07930/T6D22_3 [Arabidopsis thaliana]
  misc_feature (22)..(470): Homolog of NCBI NO: 17064954 NR Description: putative elongation factor 1-a [Arabidopsis
  misc_feature (22)..(470): Homolog of NCBI NO: 15081765 NR Description: At1g07930/T6D22_3 [Arabidopsis thaliana]

SEQ ID NO: 97608 - protein, 449 aa, Arabidopsis thaliana; identical to SEQ ID NO: 27284
  peptide (1)..(449): Ceres Seq. ID no. 12739226
  misc_feature (5)..(227): Pfam Name: Elongation factor Tu GTP binding domain Pfam Description: Elongation factor Tu GTP binding domain
  misc_feature (1)..(449): Homolog of NCBI NO: 25407012 NR Description: protein T6D22.2 [imported] - Arabidopsis thaliana
  misc_feature (1)..(449): Homolog of NCBI NO: 15239308 NR Description: elongation factor 1-alpha (EF-1-alpha); protein At5g60390.1, supported by cDNA: gi_13430509, supported by cDNA: supported by cDNA: gi_16930464, supported by cDNA: supported by
  misc_feature (1)..(449): Homolog of NCBI NO: 99688 NR Description: translation elongation factor eEF-1 alpha chain
  misc_feature (1)..(449): Homolog of NCBI NO: 13605682 NR Description: At1g07930/T6D22_3 [Arabidopsis thaliana]
  misc_feature (1)..(449): Homolog of NCBI NO: 13430510 NR Description: putative translation elongation factor eEF-1
  misc_feature (1)..(449): Homolog of NCBI NO: 25407012 NR Description: protein T6D22.2 [imported] - Arabidopsis thaliana
  misc_feature (1)..(449): Homolog of NCBI NO: 23397097 NR Description: putative translation elongation factor eEF-1
  misc_feature (1)..(449): Homolog of NCBI NO: 18086389 NR Description: At1g07930/T6D22_3 [Arabidopsis thaliana]
  misc_feature (1)..(449): Homolog of NCBI NO: 17064954 NR Description: putative elongation factor 1-a [Arabidopsis
  misc_feature (1)..(449): Homolog of NCBI NO: 15081765 NR Description: At1g07930/T6D22_3 [Arabidopsis thaliana]

SEQ ID NO: 97609 - protein, 401 aa, Arabidopsis thaliana; identical to SEQ ID NO: 21437
  peptide (1)..(401): Ceres Seq. ID no. 12739227
  misc_feature (1)..(179): Pfam Name: Elongation factor Tu GTP binding domain Pfam Description: Elongation factor Tu GTP binding domain
  misc_feature (1)..(401): Homolog of NCBI NO: 25407012 NR Description: protein T6D22.2 [imported] - Arabidopsis thaliana
  misc_feature (1)..(401): Homolog of NCBI NO: 15239308 NR Description: elongation factor 1-alpha (EF-1-alpha); protein At5g60390.1, supported by cDNA: gi_13430509, supported by cDNA: supported by cDNA: gi_16930464, supported by cDNA: supported by
  misc_feature (1)..(401): Homolog of NCBI NO: 99688 NR Description: translation elongation factor eEF-1 alpha chain
  misc_feature (1)..(401): Homolog of NCBI NO: 13605682 NR Description: At1g07930/T6D22_3 [Arabidopsis thaliana]
  misc_feature (1)..(401): Homolog of NCBI NO: 13430510 NR Description: putative translation elongation factor eEF-1
  misc_feature (1)..(401): Homolog of NCBI NO: 25407012 NR Description: protein T6D22.2 [imported] - Arabidopsis thaliana
  misc_feature (1)..(401): Homolog of NCBI NO: 23397097 NR Description: putative translation elongation factor eEF-1
  misc_feature (1)..(401): Homolog of NCBI NO: 18086389 NR Description: At1g07930/T6D22_3 [Arabidopsis thaliana]
  misc_feature (1)..(401): Homolog of NCBI NO: 17064954 NR Description: putative elongation factor 1-a [Arabidopsis
  misc_feature (1)..(401): Homolog of NCBI NO: 15081765 NR Description: At1g07930/T6D22_3 [Arabidopsis thaliana]

SEQ ID NO: 97610 - DNA, 1143 bp, Arabidopsis thaliana
  misc_feature (1)..(1143): Ceres Seq. ID no. 12782023
  misc_feature: MA Experiment ID: 20000169 Result: Up-regulated in Transcription
  misc_feature: MA Experiment 20000169 PARAMETER Experiment Name: At_100uM_ABA_P Parameter: Age (day) Value: 14
  misc_feature: MA Experiment 20000169 PARAMETER Experiment Name: At_100uM_ABA_P Parameter: Organism Value: A. thaliana
  misc_feature: MA Experiment 20000169 PARAMETER Experiment Name: At_100uM_ABA_P Parameter: Plant Line Value: WS
  misc_feature: MA Experiment 20000169 PARAMETER Experiment Name: At_100uM_ABA_P Parameter: Timepoint (hr) Value: 6
  misc_feature: MA Experiment 20000169 PARAMETER Experiment Name: At_100uM_ABA_P Parameter: Tissue Value: Aerial
  misc_feature: MA Experiment 20000169 PARAMETER Experiment Name: At_100uM_ABA_P Parameter: Treatment Value: 100uM ABA vs. No Treatment
  misc_feature: MA Experiment ID: 20000171 Result: Up-regulated in Transcription
  misc_feature: MA Experiment 20000171 PARAMETER Experiment Name: At_42deg_Heat_P Parameter: Age (day) Value: 14
  misc_feature: MA Experiment 20000171 PARAMETER Experiment Name: At_42deg_Heat_P Parameter: Organism Value: A. thaliana
  misc_feature: MA Experiment 20000171 PARAMETER Experiment Name: At_42deg_Heat_P Parameter: Plant Line Value: WS
  misc_feature: MA Experiment 20000171 PARAMETER Experiment Name: At_42deg_Heat_P Parameter: Temperature (deg C) Value: 42 vs. 22
  misc_feature: MA Experiment 20000171 PARAMETER Experiment Name: At_42deg_Heat_P Parameter: Timepoint (hr) Value: 1
  misc_feature: MA Experiment 20000171 PARAMETER Experiment Name: At_42deg_Heat_P Parameter: Tissue Value: Aerial
  misc_feature: MA Experiment ID: 20000173 Result: Up-regulated in Transcription
  misc_feature: MA Experiment 20000173 PARAMETER Experiment Name: At_42deg_Heat_P Parameter: Age (day) Value: 14
  misc_feature: MA Experiment 20000173 PARAMETER Experiment Name: At_42deg_Heat_P Parameter: Organism Value: A. thaliana
  misc_feature: MA Experiment 20000173 PARAMETER Experiment Name: At_42deg_Heat_P Parameter: Plant Line Value: WS
  misc_feature: MA Experiment 20000173 PARAMETER Experiment Name: At_42deg_Heat_P Parameter: Temperature (deg C) Value: 42 vs. 22
  misc_feature: MA Experiment 20000173 PARAMETER Experiment Name: At_42deg_Heat_P Parameter: Timepoint (hr) Value: 6
  misc_feature: MA Experiment 20000173 PARAMETER Experiment Name: At_42deg_Heat_P Parameter: Tissue Value: Aerial
  misc_feature: MA Experiment ID: 20000184 Result: Up-regulated in Transcription
  misc_feature: MA Experiment 20000184 PARAMETER Experiment Name: At_Shoots__P Parameter: Age (day) Value: 7
  misc_feature: MA Experiment 20000184 PARAMETER Experiment Name: At_Shoots__P Parameter: Tissue Value: Shoots vs. Whole Plant
  misc_feature: MA Experiment ID: 20000436 Result: Up-regulated in Transcription
  misc_feature: MA Experiment 20000436 PARAMETER Experiment Name: At_Drought_P Parameter: Age (day) Value: 7
  misc_feature: MA Experiment 20000436 PARAMETER Experiment Name: At_Drought_P Parameter: Organism Value: A. thaliana
  misc_feature: MA Experiment 20000436 PARAMETER Experiment Name: At_Drought_P Parameter: Plant Line Value: WS
  misc_feature: MA Experiment 20000436 PARAMETER Experiment Name: At_Drought_P Parameter: Timepoint (hr) Value: 12
  misc_feature: MA Experiment 20000436 PARAMETER Experiment Name: At_Drought_P Parameter: Tissue Value: Whole Plant
  misc_feature: MA Experiment 20000436 PARAMETER Experiment Name: At_Drought_P Parameter: Treatment Value: Drought vs. No Drought
  misc_feature: MA Experiment ID: 20000794 Result: Up-regulated in Transcription
  misc_feature: MA Experiment 20000794 PARAMETER Experiment Name: At_Petals_P Parameter: Age (day) Value: 23-25 days
  misc_feature: MA Experiment 20000794 PARAMETER Experiment Name: At_Petals_P Parameter: Plant Line Value: WS
  misc_feature: MA Experiment 20000794 PARAMETER Experiment Name: At_Petals_P Parameter: Tissue Value: Petals vs. Whole plant
  misc_feature: MA Experiment ID: 20001248 Result: Down-regulated in Transcription
  misc_feature: MA Experiment 20001248 PARAMETER Experiment Name: At_Far-red-induction_P Parameter: Age (day) Value: 7
  misc_feature: MA Experiment 20001248 PARAMETER Experiment Name: At_Far-red-induction_P Parameter: Light Value: Far-red vs. White
  misc_feature: MA Experiment 20001248 PARAMETER Experiment Name: At_Far-red-induction_P Parameter: Organism Value: A. thaliana
  misc_feature: MA Experiment 20001248 PARAMETER Experiment Name: At_Far-red-induction_P Parameter: Plant Line Value: Columbia
  misc_feature: MA Experiment 20001248 PARAMETER Experiment Name: At_Far-red-induction_P Parameter: Timepoint (hr) Value: 4
  misc_feature: MA Experiment 20001248 PARAMETER Experiment Name: At_Far-red-induction_P Parameter: Tissue Value: Whole Plant
  misc_feature: MA Experiment ID: 20001557 Result: Up-regulated in Transcription
  misc_feature: MA Experiment 20001557 PARAMETER Experiment Name: At_Drought_Soil_Dry_P Parameter: Age (day) Value: 27
  misc_feature: MA Experiment 20001557 PARAMETER Experiment Name: At_Drought_Soil_Dry_P Parameter: Organism Value: A. thaliana
  misc_feature: MA Experiment 20001557 PARAMETER Experiment Name: At_Drought_Soil_Dry_P Parameter: Plant Line Value: WS
  misc_feature: MA Experiment 20001557 PARAMETER Experiment Name: At_Drought_Soil_Dry_P Parameter: Post Timepoint (hr) Value: 3
  misc_feature: MA Experiment 20001557 PARAMETER Experiment Name: At_Drought_Soil_Dry_P Parameter: Post-Treatment Value: Re-Water vs. No Drought
  misc_feature: MA Experiment 20001557 PARAMETER Experiment Name: At_Drought_Soil_Dry_P Parameter: Timepoint (day) Value: 13
  misc_feature: MA Experiment 20001557 PARAMETER Experiment Name: At_Drought_Soil_Dry_P Parameter: Treatment Value: Drought vs. No Drought
  misc_feature: MA Experiment ID: 20001558 Result: Up-regulated in Transcription
  misc_feature: MA Experiment 20001558 PARAMETER Experiment Name: At_Drought_Soil_Dry_P Parameter: Age (day) Value: 27
  misc_feature: MA Experiment 20001558 PARAMETER Experiment Name: At_Drought_Soil_Dry_P Parameter: Organism Value: A. thaliana
  misc_feature: MA Experiment 20001558 PARAMETER Experiment Name: At_Drought_Soil_Dry_P Parameter: Plant Line Value: WS
  misc_feature: MA Experiment 20001558 PARAMETER Experiment Name: At_Drought_Soil_Dry_P Parameter: Post Timepoint (hr) Value: 6
  misc_feature: MA Experiment 20001558 PARAMETER Experiment Name: At_Drought_Soil_Dry_P Parameter: Post-Treatment Value: Re-Water vs. No Drought
  misc_feature: MA Experiment 20001558 PARAMETER Experiment Name: At_Drought_Soil_Dry_P Parameter: Timepoint (day) Value: 13
  misc_feature: MA Experiment 20001558 PARAMETER Experiment Name: At_Drought_Soil_Dry_P Parameter: Treatment Value: Drought vs. No Drought
  misc_feature: MA Experiment ID: 20001905 Result: Up-regulated in Transcription
  misc_feature: MA Experiment 20001905 PARAMETER Experiment Name: At_Drought_Reproduction_P Parameter: Age (day) Value: 40
  misc_feature: MA Experiment 20001905 PARAMETER Experiment Name: At_Drought_Reproduction_P Parameter: Organism Value: A. thaliana
  misc_feature: MA Experiment 20001905 PARAMETER Experiment Name: At_Drought_Reproduction_P Parameter: Plant Line Value: WS
  misc_feature: MA Experiment 20001905 PARAMETER Experiment Name: At_Drought_Reproduction_P Parameter: Timepoint (day) Value: 10
  misc_feature: MA Experiment 20001905 PARAMETER Experiment Name: At_Drought_Reproduction_P Parameter: Tissue Value: Rosettes
  misc_feature: MA Experiment 20001905 PARAMETER Experiment Name: At_Drought_Reproduction_P Parameter: Treatment Value: Drought vs. No Drought
ctcgaccacacacttggtagctacacacgagaaagaaaaagctcacaactttaacctttctggagagagaggaacaaaagagggagagggagagaaatggaaggcaaagaagaagatgtacgagtgggagctaacaagttcccggagaggcaacccatcggtacatcggctcagtccaccgacaaggactacaaagagccacctcctgcgccactgttcgagcccggcgagctcagctcatggtctttctacagagccggaatagctgagtttatcgctactttcttgtttctctacatcactgttttgactgtaatgggagttaagagagcaccaaacatgtgtgcttctgttggaatccaaggtatcgcttgggcttttggtggcatgatctttgctcttgtctactgtactgctggaatttcaggtggacacatcaaccctgctgtaacatttggtctgttcttggctcggaagttgtctctgaccagagctgtgttctacatgattatgcaatgtcttggagccatctgtggtgccggagtcgtcaaaggtttccagccaacgccgtaccagactctcggtggtggtgctaacaccgttgctcatggctacaccaaaggttctggccttggtgctgaaatcatcggaacattcgttctcgtctacactgtcttctccgccaccgacgccaagagaagcgcccgtgactcacacgtcccgattttggcgccgctcccaatcggatttgcagtgttcttggtacacttggcaacaataccgatcaccgggaccggaatcaacccagctagaagtcttggagccgcaattatctacaacaaggaccactcttaggatgaccattggattttctgggttggaccattcattggagcagctctagcagcactatatcaccagattgtcatcagagcgattcctttcaagagcaagagttagagacacacagaaagattccacggtccagaatttgttctttagtagtttctttgcttatctatctaatgtagcttgtgttttgcaatgtaatgagcctttcaagaatatgtatttgggatttctaatcagcttttgtctatgtaaaaaccatggtttatctttaaatgttgtttgaggttggcc

SEQ ID NO: 97611 - protein, 252 aa, Arabidopsis thaliana
  peptide (1)..(252): Ceres Seq. ID no. 12782024
  misc_feature (45)..(252): Pfam Name: Major intrinsic protein Pfam Description: Major intrinsic protein
  misc_feature (1)..(252): Homolog of NCBI NO: 18411332 NR Description: probable plasma membrane intrinsic protein 1c; id: At4g00430.1, supported by cDNA: gi_20466717, supported by gi_2373400, supported by cDNA: gi_535779 [Arabidopsis thaliana]
  misc_feature (1)..(252): Homolog of NCBI NO: 7441247 NR Description: probable plasma membrane intrinsic protein 1c - thaliana >gi|2252825|gb|AAB62824.1| Similar to transmembrane coded for by A. thaliana cDNA H37637; coded for by A. for by A.
  misc_feature (1)..(252): Homolog of NCBI NO: 2373401 NR Description: transmembrane protein [Arabidopsis thaliana]
  misc_feature (1)..(252): Homolog of NCBI NO: 15223438 NR Description: plasma membrane intrinsic protein 1c, putative; id: At1g01620.1, supported by cDNA: gi_13194765, supported by
  misc_feature (1)..(252): Homolog of NCBI NO: 17065068 NR Description: plasma membrane intrinsic protein 1C protein B) [Arabidopsis thaliana] >gi|25083740|gb|AAN72112.1| membrane intrinsic protein 1C (transmembrane protein B)
  misc_feature (1)..(252): Homolog of NCBI NO: 472875 NR Description: plasma membrane intrinsic protein 1c [Arabidopsis
  misc_feature (1)..(252): Homolog of NCBI NO: 15233109 NR Description: plasma membrane intrinsic protein 1a; protein id: supported by cDNA: 6690., supported by cDNA: gi_16648674, by cDNA: gi_20453350 [Arabidopsis thaliana]
  misc_feature (1)..(252): Homolog of NCBI NO: 3551131 NR Description: plasma membrane aquaporin (PAQ1) [Raphanus
  misc_feature (1)..(252): Homolog of NCBI NO: 15236485 NR Description: water channel - like protein; protein id: supported by cDNA: 3982., supported by cDNA: gi_16649156,
  misc_feature (1)..(252): Homolog of NCBI NO: 10799095 NR Description: aquaporin PIP1b2 [Brassica oleracea]
MEGKEEDVRVGANKFPERQPIGTSAQSTDKDYKEPPPAPLFEPGELSSWSFYRAGIAEFIATFLFLYITVLTVMGVKRAPNMCASVGIQGIAWAFGGMIFALVYCTAGISGGHINPAVTFGLFLARKLSLTRAVFYMIMQCLGAICGAGVVKGFQPTPYQTLGGGANTVAHGYTKGSGLGAEIIGTFVLVYTVFSATDAKRSARDSHVPILAPLPIGFAVFLVHLATIPITGTGINPARSLGAAIIYNKDHS

SEQ ID NO: 97612 - protein, 179 aa, Arabidopsis thaliana
  peptide (1)..(179): Ceres Seq. ID no. 12782025
  misc_feature (1)..(179): Pfam Name: Major intrinsic protein Pfam Description: Major intrinsic protein
  misc_feature (1)..(179): Homolog of NCBI NO: 18411332 NR Description: probable plasma membrane intrinsic protein 1c; id: At4g00430.1, supported by cDNA: gi_20466717, supported by gi_2373400, supported by cDNA: gi_535779 [Arabidopsis thaliana]
  misc_feature (1)..(179): Homolog of NCBI NO: 7441247 NR Description: probable plasma membrane intrinsic protein 1c - thaliana >gi|2252825|gb|AAB62824.1| Similar to transmembrane coded for by A. thaliana cDNA H37637; coded for by A. for by A.
  misc_feature (1)..(179): Homolog of NCBI NO: 2373401 NR Description: transmembrane protein [Arabidopsis thaliana]
  misc_feature (1)..(179): Homolog of NCBI NO: 15223438 NR Description: plasma membrane intrinsic protein 1c, putative; id: At1g01620.1, supported by cDNA: gi_13194765, supported by
  misc_feature (1)..(179): Homolog of NCBI NO: 17065068 NR Description: plasma membrane intrinsic protein 1C protein B) [Arabidopsis thaliana] >gi|25083740|gb|AAN72112.1| membrane intrinsic protein 1C (transmembrane protein B)
  misc_feature (1)..(179): Homolog of NCBI NO: 472875 NR Description: plasma membrane intrinsic protein 1c [Arabidopsis
  misc_feature (1)..(179): Homolog of NCBI NO: 15233109 NR Description: plasma membrane intrinsic protein 1a; protein id: supported by cDNA: 6690., supported by cDNA: gi_16648674, by cDNA: gi_20453350 [Arabidopsis thaliana]
  misc_feature (1)..(179): Homolog of NCBI NO: 3551131 NR Description: plasma membrane aquaporin (PAQ1) [Raphanus
  misc_feature (1)..(179): Homolog of NCBI NO: 15236485 NR Description: water channel - like protein; protein id: supported by cDNA: 3982., supported by cDNA: gi_16649156,
  misc_feature (1)..(179): Homolog of NCBI NO: 10799095 NR Description: aquaporin PIP1b2 [Brassica oleracea]
MGVKRAPNMCASVGIQGIAWAFGGMIFALVYCTAGISGGHINPAVTFGLFLARKLSLTRAVFYMIMQCLGAICGAGVVKGFQPTPYQTLGGGANTVAHGYTKGSGLGAEIIGTFVLVYTVFSATDAKRSARDSHVPILAPLPIGFAVFLVHLATIPITGTGINPARSLGAAIIYNKDHS

SEQ ID NO: 97613 - protein, 171 aa, Arabidopsis thaliana
  peptide (1)..(171): Ceres Seq. ID no. 12782026
  misc_feature (1)..(171): Pfam Name: Major intrinsic protein Pfam Description: Major intrinsic protein
  misc_feature (1)..(171): Homolog of NCBI NO: 18411332 NR Description: probable plasma membrane intrinsic protein 1c; id: At4g00430.1, supported by cDNA: gi_20466717, supported by gi_2373400, supported by cDNA: gi_535779 [Arabidopsis thaliana]
  misc_feature (1)..(171): Homolog of NCBI NO: 7441247 NR Description: probable plasma membrane intrinsic protein 1c - thaliana >gi|2252825|gb|AAB62824.1| Similar to transmembrane coded for by A. thaliana cDNA H37637; coded for by A. for by A.
  misc_feature (1)..(171): Homolog of NCBI NO: 2373401 NR Description: transmembrane protein [Arabidopsis thaliana]
  misc_feature (1)..(171): Homolog of NCBI NO: 15223438 NR Description: plasma membrane intrinsic protein 1c, putative; id: At1g01620.1, supported by cDNA: gi_13194765, supported by
  misc_feature (1)..(171): Homolog of NCBI NO: 17065068 NR Description: plasma membrane intrinsic protein 1C protein B) [Arabidopsis thaliana] >gi|25083740|gb|AAN72112.1| membrane intrinsic protein 1C (transmembrane protein B)
  misc_feature (1)..(171): Homolog of NCBI NO: 472875 NR Description: plasma membrane intrinsic protein 1c [Arabidopsis
  misc_feature (1)..(171): Homolog of NCBI NO: 15233109 NR Description: plasma membrane intrinsic protein 1a; protein id: supported by cDNA: 6690., supported by cDNA: gi_16648674, by cDNA: gi_20453350 [Arabidopsis thaliana]
  misc_feature (1)..(171): Homolog of NCBI NO: 3551131 NR Description: plasma membrane aquaporin (PAQ1) [Raphanus
  misc_feature (1)..(171): Homolog of NCBI NO: 15236485 NR Description: water channel - like protein; protein id: supported by cDNA: 3982., supported by cDNA: gi_16649156,
  misc_feature (1)..(171): Homolog of NCBI NO: 10799095 NR Description: aquaporin PIP1b2 [Brassica oleracea]
MCASVGIQGIAWAFGGMIFALVYCTAGISGGHINPAVTFGLFLARKLSLTRAVFYMIMQCLGAICGAGVVKGFQPTPYQTLGGGANTVAHGYTKGSGLGAEIIGTFVLVYTVFSATDAKRSARDSHVPILAPLPIGFAVFLVHLATIPITGTGINPARSLGAAIIYNKDHS

SEQ ID NO: 97614 - DNA, 1516 bp, Arabidopsis thaliana
  misc_feature (1)..(1516): Ceres Seq. ID no. 13486664
  misc_feature: MA Experiment ID: 108434 Result: Up-regulated in Transcription
  misc_feature: MA Experiment 108434 PARAMETER Experiment Name: At_Root_Tips_cDNA_P Parameter: Tissue Value: Root Tips
  misc_feature: MA Experiment ID: 108461 Result: Up-regulated in Transcription
  misc_feature: MA Experiment 108461 PARAMETER Experiment Name: At_Germinating_Seeds_cDNA_P Parameter: Age (day) Value: 1 vs. 0
  misc_feature: MA Experiment 108461 PARAMETER Experiment Name: At_Germinating_Seeds_cDNA_P Parameter: Tissue Value: Germinating Seeds
  misc_feature: MA Experiment ID: 108462 Result: Up-regulated in Transcription
  misc_feature: MA Experiment 108462 PARAMETER Experiment Name: At_Germinating_Seeds_cDNA_P Parameter: Age (day) Value: 2 vs. 0
  misc_feature: MA Experiment 108462 PARAMETER Experiment Name: At_Germinating_Seeds_cDNA_P Parameter: Tissue Value: Germinating Seeds
  misc_feature: MA Experiment ID: 108473 Result: Down-regulated in Transcription
  misc_feature: MA Experiment 108473 PARAMETER Experiment Name: At_Drought_Flowers_cDNA_P Parameter: Timepoint (hr) Value: 7 d
  misc_feature: MA Experiment 108473 PARAMETER Experiment Name: At_Drought_Flowers_cDNA_P Parameter: Tissue Value: Flower
  misc_feature: MA Experiment 108473 PARAMETER Experiment Name: At_Drought_Flowers_cDNA_P Parameter: Treatment Value: Drought vs. No Drought
  misc_feature: MA Experiment ID: 108489 Result: Down-regulated in Transcription
  misc_feature: MA Experiment ID: 108561 Result: Down-regulated in Transcription
  misc_feature: MA Experiment 108561 PARAMETER Experiment Name: At_100uM_ABA_cDNA_P Parameter: Timepoint (hr) Value: 6
  misc_feature: MA Experiment 108561 PARAMETER Experiment Name: At_100uM_ABA_cDNA_P Parameter: Tissue Value: Aerial
  misc_feature: MA Experiment 108561 PARAMETER Experiment Name: At_100uM_ABA_cDNA_P Parameter: Treatment Value: 100uM ABA vs. No Treatment
  misc_feature: MA Experiment ID: 108569 Result: Up-regulated in Transcription
  misc_feature: MA Experiment 108569 PARAMETER Experiment Name: At_0.001%_MeJA__cDNA_P Parameter: Timepoint (hr) Value: 6
  misc_feature: MA Experiment 108569 PARAMETER Experiment Name: At_0.001%_MeJA__cDNA_P Parameter: Tissue Value: Aerial
  misc_feature: MA Experiment 108569 PARAMETER Experiment Name: At_0.001%_MeJA__cDNA_P Parameter: Treatment Value: 0.001% MeJA vs. No Treatment
  misc_feature: MA Experiment ID: 108573 Result: Down-regulated in Transcription
  misc_feature: MA Experiment 108573 PARAMETER Experiment Name: At_Drought_cDNA_P Parameter: Timepoint (hr) Value: 6
  misc_feature: MA Experiment 108573 PARAMETER Experiment Name: At_Drought_cDNA_P Parameter: Tissue Value: Aerial
  misc_feature: MA Experiment 108573 PARAMETER Experiment Name: At_Drought_cDNA_P Parameter: Treatment Value: Drought vs. No Drought
  misc_feature: MA Experiment ID: 108574 Result: Up-regulated in Transcription
  misc_feature: MA Experiment 108574 PARAMETER Experiment Name: At_Wounding__cDNA_P Parameter: Timepoint (hr) Value: 1
  misc_feature: MA Experiment 108574 PARAMETER Experiment Name: At_Wounding__cDNA_P Parameter: Tissue Value: Aerial
  misc_feature: MA Experiment 108574 PARAMETER Experiment Name: At_Wounding__cDNA_P Parameter: Treatment Value: Wounding vs. No Wounding
  misc_feature: MA Experiment ID: 108576 Result: Down-regulated in Transcription
  misc_feature: MA Experiment 108576 PARAMETER Experiment Name: At_42deg_Heat_cDNA_P Parameter: Temperature (deg C) Value: 42 vs. 22
  misc_feature: MA Experiment 108576 PARAMETER Experiment Name: At_42deg_Heat_cDNA_P Parameter: Timepoint (hr) Value: 1
  misc_feature: MA Experiment 108576 PARAMETER Experiment Name: At_42deg_Heat_cDNA_P Parameter: Tissue Value: Aerial
  misc_feature: MA Experiment ID: 108579 Result: Up-regulated in Transcription
  misc_feature: MA Experiment 108579 PARAMETER Experiment Name: At_4deg_Cold_cDNA_P Parameter: Temperature (deg C) Value: 4 vs. 22
  misc_feature: MA Experiment 108579 PARAMETER Experiment Name: At_4deg_Cold_cDNA_P Parameter: Timepoint (hr) Value: 6
  misc_feature: MA Experiment 108579 PARAMETER Experiment Name: At_4deg_Cold_cDNA_P Parameter: Tissue Value: Aerial
  misc_feature: MA Experiment ID: 108585 Result: Down-regulated in Transcription
  misc_feature: MA Experiment 108585 PARAMETER Experiment Name: At_5mM_NaNP_cDNA_P Parameter: Timepoint (hr) Value: 6
  misc_feature: MA Experiment 108585 PARAMETER Experiment Name: At_5mM_NaNP_cDNA_P Parameter: Tissue Value: Aerial
  misc_feature: MA Experiment 108585 PARAMETER Experiment Name: At_5mM_NaNP_cDNA_P Parameter: Treatment Value: null
  misc_feature: MA Experiment ID: 20000111 Result: Down-regulated in Transcription
  misc_feature: MA Experiment 20000111 PARAMETER Experiment Name: At_42deg_Heat_cDNA_P Parameter: Temperature (deg C) Value: 42 vs. 22
  misc_feature: MA Experiment 20000111 PARAMETER Experiment Name: At_42deg_Heat_cDNA_P Parameter: Timepoint (hr) Value: 6
  misc_feature: MA Experiment 20000111 PARAMETER Experiment Name: At_42deg_Heat_cDNA_P Parameter: Tissue Value: Aerial
  misc_feature: MA Experiment ID: 20000113 Result: Down-regulated in Transcription
  misc_feature: MA Experiment 20000113 PARAMETER Experiment Name: At_42deg_Heat_cDNA_P Parameter: Temperature (deg C) Value: 42 vs. 22
  misc_feature: MA Experiment 20000113 PARAMETER Experiment Name: At_42deg_Heat_cDNA_P Parameter: Timepoint (hr) Value: 8
  misc_feature: MA Experiment 20000113 PARAMETER Experiment Name: At_42deg_Heat_cDNA_P Parameter: Tissue Value: Aerial
  misc_feature: MA Experiment ID: 20000171 Result: Down-regulated in Transcription
  misc_feature: MA Experiment 20000171 PARAMETER Experiment Name: At_42deg_Heat_P Parameter: Age (day) Value: 14
  misc_feature: MA Experiment 20000171 PARAMETER Experiment Name: At_42deg_Heat_P Parameter: Organism Value: A. thaliana
  misc_feature: MA Experiment 20000171 PARAMETER Experiment Name: At_42deg_Heat_P Parameter: Plant Line Value: WS
  misc_feature: MA Experiment 20000171 PARAMETER Experiment Name: At_42deg_Heat_P Parameter: Temperature (deg C) Value: 42 vs. 22
  misc_feature: MA Experiment 20000171 PARAMETER Experiment Name: At_42deg_Heat_P Parameter: Timepoint (hr) Value: 1
  misc_feature: MA Experiment 20000171 PARAMETER Experiment Name: At_42deg_Heat_P Parameter: Tissue Value: Aerial
  misc_feature: MA Experiment ID: 20000173 Result: Down-regulated in Transcription
  misc_feature: MA Experiment 20000173 PARAMETER Experiment Name: At_42deg_Heat_P Parameter: Age (day) Value: 14
  misc_feature: MA Experiment 20000173 PARAMETER Experiment Name: At_42deg_Heat_P Parameter: Organism Value: A. thaliana
  misc_feature: MA Experiment 20000173 PARAMETER Experiment Name: At_42deg_Heat_P Parameter: Plant Line Value: WS
  misc_feature: MA Experiment 20000173 PARAMETER Experiment Name: At_42deg_Heat_P Parameter: Temperature (deg C) Value: 42 vs. 22
  misc_feature: MA Experiment 20000173 PARAMETER Experiment Name: At_42deg_Heat_P Parameter: Timepoint (hr) Value: 6
  misc_feature: MA Experiment 20000173 PARAMETER Experiment Name: At_42deg_Heat_P Parameter: Tissue Value: Aerial
  misc_feature: MA Experiment ID: 20000180 Result: Up-regulated in Transcription
  misc_feature: MA Experiment 20000180 PARAMETER Experiment Name: At_Germinating_Seeds_P Parameter: Age (hr) Value: 24 vs. 0
  misc_feature: MA Experiment 20000180 PARAMETER Experiment Name: At_Germinating_Seeds_P Parameter: Tissue Value: Germinating Seeds
  misc_feature: MA Experiment ID: 20000234 Result: Up-regulated in Transcription
  misc_feature: MA Experiment 20000234 PARAMETER Experiment Name: At_Siliques_P Parameter: Age (day) Value: 21
  misc_feature: MA Experiment 20000234 PARAMETER Experiment Name: At_Siliques_P Parameter: Organism Value: A. thaliana
  misc_feature: MA Experiment 20000234 PARAMETER Experiment Name: At_Siliques_P Parameter: Plant Line Value: WS
  misc_feature: MA Experiment 20000234 PARAMETER Experiment Name: At_Siliques_P Parameter: Tissue Value: Less Than 5mm Siliques vs. Whole Plant
  misc_feature: MA Experiment ID: 20000264 Result: Up-regulated in Transcription
  misc_feature: MA Experiment 20000264 PARAMETER Experiment Name: At_Open_Flower_P Parameter: Age (day) Value: 21
  misc_feature: MA Experiment 20000264 PARAMETER Experiment Name: At_Open_Flower_P Parameter: Plant Line Value: WS
  misc_feature: MA Experiment 20000264 PARAMETER Experiment Name: At_Open_Flower_P Parameter: Tissue Value: Open Flower vs. Whole Plant
  misc_feature: MA Experiment ID: 20000265 Result: Up-regulated in Transcription
  misc_feature: MA Experiment 20000265 PARAMETER Experiment Name: At_Open_Flower_P Parameter: Age (day) Value: 21
  misc_feature: MA Experiment 20000265 PARAMETER Experiment Name: At_Open_Flower_P Parameter: Plant Line Value: WS
  misc_feature: MA Experiment 20000265 PARAMETER Experiment Name: At_Open_Flower_P Parameter: Tissue Value: Closed Flower vs. Whole Plant
  misc_feature: MA Experiment ID: 20000286 Result: Up-regulated in Transcription
  misc_feature: MA Experiment 20000286 PARAMETER Experiment Name: At_Open_Flower_P Parameter: Age (day) Value: 21
  misc_feature: MA Experiment 20000286 PARAMETER Experiment Name: At_Open_Flower_P Parameter: Plant Line Value: WS
  misc_feature: MA Experiment 20000286 PARAMETER Experiment Name: At_Open_Flower_P Parameter: Tissue Value: Half Open vs. Whole Plant
  misc_feature: MA Experiment ID: 20000438 Result: Up-regulated in Transcription
  misc_feature: MA Experiment 20000438 PARAMETER Experiment Name: At_Shoots__P Parameter: Age (day) Value: 14
  misc_feature: MA Experiment 20000438 PARAMETER Experiment Name: At_Shoots__P Parameter: Tissue Value: Shoots vs. Whole Plant
  misc_feature: MA Experiment ID: 20000452 Result: Up-regulated in Transcription
  misc_feature: MA Experiment 20000452 PARAMETER Experiment Name: At_CS6879_Shoots-Roots_P Parameter: Age (day) Value: 14
  misc_feature: MA Experiment 20000452 PARAMETER Experiment Name: At_CS6879_Shoots-Roots_P Parameter: Organism Value: A. thaliana
  misc_feature: MA Experiment 20000452 PARAMETER Experiment Name: At_CS6879_Shoots-Roots_P Parameter: Plant Line Value: CS6879 vs. WS
  misc_feature: MA Experiment 20000452 PARAMETER Experiment Name: At_CS6879_Shoots-Roots_P Parameter: Tissue Value: Shoots
  misc_feature: MA Experiment ID: 20000573 Result: Down-regulated in Transcription
  misc_feature: MA Experiment 20000573 PARAMETER Experiment Name: At_100uM_ABA_Mutants__P Parameter: Organism Value: A. thaliana
  misc_feature: MA Experiment 20000573 PARAMETER Experiment Name: At_100uM_ABA_Mutants__P Parameter: Plant Line Value: CS22 vs. Ler wt
  misc_feature: MA Experiment 20000573 PARAMETER Experiment Name: At_100uM_ABA_Mutants__P Parameter: Timepoint (hr) Value: N/A
  misc_feature: MA Experiment 20000573 PARAMETER Experiment Name: At_100uM_ABA_Mutants__P Parameter: Tissue Value: Whole Plant
  misc_feature: MA Experiment 20000573 PARAMETER Experiment Name: At_100uM_ABA_Mutants__P Parameter: Treatment Value: None
  misc_feature: MA Experiment ID: 20000574 Result: Down-regulated in Transcription
  misc_feature: MA Experiment 20000574 PARAMETER Experiment Name: At_100uM_ABA_Mutants__P Parameter: Organism Value: A. thaliana
  misc_feature: MA Experiment 20000574 PARAMETER Experiment Name: At_100uM_ABA_Mutants__P Parameter: Plant Line Value: CS23 vs. Ler wt
  misc_feature: MA Experiment 20000574 PARAMETER Experiment Name: At_100uM_ABA_Mutants__P Parameter: Timepoint (hr) Value: N/A
  misc_feature: MA Experiment 20000574 PARAMETER Experiment Name: At_100uM_ABA_Mutants__P Parameter: Tissue Value: Whole Plant
  misc_feature: MA Experiment 20000574 PARAMETER Experiment Name: At_100uM_ABA_Mutants__P Parameter: Treatment Value: None
  misc_feature: MA Experiment ID: 20000794 Result: Up-regulated in Transcription
  misc_feature: MA Experiment 20000794 PARAMETER Experiment Name: At_Petals_P Parameter: Age (day) Value: 23-25 days
  misc_feature: MA Experiment 20000794 PARAMETER Experiment Name: At_Petals_P Parameter: Plant Line Value: WS
  misc_feature: MA Experiment 20000794 PARAMETER Experiment Name: At_Petals_P Parameter: Tissue Value: Petals vs. Whole plant
  misc_feature: MA Experiment ID: 20001247 Result: Down-regulated in Transcription
  misc_feature: MA Experiment 20001247 PARAMETER Experiment Name: At_Far-red-induction_P Parameter: Age (day) Value: 7
  misc_feature: MA Experiment 20001247 PARAMETER Experiment Name: At_Far-red-induction_P Parameter: Light Value: Far-red vs. White
  misc_feature: MA Experiment 20001247 PARAMETER Experiment Name: At_Far-red-induction_P Parameter: Organism Value: A. thaliana
  misc_feature: MA Experiment 20001247 PARAMETER Experiment Name: At_Far-red-induction_P Parameter: Plant Line Value: Columbia
  misc_feature: MA Experiment 20001247 PARAMETER Experiment Name: At_Far-red-induction_P Parameter: Timepoint (hr) Value: 1
  misc_feature: MA Experiment 20001247 PARAMETER Experiment Name: At_Far-red-induction_P Parameter: Tissue Value: Whole Plant
  misc_feature: MA Experiment ID: 20001248 Result: Down-regulated in Transcription
  misc_feature: MA Experiment 20001248 PARAMETER Experiment Name: At_Far-red-induction_P Parameter: Age (day) Value: 7
  misc_feature: MA Experiment 20001248 PARAMETER Experiment Name: At_Far-red-induction_P Parameter: Light Value: Far-red vs. White
  misc_feature: MA Experiment 20001248 PARAMETER Experiment Name: At_Far-red-induction_P Parameter: Organism Value: A. thaliana
  misc_feature: MA Experiment 20001248 PARAMETER Experiment Name: At_Far-red-induction_P Parameter: Plant Line Value: Columbia
  misc_feature: MA Experiment 20001248 PARAMETER Experiment Name: At_Far-red-induction_P Parameter: Timepoint (hr) Value: 4
  misc_feature: MA Experiment 20001248 PARAMETER Experiment Name: At_Far-red-induction_P Parameter: Tissue Value: Whole Plant
  misc_feature: MA Experiment ID: 20001450 Result: Down-regulated in Transcription
  misc_feature: MA Experiment 20001450 PARAMETER Experiment Name: At_Far-red-induction_P Parameter: Age (day) Value: 7
  misc_feature: MA Experiment 20001450 PARAMETER Experiment Name: At_Far-red-induction_P Parameter: Light Value: Far-red vs. White
  misc_feature: MA Experiment 20001450 PARAMETER Experiment Name: At_Far-red-induction_P Parameter: Organism Value: A. thaliana
  misc_feature: MA Experiment 20001450 PARAMETER Experiment Name: At_Far-red-induction_P Parameter: Plant Line Value: Columbia
  misc_feature: MA Experiment 20001450 PARAMETER Experiment Name: At_Far-red-induction_P Parameter: Timepoint (hr) Value: 8
  misc_feature: MA Experiment 20001450 PARAMETER Experiment Name: At_Far-red-induction_P Parameter: Tissue Value: Whole Plant
  misc_feature: MA Experiment ID: 20001558 Result: Down-regulated in Transcription
  misc_feature: MA Experiment 20001558 PARAMETER Experiment Name: At_Drought_Soil_Dry_P Parameter: Age (day) Value: 27
  misc_feature: MA Experiment 20001558 PARAMETER Experiment Name: At_Drought_Soil_Dry_P Parameter: Organism Value: A. thaliana
  misc_feature: MA Experiment 20001558 PARAMETER Experiment Name: At_Drought_Soil_Dry_P Parameter: Plant Line Value: WS
  misc_feature: MA Experiment 20001558 PARAMETER Experiment Name: At_Drought_Soil_Dry_P Parameter: Post Timepoint (hr) Value: 6
  misc_feature: MA Experiment 20001558 PARAMETER Experiment Name: At_Drought_Soil_Dry_P Parameter: Post-Treatment Value: Re-Water vs. No Drought
  misc_feature: MA Experiment 20001558 PARAMETER Experiment Name: At_Drought_Soil_Dry_P Parameter: Timepoint (day) Value: 13
  misc_feature: MA Experiment 20001558 PARAMETER Experiment Name: At_Drought_Soil_Dry_P Parameter: Treatment Value: Drought vs. No Drought
  misc_feature: MA Experiment ID: 20001757 Result: Down-regulated in Transcription
  misc_feature: MA Experiment 20001757 PARAMETER Experiment Name: At_50mM_NH4NO3_L-to-H_P Parameter: Timepoint (hr) Value: 6
  misc_feature: MA Experiment 20001757 PARAMETER Experiment Name: At_50mM_NH4NO3_L-to-H_P Parameter: Tissue Value: Leaf
  misc_feature: MA Experiment 20001757 PARAMETER Experiment Name: At_50mM_NH4NO3_L-to-H_P Parameter: Treatment Value: 50mM NH4NO3 vs 100mM Mannitol
tttgcatattgtctacttttagattttgatatctattggaactcttactagctcattcatccgtcggcctgtgaattgtgtttctgaagtttccccaatggctgcttttggagatgacattgtgattgtagcggcatatcgtaccgccatttgcaaagcgagacgtggaggtttcaaagacactcttcctgatgatcttcttgcttctgttcttaaggctgtagtggaaagaacatctttggatccaagtgaagttggtgatatcgttgttggtaccgtgatagcgcctggttctcagagagcaatggagtgtagagttgcagcttattttgctggttttcctgactccgtgccagttagaactgtcaatagacaatgctcatcaggactacaagcagttgctgatgttgctgcttccattagagctggttattacgacattggtattggtgctggagtggaatcaatgtcaactgatcatattcctggaggcggctttcatggctctaatccaagagcacaggatttcccaaaagcccgtgattgtttgcttccaatgggaattacttctgaaaacgttgcagaaaggttcggtgtcacaagagaagagcaagatatggctgcggtggagtctcacaaacgcgctgcagctgcaatcgcgtctggtaaactcaaggatgaaatcattcctgttgctactaagattgtggaccctgagactaaagcagagaaggcaatcgtcgtatctgttgatgacggtgtacgtccaaactcaaacatggcagatttggcaaagctgaagactgtctttaaacagaacggttccaccacagctggcaatgctagtcagatcagtgatggtgctggagcagtactgctaatgaagagaagtttggctatgaagaagggacttcccattcttggagtattcaggagttttgctgttactggtgtggaaccatctgtaatgggtattggtccagctgttgccattcccgctgcaactaagctcgcagggctcaacgtcagcgatattgatctattcgagatcaatgaggcatttgcatctcagtatgtgtactcttgcaagaagttagagctggatatggaaaaggtcaatgttaatggaggagccattgctattggccatcccctgggtgctacaggagctcgatgtgttgcgacattgttgcacgagatgaagcggagaggaaaagattgccgctttggagtaatctcaatgtgcataggcactggaatgggagctgcagctgtttttgagaggggagactctgttgataacttgtccaacgctcgtgtggctaacggggatagtcattagaacatcgaagagagcttgaataagtagaagtaatgatgcattgagtctaataaatatgatgctttagctctttcacattgctgaacaatgaaaacttttgtcattctgagtttaaaatcaactacttttctctgaacaaagtgttaaatctaaaaccaaaagttacatccttcc

SEQ ID NO: 97615 - protein, 414 aa, Arabidopsis thaliana; identical to SEQ ID NO: 29323
  peptide (1)..(414): Ceres Seq. ID no. 13486665
  misc_feature (5)..(265): Pfam Name: Thiolase, N-terminal domain Pfam Description: Thiolase, N-terminal domain
  misc_feature (1)..(414): Homolog of NCBI NO: 30695564 NR Description: acetyl-CoA C-acyltransferase 1 (3-ketoacyl-CoA
  misc_feature (1)..(414): Homolog of NCBI NO: 30695561 NR Description: acetyl-CoA C-acyltransferase 1 (3-ketoacyl-CoA
  misc_feature (2)..(411): Homolog of NCBI NO: 393707 NR Description: 3-ketoacyl-CoA thiolase; acetyl-CoA
  misc_feature (2)..(411): Homolog of NCBI NO: 7433647 NR Description: acetyl-CoA C-acyltransferase (EC 2.3.1.16)
  misc_feature (2)..(411): Homolog of NCBI NO: 421810 NR Description: acetyl-CoA C-acyltransferase (EC 2.3.1.16)
  misc_feature (2)..(407): Homolog of NCBI NO: 29367431 NR Description: 3-ketoacyl-CoA thiolase-like protein [Oryza
  misc_feature (4)..(407): Homolog of NCBI NO: 15225798 NR Description: acetyl-CoA C-acyltransferase (3-ketoacyl-CoA
  misc_feature (1)..(407): Homolog of NCBI NO: 15219797 NR Description: acetyl-CoA C-acyltransferase (3-ketoacyl-CoA
  misc_feature (4)..(414): Homolog of NCBI NO: 7433644 NR Description: acetyl-CoA C-acyltransferase (EC 2.3.1.16)
  misc_feature (1)..(407): Homolog of NCBI NO: 21537268 NR Description: putative acetyl-CoA acyltransferase [Arabidopsis

SEQ ID NO: 97616 - protein, 345 aa, Arabidopsis thaliana; identical to SEQ ID NO: 29324
  peptide (1)..(345): Ceres Seq. ID no. 13486666
  misc_feature (1)..(196): Pfam Name: Thiolase, N-terminal domain Pfam Description: Thiolase, N-terminal domain
  misc_feature (1)..(345): Homolog of NCBI NO: 30695564 NR Description: acetyl-CoA C-acyltransferase 1 (3-ketoacyl-CoA
  misc_feature (1)..(345): Homolog of NCBI NO: 30695561 NR Description: acetyl-CoA C-acyltransferase 1 (3-ketoacyl-CoA
  misc_feature (1)..(342): Homolog of NCBI NO: 393707 NR Description: 3-ketoacyl-CoA thiolase; acetyl-CoA
  misc_feature (1)..(342): Homolog of NCBI NO: 7433647 NR Description: acetyl-CoA C-acyltransferase (EC 2.3.1.16)
  misc_feature (1)..(342): Homolog of NCBI NO: 421810 NR Description: acetyl-CoA C-acyltransferase (EC 2.3.1.16)
  misc_feature (1)..(338): Homolog of NCBI NO: 29367431 NR Description: 3-ketoacyl-CoA thiolase-like protein [Oryza
  misc_feature (1)..(338): Homolog of NCBI NO: 15225798 NR Description: acetyl-CoA C-acyltransferase (3-ketoacyl-CoA
  misc_feature (1)..(338): Homolog of NCBI NO: 15219797 NR Description: acetyl-CoA C-acyltransferase (3-ketoacyl-CoA
  misc_feature (1)..(345): Homolog of NCBI NO: 7433644 NR Description: acetyl-CoA C-acyltransferase (EC 2.3.1.16)
  misc_feature (1)..(338): Homolog of NCBI NO: 21537268 NR Description: putative acetyl-CoA acyltransferase [Arabidopsis

SEQ ID NO: 97617 - protein, 291 aa, Arabidopsis thaliana; identical to SEQ ID NO: 29325
  peptide (1)..(291): Ceres Seq. ID no. 13486667
  misc_feature (1)..(142): Pfam Name: Thiolase, N-terminal domain Pfam Description: Thiolase, N-terminal domain
  misc_feature (1)..(291): Homolog of NCBI NO: 30695564 NR Description: acetyl-CoA C-acyltransferase 1 (3-ketoacyl-CoA
  misc_feature (1)..(291): Homolog of NCBI NO: 30695561 NR Description: acetyl-CoA C-acyltransferase 1 (3-ketoacyl-CoA
  misc_feature (1)..(288): Homolog of NCBI NO: 393707 NR Description: 3-ketoacyl-CoA thiolase; acetyl-CoA
  misc_feature (1)..(288): Homolog of NCBI NO: 7433647 NR Description: acetyl-CoA C-acyltransferase (EC 2.3.1.16)
  misc_feature (1)..(288): Homolog of NCBI NO: 421810 NR Description: acetyl-CoA C-acyltransferase (EC 2.3.1.16)
  misc_feature (1)..(284): Homolog of NCBI NO: 29367431 NR Description: 3-ketoacyl-CoA thiolase-like protein [Oryza
  misc_feature (1)..(284): Homolog of NCBI NO: 15225798 NR Description: acetyl-CoA C-acyltransferase (3-ketoacyl-CoA
  misc_feature (1)..(284): Homolog of NCBI NO: 15219797 NR Description: acetyl-CoA C-acyltransferase (3-ketoacyl-CoA
  misc_feature (1)..(291): Homolog of NCBI NO: 7433644 NR Description: acetyl-CoA C-acyltransferase (EC 2.3.1.16)
  misc_feature (1)..(284): Homolog of NCBI NO: 21537268 NR Description: putative acetyl-CoA acyltransferase [Arabidopsis

SEQ ID NO: 97618 - DNA, 1238 bp, Arabidopsis thaliana
  misc_feature (1)..(1238): Ceres Seq. ID no. 13486786
  misc_feature: MA Experiment ID: 108434 Result: Up-regulated in Transcription
  misc_feature: MA Experiment 108434 PARAMETER Experiment Name: At_Root_Tips_cDNA_P Parameter: Tissue Value: Root Tips
  misc_feature: MA Experiment ID: 108573 Result: Up-regulated in Transcription
  misc_feature: MA Experiment 108573 PARAMETER Experiment Name: At_Drought_cDNA_P Parameter: Timepoint (hr) Value: 6
  misc_feature: MA Experiment 108573 PARAMETER Experiment Name: At_Drought_cDNA_P Parameter: Tissue Value: Aerial
  misc_feature: MA Experiment 108573 PARAMETER Experiment Name: At_Drought_cDNA_P Parameter: Treatment Value: Drought vs. No Drought
  misc_feature: MA Experiment ID: 108594 Result: Down-regulated in Transcription
  misc_feature: MA Experiment 108594 PARAMETER Experiment Name: At_Ler-rhl_Root_cDNA_P Parameter: Plant Line Value: null
  misc_feature: MA Experiment ID: 108595 Result: Down-regulated in Transcription
  misc_feature: MA Experiment 108595 PARAMETER Experiment Name: At_Ler-pi_Ovule_cDNA_P Parameter: Plant Line Value: null
  misc_feature: MA Experiment ID: 20000087 Result: Down-regulated in Transcription
  misc_feature: MA Experiment 20000087 PARAMETER Experiment Name: At_100uM_ABA_Mutants_cDNA_P Parameter: Plant Line Value: WS
  misc_feature: MA Experiment 20000087 PARAMETER Experiment Name: At_100uM_ABA_Mutants_cDNA_P Parameter: Timepoint (hr) Value: 6
  misc_feature: MA Experiment 20000087 PARAMETER Experiment Name: At_100uM_ABA_Mutants_cDNA_P Parameter: Tissue Value: Aerial
  misc_feature: MA Experiment 20000087 PARAMETER Experiment Name: At_100uM_ABA_Mutants_cDNA_P Parameter: Treatment Value: 100uM ABA vs. No Treatment
  misc_feature: MA Experiment ID: 20000224 Result: Down-regulated in Transcription
ctcctctgttcgtcaatcgccgatctcgttgcttcattttccttgagatcgattggtacaagtgttcatccaatggttggaggaggagttatccggcagcttcttagaaggaaacttcattcccaatcagtcgcaactccggtattgtcatggttgtcttcgaagaaagcgaatgaagatgctgggtctgctggtttaagagcatttgctctcatgggtgctggtattaccggattattgagtttttctactgttgcatctgctgatgaggctgaacatggtctggagtgtcctaactacccttggccacatgagggcattctcagctcatatgaccatgcttcgatccgtcgtggtcaccaagtttatcagcaagtttgtgcgtcttgccattcgatgtctctgatctcataccgagacttggtgggtgttgcctacacagaggaagaggcgaaggccatggcagctgaaatcgaggttgttgatggaccaaatgatgagggtgagatgttcacccgacctggtaaactcagtgatcggcttcctgaaccatactcaaatgaatcggctgctaggttcgccaatggaggagcgtatccaccggatctaagtcttgtaactaaggcacgtcacaatggccaaaattatgtctttgctctgttgactggttatcgtgatcctcctgctggaatttcgatcagagaggggctacactacaatccttatttccctggtggagcaatcgctatgccaaaaatgctcaacgatgaagctgtggaatatgaagatggaactcctgcaacagaagcacagatgggtaaagatgttgtatccttcttgtcctgggcagctgaaccagagatggaagagaggaaattgatggggttcaaatggatattcttactgtctttggctctgcttcaagctgcgtattacaggagactgaaatggtcagtactcaaatcccgtaagcttgttctcgacgttgttaactaatcccgtgaagatcaccttttctctgggtaataatcattaatcttgaaagggataaatggtgaatcccactttttgtctcaaaagacatgtttctttgtttattgtttagaaagtctaatgaggcaaagaagtaaagcttttttaacctcaagtcacacatgattttgagattatattatttctttttggtttgttgtctcctaaaccggactcggtttgtcttaataaaaatgtggttttac

SEQ ID NO: 97619 - protein, 331 aa, Arabidopsis thaliana
  peptide (1)..(331): Ceres Seq. ID no. 13486787
  misc_feature (96)..(321): Pfam Name: Cytochrome C1 family Pfam Description: Cytochrome C1 family
  misc_feature (25)..(331): Homolog of NCBI NO: 15237497 NR Description: cytochrome c1 precursor [Arabidopsis thaliana]
  misc_feature (25)..(331): Homolog of NCBI NO: 15215624 NR Description: AT5g40810/MHK7_4 [Arabidopsis thaliana]
  misc_feature (25)..(331): Homolog of NCBI NO: 15232125 NR Description: cytochrome c -related [Arabidopsis thaliana]
  misc_feature (25)..(331): Homolog of NCBI NO: 21593678 NR Description: cytochrome c, putative [Arabidopsis thaliana]
  misc_feature (25)..(331): Homolog of NCBI NO: 15809956 NR Description: AT3g27240/K17E12_6 [Arabidopsis thaliana]
  misc_feature (61)..(331): Homolog of NCBI NO: 82263 NR Description: ubiquinol-cytochrome-c reductase (EC 1.10.2.2)
  misc_feature (61)..(331): Homolog of NCBI NO: 7547401 NR Description: cytochrome c1 precursor [Solanum tuberosum]
  misc_feature (61)..(331): Homolog of NCBI NO: 117765 NR Description: Cytochrome c1, heme protein, mitochondrial (Clone PC13III) >gi|21439|emb|CAA44055.1| cytochrome c1 [Solanum
  misc_feature (72)..(331): Homolog of NCBI NO: 82264 NR Description: ubiquinol-cytochrome-c reductase (EC 1.10.2.2)
  misc_feature (15)..(331): Homolog of NCBI NO: 12005507 NR Description: cytochrome c1 [Chlamydomonas reinhardtii]
LLCSSIADLVASFSLRSIGTSVHPMVGGGVIRQLLRRKLHSQSVATPVLSWLSSKKANEDAGSAGLRAFALMGAGITGLLSFSTVASADEAEHGLECPNYPWPHEGILSSYDHASIRRGHQVYQQVCASCHSMSLISYRDLVGVAYTEEEAKAMAAEIEVVDGPNDEGEMFTRPGKLSDRLPEPYSNESAARFANGGAYPPDLSLVTKARHNGQNYVFALLTGYRDPPAGISIREGLHYNPYFPGGAIAMPKMLNDEAVEYEDGTPATEAQMGKDVVSFLSWAAEPEMEERKLMGFKWIFLLSLALLQAAYYRRLKWSVLKSRKLVLDVVN

SEQ ID NO: 97620 - protein, 307 aa, Arabidopsis thaliana; identical to SEQ ID NO: 40157
  peptide (1)..(307): Ceres Seq. ID no. 13486788
  misc_feature (72)..(297): Pfam Name: Cytochrome C1 family Pfam Description: Cytochrome C1 family
  misc_feature (1)..(307): Homolog of NCBI NO: 15237497 NR Description: cytochrome c1 precursor [Arabidopsis thaliana]
  misc_feature (1)..(307): Homolog of NCBI NO: 15215624 NR Description: AT5g40810/MHK7_4 [Arabidopsis thaliana]
  misc_feature (1)..(307): Homolog of NCBI NO: 15232125 NR Description: cytochrome c -related [Arabidopsis thaliana]
  misc_feature (1)..(307): Homolog of NCBI NO: 21593678 NR Description: cytochrome c, putative [Arabidopsis thaliana]
  misc_feature (1)..(307): Homolog of NCBI NO: 15809956 NR Description: AT3g27240/K17E12_6 [Arabidopsis thaliana]
  misc_feature (37)..(307): Homolog of NCBI NO: 82263 NR Description: ubiquinol-cytochrome-c reductase (EC 1.10.2.2)
  misc_feature (37)..(307): Homolog of NCBI NO: 7547401 NR Description: cytochrome c1 precursor [Solanum tuberosum]
  misc_feature (37)..(307): Homolog of NCBI NO: 117765 NR Description: Cytochrome c1, heme protein, mitochondrial (Clone PC13III) >gi|21439|emb|CAA44055.1| cytochrome c1 [Solanum
  misc_feature (48)..(307): Homolog of NCBI NO: 82264 NR Description: ubiquinol-cytochrome-c reductase (EC 1.10.2.2)
  misc_feature (1)..(307): Homolog of NCBI NO: 12005507 NR Description: cytochrome c1 [Chlamydomonas reinhardtii]

SEQ ID NO: 97621 - protein, 260 aa, Arabidopsis thaliana; identical to SEQ ID NO: 23964
  peptide (1)..(260): Ceres Seq. ID no. 13486789
  misc_feature (25)..(250): Pfam Name: Cytochrome C1 family Pfam Description: Cytochrome C1 family
  misc_feature (1)..(260): Homolog of NCBI NO: 15237497 NR Description: cytochrome c1 precursor [Arabidopsis thaliana]
  misc_feature (1)..(260): Homolog of NCBI NO: 15215624 NR Description: AT5g40810/MHK7_4 [Arabidopsis thaliana]
  misc_feature (1)..(260): Homolog of NCBI NO: 15232125 NR Description: cytochrome c -related [Arabidopsis thaliana]
  misc_feature (1)..(260): Homolog of NCBI NO: 21593678 NR Description: cytochrome c, putative [Arabidopsis thaliana]
  misc_feature (1)..(260): Homolog of NCBI NO: 15809956 NR Description: AT3g27240/K17E12_6 [Arabidopsis thaliana]
  misc_feature (1)..(260): Homolog of NCBI NO: 82263 NR Description: ubiquinol-cytochrome-c reductase (EC 1.10.2.2)
  misc_feature (1)..(260): Homolog of NCBI NO: 7547401 NR Description: cytochrome c1 precursor [Solanum tuberosum]
  misc_feature (1)..(260): Homolog of NCBI NO: 117765 NR Description: Cytochrome c1, heme protein, mitochondrial (Clone PC13III) >gi|21439|emb|CAA44055.1| cytochrome c1 [Solanum
  misc_feature (1)..(260): Homolog of NCBI NO: 82264 NR Description: ubiquinol-cytochrome-c reductase (EC 1.10.2.2)
  misc_feature (1)..(260): Homolog of NCBI NO: 12005507 NR Description: cytochrome c1 [Chlamydomonas reinhardtii]

SEQ ID NO: 97622 - DNA, 1302 bp, Arabidopsis thaliana
  misc_feature (1)..(1302): Ceres Seq. ID no. 13486884
  misc_feature: MA Experiment ID: 20000180 Result: Up-regulated in Transcription
  misc_feature: MA Experiment 20000180 PARAMETER Experiment Name: At_Germinating_Seeds_P Parameter: Age (hr) Value: 24 vs. 0
  misc_feature: MA Experiment 20000180 PARAMETER Experiment Name: At_Germinating_Seeds_P Parameter: Tissue Value: Germinating Seeds
  misc_feature: MA Experiment ID: 20000182 Result: Up-regulated in Transcription
  misc_feature: MA Experiment 20000182 PARAMETER Experiment Name: At_2mM_SA_P Parameter: Age (day) Value: 14
  misc_feature: MA Experiment 20000182 PARAMETER Experiment Name: At_2mM_SA_P Parameter: Organism Value: A. thaliana
  misc_feature: MA Experiment 20000182 PARAMETER Experiment Name: At_2mM_SA_P Parameter: Plant Line Value: WS
  misc_feature: MA Experiment 20000182 PARAMETER Experiment Name: At_2mM_SA_P Parameter: Timepoint (hr) Value: 6
  misc_feature: MA Experiment 20000182 PARAMETER Experiment Name: At_2mM_SA_P Parameter: Tissue Value: Aerial
  misc_feature: MA Experiment 20000182 PARAMETER Experiment Name: At_2mM_SA_P Parameter: Treatment Value: 2mM SA vs. No Treatment
  misc_feature: MA Experiment ID: 20000227 Result: Up-regulated in Transcription
  misc_feature: MA Experiment 20000227 PARAMETER Experiment Name: At_Root-Tips-vs-Tops_P Parameter: Tissue Value: Root Tips vs. Root Tops
  misc_feature: MA Experiment ID: 20000234 Result: Up-regulated in Transcription
  misc_feature: MA Experiment 20000234 PARAMETER Experiment Name: At_Siliques_P Parameter: Age (day) Value: 21
  misc_feature: MA Experiment 20000234 PARAMETER Experiment Name: At_Siliques_P Parameter: Organism Value: A. thaliana
  misc_feature: MA Experiment 20000234 PARAMETER Experiment Name: At_Siliques_P Parameter: Plant Line Value: WS
  misc_feature: MA Experiment 20000234 PARAMETER Experiment Name: At_Siliques_P Parameter: Tissue Value: Less Than 5mm Siliques vs. Whole Plant
  misc_feature: MA Experiment ID: 20000495 Result: Up-regulated in Transcription
  misc_feature: MA Experiment 20000495 PARAMETER Experiment Name: At_Guard_Cells_P Parameter: Harvest Date Value: 8/2/2002
  misc_feature: MA Experiment 20000495 PARAMETER Experiment Name: At_Guard_Cells_P Parameter: Organism Value: A. thaliana
  misc_feature: MA Experiment 20000495 PARAMETER Experiment Name: At_Guard_Cells_P Parameter: Tissue Value: Guard Cells vs. Leaves
aacgagagaagaacgttttaataaacagagagcagagcacttgttctaaagatcaaagcttaagtgagaagcagaaaaaaaaatggcgaaatctcagatctggtttggttttgcgttactcgcgttgcttctggtttcagccgtagctgacgatgtggttgttttgactgacgatagcttcgaaaaggaagttggtaaagataaaggagctctcgtcgagttttacgctccctggtgtggtcactgcaagaaacttgctccagagtatgaaaagctaggggcaagcttcaagaaggctaagtctgtgttgattgcaaaggttgattgtgatgagcaaaagagtgtctgtactaaatatggtgttagtggatacccaaccattcagtggtttcctaaaggatctcttgaacctcaaaagtatgagggtccacgcaatgctgaagctttggctgaatacgtgaacaaggaaggaggcaccaacgtaaaattagctgcagttccacaaaacgtggttgttttgacacctgacaatttcgatgagattgttctggatcaaaacaaagatgtcctagtcgaattttatgcaccatggtgtggccactgcaaatcactcgctcccacatacgaaaaggtagccacagtgtttaaacaggaagaaggtgtagtcatcgccaatttggatgctgatgcacacaaagcccttggcgagaaatatggagtgagtggattcccaacattgaaattcttcccaaaggacaacaaagctggtcacgattatgacggtggcagggatttagatgactttgtaagcttcatcaacgagaaatctgggaccagcagggacagtaaagggcagcttacttcaaaggctggtatagtcgaaagcttagatgctttggtaaaagagttagttgcagctagtgaagatgagaagaaggcagtgttgtctcgcatagaagaggaagcaagtacccttaagggctccaccacgaggtatggaaagctttacttgaaactcgcaaagagctacatagaaaaaggttcagactatgctagcaaagaaacggagaggcttggacgggtgcttgggaagtcgataagtccagtgaaagctgatgaactcactctcaagagaaatatcctaaccacgttcgttgcttcttcttaaaagtcatatagcttgaagctaagagaataggagtcgagagagtttataactgatactgttttgagattttatgtttgtcaagatcaagaacgtctgtggttatttctggttagttctgaaactcttttgaaccc

SEQ ID NO: 97623 - protein, 361 aa, Arabidopsis thaliana; identical to SEQ ID NO: 29321
  peptide (1)..(361): Ceres Seq. ID no. 13486885
  misc_feature (1)..(361): Homolog of NCBI NO: 15226610 NR Description: protein disulfide isomerase family [Arabidopsis >gi|11132051|sp|O22263|PDA6_ARATH Probable protein disulfide A6 precursor (P5) >gi|7488158|pir||T00437 probable thaliana
  misc_feature (1)..(357): Homolog of NCBI NO: 729442 NR Description: PROBABLE PROTEIN DISULFIDE ISOMERASE P5 PRECURSOR
  misc_feature (1)..(357): Homolog of NCBI NO: 7489183 NR Description: probable protein disulfide-isomerase (EC 5.3.4.1)
  misc_feature (10)..(357): Homolog of NCBI NO: 34894982 NR Description: putative protein disulfide isomerase [Oryza
  misc_feature (14)..(357): Homolog of NCBI NO: 34897646 NR Description: putative disulfide-isomerase precursor [Oryza
  misc_feature (13)..(357): Homolog of NCBI NO: 28829383 NR Description: similar to Dictyostelium discoideum (Slime mold).
  misc_feature (13)..(357): Homolog of NCBI NO: 2627440 NR Description: protein disulfide isomerase; PDI; P5-like
  misc_feature (165)..(361): Homolog of NCBI NO: 10180029 NR Description: putative protein disulfide-isomerase [Prunus
  misc_feature (10)..(358): Homolog of NCBI NO: 19114496 NR Description: putative protein disulfide isomerase (EC 5.3.4.1) pombe] >gi|3287888|sp|O13811|PDI2_SCHPO Putative protein isomerase C17H9.14c precursor >gi|7492860|pir||T37880 probable
  misc_feature (17)..(358): Homolog of NCBI NO: 2501210 NR Description: PUTATIVE DISULFIDE ISOMERASE TIGA PRECURSOR

SEQ ID NO: 97624 - DNA, 1012 bp, Arabidopsis thaliana
  misc_feature (1)..(1012): Ceres Seq. ID no. 13487008
  misc_feature: MA Experiment ID: 108434 Result: Up-regulated in Transcription
  misc_feature: MA Experiment 108434 PARAMETER Experiment Name: At_Root_Tips_cDNA_P Parameter: Tissue Value: Root Tips
  misc_feature: MA Experiment ID: 108461 Result: Up-regulated in Transcription
  misc_feature: MA Experiment 108461 PARAMETER Experiment Name: At_Germinating_Seeds_cDNA_P Parameter: Age (day) Value: 1 vs. 0
  misc_feature: MA Experiment 108461 PARAMETER Experiment Name: At_Germinating_Seeds_cDNA_P Parameter: Tissue Value: Germinating Seeds
  misc_feature: MA Experiment ID: 20000112 Result: Up-regulated in Transcription
  misc_feature: MA Experiment 20000112 PARAMETER Experiment Name: At_42deg_Heat_cDNA_P Parameter: Temperature (deg C) Value: 42 vs. 22
  misc_feature: MA Experiment 20000112 PARAMETER Experiment Name: At_42deg_Heat_cDNA_P Parameter: Timepoint (hr) Value: 2
  misc_feature: MA Experiment 20000112 PARAMETER Experiment Name: At_42deg_Heat_cDNA_P Parameter: Tissue Value: Aerial
  misc_feature: MA Experiment ID: 20000179 Result: Up-regulated in Transcription
  misc_feature: MA Experiment 20000179 PARAMETER Experiment Name: At_Germinating_Seeds_P Parameter: Age (hr) Value: 6 vs. 0
  misc_feature: MA Experiment 20000179 PARAMETER Experiment Name: At_Germinating_Seeds_P Parameter: Tissue Value: Germinating Seeds
  misc_feature: MA Experiment ID: 20000184 Result: Up-regulated in Transcription
  misc_feature: MA Experiment 20000184 PARAMETER Experiment Name: At_Shoots__P Parameter: Age (day) Value: 7
  misc_feature: MA Experiment 20000184 PARAMETER Experiment Name: At_Shoots__P Parameter: Tissue Value: Shoots vs. Whole Plant
  misc_feature: MA Experiment ID: 20000234 Result: Up-regulated in Transcription
  misc_feature: MA Experiment 20000234 PARAMETER Experiment Name: At_Siliques_P Parameter: Age (day) Value: 21
  misc_feature: MA Experiment 20000234 PARAMETER Experiment Name: At_Siliques_P Parameter: Organism Value: A. thaliana
  misc_feature: MA Experiment 20000234 PARAMETER Experiment Name: At_Siliques_P Parameter: Plant Line Value: WS
  misc_feature: MA Experiment 20000234 PARAMETER Experiment Name: At_Siliques_P Parameter: Tissue Value: Less Than 5mm Siliques vs. Whole Plant
  misc_feature: MA Experiment ID: 20001558 Result: Up-regulated in Transcription
  misc_feature: MA Experiment 20001558 PARAMETER Experiment Name: At_Drought_Soil_Dry_P Parameter: Age (day) Value: 27
  misc_feature: MA Experiment 20001558 PARAMETER Experiment Name: At_Drought_Soil_Dry_P Parameter: Organism Value: A. thaliana
  misc_feature: MA Experiment 20001558 PARAMETER Experiment Name: At_Drought_Soil_Dry_P Parameter: Plant Line Value: WS
  misc_feature: MA Experiment 20001558 PARAMETER Experiment Name: At_Drought_Soil_Dry_P Parameter: Post Timepoint (hr) Value: 6
  misc_feature: MA Experiment 20001558 PARAMETER Experiment Name: At_Drought_Soil_Dry_P Parameter: Post-Treatment Value: Re-Water vs. No Drought
  misc_feature: MA Experiment 20001558 PARAMETER Experiment Name: At_Drought_Soil_Dry_P Parameter: Timepoint (day) Value: 13
  misc_feature: MA Experiment 20001558 PARAMETER Experiment Name: At_Drought_Soil_Dry_P Parameter: Treatment Value: Drought vs. No Drought
  misc_feature: MA Experiment ID: 20001560 Result: Up-regulated in Transcription
  misc_feature: MA Experiment 20001560 PARAMETER Experiment Name: At_Drought_Soil_Dry_P Parameter: Age (day) Value: 28
  misc_feature: MA Experiment 20001560 PARAMETER Experiment Name: At_Drought_Soil_Dry_P Parameter: Organism Value: A. thaliana
  misc_feature: MA Experiment 20001560 PARAMETER Experiment Name: At_Drought_Soil_Dry_P Parameter: Plant Line Value: WS
  misc_feature: MA Experiment 20001560 PARAMETER Experiment Name: At_Drought_Soil_Dry_P Parameter: Post Timepoint (hr) Value: None
  misc_feature: MA Experiment 20001560 PARAMETER Experiment Name: At_Drought_Soil_Dry_P Parameter: Post-Treatment Value: None
  misc_feature: MA Experiment 20001560 PARAMETER Experiment Name: At_Drought_Soil_Dry_P Parameter: Timepoint (day) Value: 14
  misc_feature: MA Experiment 20001560 PARAMETER Experiment Name: At_Drought_Soil_Dry_P Parameter: Treatment Value: Drought vs. No Drought
ctgtttctttttgcttccttagacttctccgtcgattaacccttgccgagggtcattttttttttcttgaattttttcaccaagtgttcgttcacggcattgcttgtcctccagtatgagtatctccggtgctgcagttggttcaggcagaaatttaagaagagcggtagagtttgggaaaactcatgtggttaggcctaaagggaaacatcaagcaactattgtctggttacatgggcttggggacaatggctcgagctggtcccagcttttggagacccttccccttccaaatatcaaatggatttgcccgactgctccttctcaaccaataagtttatttggtggttttccctccacagcttggtttgatgttgtggacatcaatgaagatggacctgatgatatggaaggattggatgtggctgctgcacatgttgcaaatctgttgtcgaatgagcctgctgacattaaattaggtgttggaggattcagcatgggtgcggcgacatctctatattctgcaacttgttttgctctcggtaaatatggaaatggcaatccataccctatcaatttaagcgcaatcataggcttaagcggctggcttccttgtgcaaagacattggctggcaaactagaagaggaacagatcaagaaccgagctgcatcgttgcccattgttgtctgtcatggaaaagctgatgatgtggtaccgttcaagtttggggagaaatcttcacaggctttgctttcaaatgggtttaagaaggtgaccttcaaaccttacagtgcacttggtcaccacacaatcccacaggagttggatgagttgtgcgcatggttgacatccacgctcagcctcgaaggttgatacttcctatgatgtagctttctgatgaaaacccttcaactcttgagagtttgattgaattggatgtttcaggatttcacaatgttttcattggaatatttgtgtaagacacattcgtctagtagcaaatcttctcct

SEQ ID NO: 97625 - protein, 252 aa, Arabidopsis thaliana; identical to SEQ ID NO: 37738
  peptide (1)..(252): Ceres Seq. ID no. 13487009
  misc_feature (20)..(248): Pfam Name: Phospholipase/Carboxylesterase Pfam Description: Phospholipase/Carboxylesterase
  misc_feature (1)..(252): Homolog of NCBI NO: 15241251 NR Description: expressed protein [Arabidopsis thaliana] putative lysophospholipase [Arabidopsis thaliana]
  misc_feature (1)..(250): Homolog of NCBI NO: 34910274 NR Description: OSJNBa0089K24.24 [Oryza sativa (japonica
  misc_feature (1)..(250): Homolog of NCBI NO: 29409364 NR Description: biostress-resistance-related protein [Triticum
  misc_feature (1)..(252): Homolog of NCBI NO: 15232645 NR Description: lysophospholipase -related [Arabidopsis thaliana]
  misc_feature (1)..(182): Homolog of NCBI NO: 15219072 NR Description: hypothetical protein [Arabidopsis thaliana]
  misc_feature (196)..(252): Homolog of NCBI NO: 15219072 NR Description: hypothetical protein [Arabidopsis thaliana]
  misc_feature (1)..(182): Homolog of NCBI NO: 5903036 NR Description: F6D8.5 [Arabidopsis thaliana]
  misc_feature (196)..(225): Homolog of NCBI NO: 5903036 NR Description: F6D8.5 [Arabidopsis thaliana]
  misc_feature (102)..(252): Homolog of NCBI NO: 28932772 NR Description: FPh1 [Gossypium hirsutum]
  misc_feature (85)..(251): Homolog of NCBI NO: 34912598 NR Description: P0046B10.16 [Oryza sativa (japonica

SEQ ID NO: 97626 - protein, 155 aa, Arabidopsis thaliana; identical to SEQ ID NO: 37739
  peptide (1)..(155): Ceres Seq. ID no. 13487010
  misc_feature (1)..(151): Pfam Name: Phospholipase/Carboxylesterase Pfam Description: Phospholipase/Carboxylesterase
  misc_feature (1)..(155): Homolog of NCBI NO: 15241251 NR Description: expressed protein [Arabidopsis thaliana] putative lysophospholipase [Arabidopsis thaliana]
  misc_feature (1)..(153): Homolog of NCBI NO: 34910274 NR Description: OSJNBa0089K24.24 [Oryza sativa (japonica
  misc_feature (1)..(153): Homolog of NCBI NO: 29409364 NR Description: biostress-resistance-related protein [Triticum
  misc_feature (1)..(155): Homolog of NCBI NO: 15232645 NR Description: lysophospholipase -related [Arabidopsis thaliana]
  misc_feature (1)..(85): Homolog of NCBI NO: 15219072 NR Description: hypothetical protein [Arabidopsis thaliana]
  misc_feature (99)..(155): Homolog of NCBI NO: 15219072 NR Description: hypothetical protein [Arabidopsis thaliana]
  misc_feature (1)..(85): Homolog of NCBI NO: 5903036 NR Description: F6D8.5 [Arabidopsis thaliana]
  misc_feature (99)..(128): Homolog of NCBI NO: 5903036 NR Description: F6D8.5 [Arabidopsis thaliana]
  misc_feature (5)..(155): Homolog of NCBI NO: 28932772 NR Description: FPh1 [Gossypium hirsutum]
  misc_feature (1)..(154): Homolog of NCBI NO: 34912598 NR Description: P0046B10.16 [Oryza sativa (japonica

SEQ ID NO: 97627 - DNA, 1296 bp, Arabidopsis thaliana
  misc_feature (1)..(1296): Ceres Seq. ID no. 13487147
  misc_feature: MA Experiment ID: 108434 Result: Up-regulated in Transcription
  misc_feature: MA Experiment 108434 PARAMETER Experiment Name: At_Root_Tips_cDNA_P Parameter: Tissue Value: Root Tips
  misc_feature: MA Experiment ID: 108435 Result: Down-regulated in Transcription
  misc_feature: MA Experiment 108435 PARAMETER Experiment Name: At_stm_Mutants_cDNA_P Parameter: Plant Line Value: wt Landsburg vs stm
  misc_feature: MA Experiment 108435 PARAMETER Experiment Name: At_stm_Mutants_cDNA_P Parameter: Tissue Value: Shoot Apical Meristem Region
  misc_feature: MA Experiment ID: 108462 Result: Down-regulated in Transcription
  misc_feature: MA Experiment 108462 PARAMETER Experiment Name: At_Germinating_Seeds_cDNA_P Parameter: Age (day) Value: 2 vs. 0
  misc_feature: MA Experiment 108462 PARAMETER Experiment Name: At_Germinating_Seeds_cDNA_P Parameter: Tissue Value: Germinating Seeds
  misc_feature: MA Experiment ID: 108463 Result: Down-regulated in Transcription
  misc_feature: MA Experiment 108463 PARAMETER Experiment Name: At_Germinating_Seeds_cDNA_P Parameter: Age (day) Value: 3 vs. 0
  misc_feature: MA Experiment 108463 PARAMETER Experiment Name: At_Germinating_Seeds_cDNA_P Parameter: Tissue Value: Germinating Seeds
  misc_feature: MA Experiment ID: 108464 Result: Down-regulated in Transcription
  misc_feature: MA Experiment 108464 PARAMETER Experiment Name: At_Germinating_Seeds_cDNA_P Parameter: Age (day) Value: 4 vs. 0
  misc_feature: MA Experiment 108464 PARAMETER Experiment Name: At_Germinating_Seeds_cDNA_P Parameter: Tissue Value: Germinating Seeds
  misc_feature: MA Experiment ID: 108488 Result: Up-regulated in Transcription
  misc_feature: MA Experiment ID: 20000071 Result: Up-regulated in Transcription
  misc_feature: MA Experiment 20000071 PARAMETER Experiment Name: At_100uM_ABA_Mutants_cDNA_P Parameter: Plant Line Value: CS8104
  misc_feature: MA Experiment 20000071 PARAMETER Experiment Name: At_100uM_ABA_Mutants_cDNA_P Parameter: Timepoint (hr) Value: 6
  misc_feature: MA Experiment 20000071 PARAMETER Experiment Name: At_100uM_ABA_Mutants_cDNA_P Parameter: Tissue Value: Aerial
  misc_feature: MA Experiment 20000071 PARAMETER Experiment Name: At_100uM_ABA_Mutants_cDNA_P Parameter: Treatment Value: 100uM ABA vs. No Treatment
  misc_feature: MA Experiment ID: 20000184 Result: Up-regulated in Transcription
  misc_feature: MA Experiment 20000184 PARAMETER Experiment Name: At_Shoots__P Parameter: Age (day) Value: 7
  misc_feature: MA Experiment 20000184 PARAMETER Experiment Name: At_Shoots__P Parameter: Tissue Value: Shoots vs. Whole Plant
  misc_feature: MA Experiment ID: 20000185 Result: Down-regulated in Transcription
  misc_feature: MA Experiment 20000185 PARAMETER Experiment Name: At_Roots__P Parameter: Age (day) Value: 7 vs. 21
  misc_feature: MA Experiment 20000185 PARAMETER Experiment Name: At_Roots__P Parameter: Organism Value: A. thaliana
  misc_feature: MA Experiment 20000185 PARAMETER Experiment Name: At_Roots__P Parameter: Tissue Value: Roots vs. Whole Plant
  misc_feature: MA Experiment ID: 20000234 Result: Up-regulated in Transcription
  misc_feature: MA Experiment 20000234 PARAMETER Experiment Name: At_Siliques_P Parameter: Age (day) Value: 21
  misc_feature: MA Experiment 20000234 PARAMETER Experiment Name: At_Siliques_P Parameter: Organism Value: A. thaliana
  misc_feature: MA Experiment 20000234 PARAMETER Experiment Name: At_Siliques_P Parameter: Plant Line Value: WS
  misc_feature: MA Experiment 20000234 PARAMETER Experiment Name: At_Siliques_P Parameter: Tissue Value: Less Than 5mm Siliques vs. Whole Plant
  misc_feature: MA Experiment ID: 20000437 Result: Down-regulated in Transcription
  misc_feature: MA Experiment 20000437 PARAMETER Experiment Name: At_Drought_P Parameter: Age (day) Value: 8
  misc_feature: MA Experiment 20000437 PARAMETER Experiment Name: At_Drought_P Parameter: Organism Value: A. thaliana
  misc_feature: MA Experiment 20000437 PARAMETER Experiment Name: At_Drought_P Parameter: Plant Line Value: WS
  misc_feature: MA Experiment 20000437 PARAMETER Experiment Name: At_Drought_P Parameter: Timepoint (hr) Value: 24
  misc_feature: MA Experiment 20000437 PARAMETER Experiment Name: At_Drought_P Parameter: Tissue Value: Whole Plant
  misc_feature: MA Experiment 20000437 PARAMETER Experiment Name: At_Drought_P Parameter: Treatment Value: Drought vs. No Drought
  misc_feature: MA Experiment ID: 20000438 Result: Up-regulated in Transcription
  misc_feature: MA Experiment 20000438 PARAMETER Experiment Name: At_Shoots__P Parameter: Age (day) Value: 14
  misc_feature: MA Experiment 20000438 PARAMETER Experiment Name: At_Shoots__P Parameter: Tissue Value: Shoots vs. Whole Plant
  misc_feature: MA Experiment ID: 20000439 Result: Down-regulated in Transcription
  misc_feature: MA Experiment 20000439 PARAMETER Experiment Name: At_Roots__P Parameter: Age (day) Value: 14 vs. 21
  misc_feature: MA Experiment 20000439 PARAMETER Experiment Name: At_Roots__P Parameter: Organism Value: A. thaliana
  misc_feature: MA Experiment 20000439 PARAMETER Experiment Name: At_Roots__P Parameter: Tissue Value: Roots vs. Whole Plant
  misc_feature: MA Experiment ID: 20000495 Result: Up-regulated in Transcription
  misc_feature: MA Experiment 20000495 PARAMETER Experiment Name: At_Guard_Cells_P Parameter: Harvest Date Value: 8/2/2002
  misc_feature: MA Experiment 20000495 PARAMETER Experiment Name: At_Guard_Cells_P Parameter: Organism Value: A. thaliana
  misc_feature: MA Experiment 20000495 PARAMETER Experiment Name: At_Guard_Cells_P Parameter: Tissue Value: Guard Cells vs. Leaves
  misc_feature: MA Experiment ID: 20001451 Result: Up-regulated in Transcription
  misc_feature: MA Experiment 20001451 PARAMETER Experiment Name: At_Far-red-induction_P Parameter: Age (day) Value: 7
  misc_feature: MA Experiment 20001451 PARAMETER Experiment Name: At_Far-red-induction_P Parameter: Light Value: Far-red vs. White
  misc_feature: MA Experiment 20001451 PARAMETER Experiment Name: At_Far-red-induction_P Parameter: Organism Value: A. thaliana
  misc_feature: MA Experiment 20001451 PARAMETER Experiment Name: At_Far-red-induction_P Parameter: Plant Line Value: Columbia
  misc_feature: MA Experiment 20001451 PARAMETER Experiment Name: At_Far-red-induction_P Parameter: Timepoint (hr) Value: 24
  misc_feature: MA Experiment 20001451 PARAMETER Experiment Name: At_Far-red-induction_P Parameter: Tissue Value: Whole Plant
  misc_feature: MA Experiment ID: 20001757 Result: Up-regulated in Transcription
  misc_feature: MA Experiment 20001757 PARAMETER Experiment Name: At_50mM_NH4NO3_L-to-H_P Parameter: Timepoint (hr) Value: 6
  misc_feature: MA Experiment 20001757 PARAMETER Experiment Name: At_50mM_NH4NO3_L-to-H_P Parameter: Tissue Value: Leaf
  misc_feature: MA Experiment 20001757 PARAMETER Experiment Name: At_50mM_NH4NO3_L-to-H_P Parameter: Treatment Value: 50mM NH4NO3 vs 100mM Mannitol
actgcatcttatctccactctcaaaatcatcttcttcacccaaaaacccctaaaagccttatcccttcttcttcccatggctgcttcagcttcgtctctcgctctctcttccttcaaccctaaatctcttcctttcggcgtctccagacctgcctccgtttccctcttatctccttccctctcctttaaactcaattccgactccgtttccttctccatcgccgccaaatggaactctcccgcttctcgcttcgcccgtaacgttgcgattacctcagagttcgaggtggaagaagatggtttcgctgacgtcgctccgccaaaagagcaatctttctctgctgaccttaaactcttcgttggtaaccttcctttcaacgttgacagtgctcagctcgctcagctctttgagagtgccggaaatgttgagatggttgaggtaatctatgacaaaattacaggaagaagcagaggttttggattcgtgactatgtcttcagtttctgaagttgaggcagctgctcagcagttcaatggctatgagttggatggtagacctttgagagtcaatgctggtcccccaccaccaaagagggaagatggtttctccagaggacctaggagcagctttggaagctcaggttctggatatggaggaggtggtggttctggtgctggttcaggaaaccgtgtttatgtgggtaacctctcttggggagttgatgacatggctcttgagagtttgttctcggagcaaggaaaggttgttgaggccagagtcatctacgacagggacagtggtcgatccaagggttttggatttgtgacatacgactcttctcaagaggtccaaaatgccatcaagtccttggatggtgctgatttggacggtagacaaattagagtctcggaagctgaggctaggcctccaaggcgccaatattgagcaccaatctatgacttcctattctcaaaaacgcatattctggagggcgcttcgaagtaaagagggtttgtgagatgatggcagtttcagacggtactaagctcttagcttcgcctatgtttgttgccttggatgcaagaaggtcgtaaaggaatggtctttttttttttgagaaacgtataattaagatagaaactggagagaccatgttcttgtctgtctgaatgctgccattgactgcttcgctttggttttgattcaatttttttttctctctatatcgtggtctcttcttcctaatgcttctctgtttatttgatcctctgctcaaatgaatatgaacacacttg

SEQ ID NO: 97628 - protein, 314 aa, Arabidopsis thaliana
  peptide (1)..(314): Ceres Seq. ID no. 13487148
  misc_feature (231)..(302): Pfam Name: RNA recognition motif. (a.k.a. RRM, RBD, or RNP domain) Pfam Description: RNA recognition motif. (a.k.a. RRM, RBD, or RNP
  misc_feature (26)..(314): Homolog of NCBI NO: 15228102 NR Description: 29 kDa ribonucleoprotein, chloroplast protein cp29), putative [Arabidopsis thaliana] Putative ribonucleoprotein At2g37220, chloroplast precursor
  misc_feature (26)..(314): Homolog of NCBI NO: 21617920 NR Description: putative RNA-binding protein [Arabidopsis
  misc_feature (26)..(227): Homolog of NCBI NO: 15231817 NR Description: 29 kDa ribonucleoprotein, chloroplast protein cp29) [Arabidopsis thaliana]
  misc_feature (26)..(227): Homolog of NCBI NO: 30693824 NR Description: 29 kDa ribonucleoprotein, chloroplast
  misc_feature (201)..(314): Homolog of NCBI NO: 15231817 NR Description: 29 kDa ribonucleoprotein, chloroplast protein cp29) [Arabidopsis thaliana]
  misc_feature (201)..(314): Homolog of NCBI NO: 30693824 NR Description: 29 kDa ribonucleoprotein, chloroplast
  misc_feature (36)..(227): Homolog of NCBI NO: 681904 NR Description: cp29 [Arabidopsis thaliana]
  misc_feature (201)..(314): Homolog of NCBI NO: 681904 NR Description: cp29 [Arabidopsis thaliana]
  misc_feature (26)..(314): Homolog of NCBI NO: 12230584 NR Description: 29 kDa ribonucleoprotein A, chloroplast precursor
  misc_feature (26)..(314): Homolog of NCBI NO: 1350820 NR Description: 30 kDa ribonucleoprotein, chloroplast precursor
LHLISTLKIIFFTQKPLKALSLLLPMAASASSLALSSFNPKSLPFGVSRPASVSLLSPSLSFKLNSDSVSFSIAAKWNSPASRFARNVAITSEFEVEEDGFADVAPPKEQSFSADLKLFVGNLPFNVDSAQLAQLFESAGNVEMVEVIYDKITGRSRGFGFVTMSSVSEVEAAAQQFNGYELDGRPLRVNAGPPPPKREDGFSRGPRSSFGSSGSGYGGGGGSGAGSGNRVYVGNLSWGVDDMALESLFSEQGKVVEARVIYDRDSGRSKGFGFVTYDSSQEVQNAIKSLDGADLDGRQIRVSEAEARPPRRQY

SEQ ID NO: 97629 - protein, 289 aa, Arabidopsis thaliana
  peptide (1)..(289): Ceres Seq. ID no. 13487149
  misc_feature (206)..(277): Pfam Name: RNA recognition motif. (a.k.a. RRM, RBD, or RNP domain) Pfam Description: RNA recognition motif. (a.k.a. RRM, RBD, or RNP
  misc_feature (1)..(289): Homolog of NCBI NO: 15228102 NR Description: 29 kDa ribonucleoprotein, chloroplast protein cp29), putative [Arabidopsis thaliana] Putative ribonucleoprotein At2g37220, chloroplast precursor
  misc_feature (1)..(289): Homolog of NCBI NO: 21617920 NR Description: putative RNA-binding protein [Arabidopsis
  misc_feature (1)..(202): Homolog of NCBI NO: 15231817 NR Description: 29 kDa ribonucleoprotein, chloroplast protein cp29) [Arabidopsis thaliana]
  misc_feature (1)..(202): Homolog of NCBI NO: 30693824 NR Description: 29 kDa ribonucleoprotein, chloroplast
  misc_feature (176)..(289): Homolog of NCBI NO: 15231817 NR Description: 29 kDa ribonucleoprotein, chloroplast protein cp29) [Arabidopsis thaliana]
  misc_feature (176)..(289): Homolog of NCBI NO: 30693824 NR Description: 29 kDa ribonucleoprotein, chloroplast
  misc_feature (11)..(202): Homolog of NCBI NO: 681904 NR Description: cp29 [Arabidopsis thaliana]
  misc_feature (176)..(289): Homolog of NCBI NO: 681904 NR Description: cp29 [Arabidopsis thaliana]
  misc_feature (1)..(289): Homolog of NCBI NO: 12230584 NR Description: 29 kDa ribonucleoprotein A, chloroplast precursor
  misc_feature (1)..(289): Homolog of NCBI NO: 1350820 NR Description: 30 kDa ribonucleoprotein, chloroplast precursor
MAASASSLALSSFNPKSLPFGVSRPASVSLLSPSLSFKLNSDSVSFSIAAKWNSPASRFARNVAITSEFEVEEDGFADVAPPKEQSFSADLKLFVGNLPFNVDSAQLAQLFESAGNVEMVEVIYDKITGRSRGFGFVTMSSVSEVEAAAQQFNGYELDGRPLRVNAGPPPPKREDGFSRGPRSSFGSSGSGYGGGGGSGAGSGNRVYVGNLSWGVDDMALESLFSEQGKVVEARVIYDRDSGRSKGFGFVTYDSSQEVQNAIKSLDGADLDGRQIRVSEAEARPPRRQY

SEQ ID NO: 97630 - protein, 171 aa, Arabidopsis thaliana; identical to SEQ ID NO: 28167
  peptide (1)..(171): Ceres Seq. ID no. 13487150
  misc_feature (88)..(159): Pfam Name: RNA recognition motif. (a.k.a. RRM, RBD, or RNP domain) Pfam Description: RNA recognition motif. (a.k.a. RRM, RBD, or RNP
  misc_feature (1)..(171): Homolog of NCBI NO: 15228102 NR Description: 29 kDa ribonucleoprotein, chloroplast protein cp29), putative [Arabidopsis thaliana] Putative ribonucleoprotein At2g37220, chloroplast precursor
  misc_feature (1)..(171): Homolog of NCBI NO: 21617920 NR Description: putative RNA-binding protein [Arabidopsis
  misc_feature (1)..(84): Homolog of NCBI NO: 15231817 NR Description: 29 kDa ribonucleoprotein, chloroplast protein cp29) [Arabidopsis thaliana]
  misc_feature (1)..(84): Homolog of NCBI NO: 30693824 NR Description: 29 kDa ribonucleoprotein, chloroplast
  misc_feature (58)..(171): Homolog of NCBI NO: 15231817 NR Description: 29 kDa ribonucleoprotein, chloroplast protein cp29) [Arabidopsis thaliana]
  misc_feature (58)..(171): Homolog of NCBI NO: 30693824 NR Description: 29 kDa ribonucleoprotein, chloroplast
  misc_feature (1)..(84): Homolog of NCBI NO: 681904 NR Description: cp29 [Arabidopsis thaliana]
  misc_feature (58)..(171): Homolog of NCBI NO: 681904 NR Description: cp29 [Arabidopsis thaliana]
  misc_feature (1)..(171): Homolog of NCBI NO: 12230584 NR Description: 29 kDa ribonucleoprotein A, chloroplast precursor
  misc_feature (1)..(171): Homolog of NCBI NO: 1350820 NR Description: 30 kDa ribonucleoprotein, chloroplast precursor

SEQ ID NO: 97631 - DNA, 1354 bp, Arabidopsis thaliana
  misc_feature (1)..(1354): Ceres Seq. ID no. 13487388
  misc_feature: MA Experiment ID: 108577 Result: Down-regulated in Transcription
  misc_feature: MA Experiment 108577 PARAMETER Experiment Name: At_42deg_Heat_cDNA_P Parameter: Temperature (deg C) Value: 42 vs. 22
  misc_feature: MA Experiment 108577 PARAMETER Experiment Name: At_42deg_Heat_cDNA_P Parameter: Timepoint (hr) Value: 6
  misc_feature: MA Experiment 108577 PARAMETER Experiment Name: At_42deg_Heat_cDNA_P Parameter: Tissue Value: Aerial
  misc_feature: MA Experiment ID: 108595 Result: Down-regulated in Transcription
  misc_feature: MA Experiment 108595 PARAMETER Experiment Name: At_Ler-pi_Ovule_cDNA_P Parameter: Plant Line Value: null
  misc_feature: MA Experiment ID: 20000224 Result: Down-regulated in Transcription
  misc_feature: MA Experiment ID: 20000306 Result: Up-regulated in Transcription
  misc_feature: MA Experiment 20000306 PARAMETER Experiment Name: At_Germinating_Seeds_Sub_P Parameter: Age (hr) Value: 6 vs. 0
  misc_feature: MA Experiment 20000306 PARAMETER Experiment Name: At_Germinating_Seeds_Sub_P Parameter: Organism Value: A. thaliana
  misc_feature: MA Experiment 20000306 PARAMETER Experiment Name: At_Germinating_Seeds_Sub_P Parameter: Plant Line Value: WS
  misc_feature: MA Experiment 20000306 PARAMETER Experiment Name: At_Germinating_Seeds_Sub_P Parameter: Tissue Value: Germinating Seeds
  misc_feature: MA Experiment ID: 20000307 Result: Up-regulated in Transcription
  misc_feature: MA Experiment 20000307 PARAMETER Experiment Name: At_Germinating_Seeds_Sub_P Parameter: Age (hr) Value: 24 vs. 0
  misc_feature: MA Experiment 20000307 PARAMETER Experiment Name: At_Germinating_Seeds_Sub_P Parameter: Organism Value: A. thaliana
  misc_feature: MA Experiment 20000307 PARAMETER Experiment Name: At_Germinating_Seeds_Sub_P Parameter: Plant Line Value: WS
  misc_feature: MA Experiment 20000307 PARAMETER Experiment Name: At_Germinating_Seeds_Sub_P Parameter: Tissue Value: Germinating Seeds
cagacaattatttgttcatcttgaatttgtgtcccaagaacatatctctctctctctctctcctcaccttggattctctgtttgatgattgctagttctttagaagagcaatgagttattctggagccggactcggaaagcctggctcaggtaaaaggagaataagggatcttttaactcaatctgataaccgagtctgcgctgattgtggcgctccagatcctaagtgggcgtcagctaatattggagtgtttatatgcttaaaatgttgtggtgtccacagaagccttggcagtcatatctcaaaggtcttatccgtgacattggatgaatggtcagatgaagaagtcgattcgatgattgaaattggaggaaatgcctctgcaaattcaatttacgaggcgtttattcctgaaggtagctctaagcctggacctgatgctagtcatgaccagcgtatgaggttcattaggtcgaaatatgagcaccaagagtttctgaaaccaagcttgcggatcacatccgtgaggggctctagtacaaagactccagcatttctttcatcgagtctatctaaaaagattgttgatagctttcgcactaattcatcatcgcaacagccgcaacttgaaggcatggttgagtttattggattgttgaaggtgactattaaaaagggtaccaatatggccatccgagatatgatgtcaagtgatccctatgttgtgttgactctaggacaacagaaggctcaatctactgtagtgaagagcaacttaaaccctgtctggaatgaggaactcatgctctctgttcctcataactatggctcagtgaaattgcaagtgtttgactatgacacattttctgctgatgacataatgggagaagctgagattgatatccagcctctgattacatctgcaatggcttttggagaccctgaaatgtttggagatatgcagattggaaaatggctgaaatcgcacgacaatgctcttatagaagatagcatcatcaacattgcagatggtaaagtgaagcaagaggttcaaatcaagcttcagaatgttgaatctggtgaactagaactagaaatggagtggctacctcttgagcaataaataatcaactatataatagggtcattatatataaccaaacaaattttattactgtattcattattttaacattcccccttggttcttgtttgacaaatttttgaaactttgatctcattgaaaactttctttcgtactttgttgttgtaatgttcttttggcagattagatatttgtataactcatatgattatatgttttgactcatgttcttcaaaagatttcatttg

SEQ ID NO: 97632 - protein, 337 aa, Arabidopsis thaliana; identical to SEQ ID NO: 27546
  peptide (1)..(337): Ceres Seq. ID no. 13487389
  misc_feature (15)..(137): Pfam Name: Putative GTPase activating protein for Arf Pfam Description: Putative GTPase activating protein for Arf
  misc_feature (1)..(337): Homolog of NCBI NO: 18415638 NR Description: zinc finger and C2 domain protein (ZAC) thaliana] >gi|30685338|ref|NP_849416.1| zinc finger and C2 domain
  misc_feature (1)..(337): Homolog of NCBI NO: 21594052 NR Description: putative GTPase activating protein [Arabidopsis
  misc_feature (40)..(337): Homolog of NCBI NO: 7486586 NR Description: hypothetical protein F7J7.100 - Arabidopsis >gi|2911073|emb|CAA17535.1| putative protein [Arabidopsis >gi|7268913|emb|CAB79116.1| putative protein [Arabidopsis
  misc_feature (1)..(41): Homolog of NCBI NO: 7486586 NR Description: hypothetical protein F7J7.100 - Arabidopsis >gi|2911073|emb|CAA17535.1| putative protein [Arabidopsis >gi|7268913|emb|CAB79116.1| putative protein [Arabidopsis
  misc_feature (1)..(337): Homolog of NCBI NO: 18412932 NR Description: zinc finger and C2 domain protein, putative thaliana] >gi|21536965|gb|AAM61306.1| putative zinc finger and C2
  misc_feature (1)..(337): Homolog of NCBI NO: 25407332 NR Description: hypothetical protein AT4g05330 [imported] - thaliana >gi|7267293|emb|CAB81075.1| putative protein
  misc_feature (17)..(337): Homolog of NCBI NO: 6648206 NR Description: putative GTPase activating protein [Arabidopsis
  misc_feature (17)..(337): Homolog of NCBI NO: 30680493 NR Description: zinc finger and C2 domain protein, putative
  misc_feature (9)..(337): Homolog of NCBI NO: 19386828 NR Description: putative zinc finger and C2 domain protein [Oryza
  misc_feature (1)..(121): Homolog of NCBI NO: 25411567 NR Description: hypothetical protein At2g14490 [imported] -

SEQ ID NO: 97633 - protein, 255 aa, Arabidopsis thaliana; identical to SEQ ID NO: 27547
  peptide (1)..(255): Ceres Seq. ID no. 13487390
  misc_feature (1)..(55): Pfam Name: Putative GTPase activating protein for Arf Pfam Description: Putative GTPase activating protein for Arf
  misc_feature (1)..(255): Homolog of NCBI NO: 18415638 NR Description: zinc finger and C2 domain protein (ZAC) thaliana] >gi|30685338|ref|NP_849416.1| zinc finger and C2 domain
  misc_feature (1)..(255): Homolog of NCBI NO: 21594052 NR Description: putative GTPase activating protein [Arabidopsis
  misc_feature (1)..(255): Homolog of NCBI NO: 7486586 NR Description: hypothetical protein F7J7.100 - Arabidopsis >gi|2911073|emb|CAA17535.1| putative protein [Arabidopsis >gi|7268913|emb|CAB79116.1| putative protein [Arabidopsis
  misc_feature (1)..(255): Homolog of NCBI NO: 18412932 NR Description: zinc finger and C2 domain protein, putative thaliana] >gi|21536965|gb|AAM61306.1| putative zinc finger and C2
  misc_feature (1)..(255): Homolog of NCBI NO: 25407332 NR Description: hypothetical protein AT4g05330 [imported] - thaliana >gi|7267293|emb|CAB81075.1| putative protein
  misc_feature (1)..(255): Homolog of NCBI NO: 6648206 NR Description: putative GTPase activating protein [Arabidopsis
  misc_feature (1)..(255): Homolog of NCBI NO: 30680493 NR Description: zinc finger and C2 domain protein, putative
  misc_feature (1)..(255): Homolog of NCBI NO: 19386828 NR Description: putative zinc finger and C2 domain protein [Oryza
  misc_feature (1)..(39): Homolog of NCBI NO: 25411567 NR Description: hypothetical protein At2g14490 [imported] -
  misc_feature (1)..(28): Homolog of NCBI NO: 15225946 NR Description: ARF GTPase-activating domain-containing protein thaliana] >gi|20197515|gb|AAD15467.2| unknown protein

SEQ ID NO: 97634 - protein, 221 aa, Arabidopsis thaliana; identical to SEQ ID NO: 27548
  peptide (1)..(221): Ceres Seq. ID no. 13487391
  misc_feature (67)..(146): Pfam Name: C2 domain Pfam Description: C2 domain
  misc_feature (1)..(221): Homolog of NCBI NO: 18415638 NR Description: zinc finger and C2 domain protein (ZAC) thaliana] >gi|30685338|ref|NP_849416.1| zinc finger and C2 domain
  misc_feature (1)..(221): Homolog of NCBI NO: 21594052 NR Description: putative GTPase activating protein [Arabidopsis
  misc_feature (1)..(221): Homolog of NCBI NO: 7486586 NR Description: hypothetical protein F7J7.100 - Arabidopsis >gi|2911073|emb|CAA17535.1| putative protein [Arabidopsis >gi|7268913|emb|CAB79116.1| putative protein [Arabidopsis
  misc_feature (1)..(221): Homolog of NCBI NO: 18412932 NR Description: zinc finger and C2 domain protein, putative thaliana] >gi|21536965|gb|AAM61306.1| putative zinc finger and C2
  misc_feature (1)..(221): Homolog of NCBI NO: 25407332 NR Description: hypothetical protein AT4g05330 [imported] - thaliana >gi|7267293|emb|CAB81075.1| putative protein
  misc_feature (1)..(221): Homolog of NCBI NO: 6648206 NR Description: putative GTPase activating protein [Arabidopsis
  misc_feature (1)..(221): Homolog of NCBI NO: 30680493 NR Description: zinc finger and C2 domain protein, putative
  misc_feature (1)..(221): Homolog of NCBI NO: 19386828 NR Description: putative zinc finger and C2 domain protein [Oryza
  misc_feature (64)..(219): Homolog of NCBI NO: 33146442 NR Description: zinc finger and C2 domain protein-like [Oryza
  misc_feature (1)..(39): Homolog of NCBI NO: 28850396 NR Description: similar to Arabidopsis thaliana (Mouse-ear

SEQ ID NO: 97635 - DNA, 1141 bp, Arabidopsis thaliana
  misc_feature (1)..(1141): Ceres Seq. ID no. 13487506
  misc_feature: MA Experiment ID: 108573 Result: Up-regulated in Transcription
  misc_feature: MA Experiment 108573 PARAMETER Experiment Name: At_Drought_cDNA_P Parameter: Timepoint (hr) Value: 6
  misc_feature: MA Experiment 108573 PARAMETER Experiment Name: At_Drought_cDNA_P Parameter: Tissue Value: Aerial
  misc_feature: MA Experiment 108573 PARAMETER Experiment Name: At_Drought_cDNA_P Parameter: Treatment Value: Drought vs. No Drought
tttattttgttctttctctatatccttcaatcaatgtgaaaaaaaagctctcccttttggcagtttccgatgtttggtcgccattcgattatcccaaataaccagattggtaccgcctctgcttccgctggtgaagaccatgtctctgcctccgctacgtctggtcacattccttacgacgatatggaagaaatccctcatcctgactctatctatggtgctgcctccgatttgattcccgatggctctcaattggttgctcaccgatccgatggctctgaattacttgtttctcggccaccggaaggggcgaatcagcttacgatctcgttccgtggacaagtttacgtttttgatgccgttggtgctgacaaggtggatgctgtgttgtcgctgttgggtggttctactgagcttgctcctggtccgcaggtgatggaactagctcaacagcagaatcatatgcctgttgtagaatatcagagccgctgtagccttccgcaacgggcacaatccttggataggtttcggaagaagaggaatgctagatgtttcgagaagaaagtaagatacggtgttcgccaagaagttgccttaagaatggcacgtaataaaggtcaattcacctcttcaaagatgacagatggggcttataactctggcacagatcaagattctgcccaagatgatgcccatccagaaatatcgtgtactcattgcggcattagttccaaatgtacaccaatgatgcgacgtggcccttccggccccaggactctctgcaatgcctgtggacttttttgggctaacaggggtacattgagggatctctcaaagaaaacagaagagaatcagttggctttaatgaaaccggatgatggtgggagtgttgctgatgctgctaacaacttaaacactgaagctgcaagtgttgaagaacacacttccatggtttctcttgccaatggggataattctaatctgttaggtgatcactaaatactgtgataagaatcagaagatagaaatctttgtagaatcagatggtcttctctatgaatttatcttttcaccatcacatgtattatagaaaccgtaaccgaacctcaaatcaaataccatatcagatgtctttggtttc

SEQ ID NO: 97636 - protein, 309 aa, Arabidopsis thaliana; identical to SEQ ID NO: 34775
  peptide (1)..(309): Ceres Seq. ID no. 13487507
  misc_feature (152)..(190): Pfam Name: CCT motif Pfam Description: CCT motif
  misc_feature (1)..(309): Homolog of NCBI NO: 15233844 NR Description: Zinc finger protein, Zim [Arabidopsis thaliana]
  misc_feature (1)..(309): Homolog of NCBI NO: 11358938 NR Description: zinc-finger protein - Arabidopsis thaliana
  misc_feature (21)..(276): Homolog of NCBI NO: 30686115 NR Description: GATA zinc finger protein [Arabidopsis thaliana] Unknown protein [Arabidopsis thaliana]
  misc_feature (67)..(304): Homolog of NCBI NO: 18403600 NR Description: zinc finger protein family [Arabidopsis thaliana]
  misc_feature (67)..(304): Homolog of NCBI NO: 15028099 NR Description: putative flowering protein CONSTANS [Arabidopsis
  misc_feature (67)..(276): Homolog of NCBI NO: 18402914 NR Description: GATA zinc finger protein [Arabidopsis thaliana] emb|CAB45082.1~gene_id:MXL8.2~similar to unknown protein
  misc_feature (67)..(276): Homolog of NCBI NO: 21537322 NR Description: flowering protein CONSTANS, putative [Arabidopsis
  misc_feature (78)..(303): Homolog of NCBI NO: 13174240 NR Description: putative zinc finger protein [Oryza sativa]
  misc_feature (178)..(276): Homolog of NCBI NO: 26451385 NR Description: unknown protein [Arabidopsis thaliana]
  misc_feature (67)..(221): Homolog of NCBI NO: 25405485 NR Description: hypothetical protein F19C24.17 [imported] - thaliana >gi|12321671|gb|AAG50873.1|AC025294_11 hypothetical [Arabidopsis thaliana] >gi|12325361|gb|AAG52620.1|AC024261_7

SEQ ID NO: 97637 - protein, 271 aa, Arabidopsis thaliana; identical to SEQ ID NO: 34776
  peptide (1)..(271): Ceres Seq. ID no. 13487508
  misc_feature (114)..(152): Pfam Name: CCT motif Pfam Description: CCT motif
  misc_feature (1)..(271): Homolog of NCBI NO: 15233844 NR Description: Zinc finger protein, Zim [Arabidopsis thaliana]
  misc_feature (1)..(271): Homolog of NCBI NO: 11358938 NR Description: zinc-finger protein - Arabidopsis thaliana
  misc_feature (1)..(238): Homolog of NCBI NO: 30686115 NR Description: GATA zinc finger protein [Arabidopsis thaliana] Unknown protein [Arabidopsis thaliana]
  misc_feature (29)..(266): Homolog of NCBI NO: 18403600 NR Description: zinc finger protein family [Arabidopsis thaliana]
  misc_feature (29)..(266): Homolog of NCBI NO: 15028099 NR Description: putative flowering protein CONSTANS [Arabidopsis
  misc_feature (29)..(238): Homolog of NCBI NO: 18402914 NR Description: GATA zinc finger protein [Arabidopsis thaliana] emb|CAB45082.1~gene_id:MXL8.2~similar to unknown protein
  misc_feature (29)..(238): Homolog of NCBI NO: 21537322 NR Description: flowering protein CONSTANS, putative [Arabidopsis
  misc_feature (40)..(265): Homolog of NCBI NO: 13174240 NR Description: putative zinc finger protein [Oryza sativa]
  misc_feature (140)..(238): Homolog of NCBI NO: 26451385 NR Description: unknown protein [Arabidopsis thaliana]
  misc_feature (29)..(183): Homolog of NCBI NO: 25405485 NR Description: hypothetical protein F19C24.17 [imported] - thaliana >gi|12321671|gb|AAG50873.1|AC025294_11 hypothetical [Arabidopsis thaliana] >gi|12325361|gb|AAG52620.1|AC024261_7

SEQ ID NO: 97638 - protein, 187 aa, Arabidopsis thaliana; identical to SEQ ID NO: 34777
  peptide (1)..(187): Ceres Seq. ID no. 13487509
  misc_feature (30)..(68): Pfam Name: CCT motif Pfam Description: CCT motif
  misc_feature (1)..(187): Homolog of NCBI NO: 15233844 NR Description: Zinc finger protein, Zim [Arabidopsis thaliana]
  misc_feature (1)..(187): Homolog of NCBI NO: 11358938 NR Description: zinc-finger protein - Arabidopsis thaliana
  misc_feature (1)..(154): Homolog of NCBI NO: 30686115 NR Description: GATA zinc finger protein [Arabidopsis thaliana] Unknown protein [Arabidopsis thaliana]
  misc_feature (1)..(182): Homolog of NCBI NO: 18403600 NR Description: zinc finger protein family [Arabidopsis thaliana]
  misc_feature (1)..(182): Homolog of NCBI NO: 15028099 NR Description: putative flowering protein CONSTANS [Arabidopsis
  misc_feature (1)..(154): Homolog of NCBI NO: 18402914 NR Description: GATA zinc finger protein [Arabidopsis thaliana] emb|CAB45082.1~gene_id:MXL8.2~similar to unknown protein
  misc_feature (1)..(154): Homolog of NCBI NO: 21537322 NR Description: flowering protein CONSTANS, putative [Arabidopsis
  misc_feature (1)..(181): Homolog of NCBI NO: 13174240 NR Description: putative zinc finger protein [Oryza sativa]
  misc_feature (56)..(154): Homolog of NCBI NO: 26451385 NR Description: unknown protein [Arabidopsis thaliana]
  misc_feature (1)..(99): Homolog of NCBI NO: 25405485 NR Description: hypothetical protein F19C24.17 [imported] - thaliana >gi|12321671|gb|AAG50873.1|AC025294_11 hypothetical [Arabidopsis thaliana] >gi|12325361|gb|AAG52620.1|AC024261_7

SEQ ID NO: 97639 - DNA, 1349 bp, Arabidopsis thaliana
  misc_feature (1)..(1349): Ceres Seq. ID no. 13487597
  misc_feature: MA Experiment ID: 108668 Result: Down-regulated in Transcription
  misc_feature: MA Experiment 108668 PARAMETER Experiment Name: At_2mM_SA_cDNA_P Parameter: Plant Line Value: WS
  misc_feature: MA Experiment 108668 PARAMETER Experiment Name: At_2mM_SA_cDNA_P Parameter: Timepoint (hr) Value: 6
  misc_feature: MA Experiment 108668 PARAMETER Experiment Name: At_2mM_SA_cDNA_P Parameter: Treatment Value: 2mM SA vs. No Treatment
  misc_feature: MA Experiment ID: 20000224 Result: Down-regulated in Transcription
acttatcctgatcactagtgatcagtgataatctattaatcatctaggtggcagaagcagcatcgttgagaacgaagaagcttgaaaaagttgcgagctcagagaatctggaagtagcaaaatttggcggctttaactcagcaatttgttctgtacatggtattttgagaagagagcattcagctcacagttacgctctgcctatccagcttctaaatctactcactttggtcgagtcatggcttcttctggatctgaggcaaaagctaattacgcacccatatctaccaatgaacctgttgtgtctgttgattggctccactctaatcttggagatgctgatataaaggttttggatgcctcatggtacatggcacatgagcaaagaaatccaatccaagagtatcaagttgctcatattccaggtgctctcttctttgatttgaatggaatagcagatcgaaaaacaaatttacgacacatgctaccatctgaggaagcttttgctgctggttgttctgctcttggaatcgagaacaacgatggagtggttgtgtatgatggaatggggctctttagtgcagctcgtgtatggtggatgtttagagtctttggacatgacaaagtatgggtacttgatggaggcttgccgaaatggcgtgcttcaggctatgacgttgaatccagtgtttcaaatgatgccattttgaaagccagtgcagcaactgaggctatagagaagatctatcaaggacaaacaattagcccaataacttttcagacgaagttccggccacatcttgtattggcacttgatcaggtgaaggaaaacatcgaggataagacttatcagcacatcgatgcgcgttcaaaggctagatttgacggtattgctccagaaccttggaagggtttaccgagtggtcatatacccggtagcaagtgtgtcccttttcccctaatgtttgattcctctcaaacactgttaccagcagaggagctgaagaagcagtttgaacaggaagacatatctctggacagtccgattgcggcctcatgtggaaccggtgtaacagcttgtattttggcattgggactttatcgtctgggaaaaactaatgtggcaatctatgatgggtcttggactgaatgggcaactgcaccaaacttgcccatagtgggttcttcttcataagaaagtccaagaaaaagctacaagatcacaagccagtggatatatatttataagcttagcttggttcaatccatttctgtgttaaactttaacaaattgctgggagggttgtattagtattatacatcagtattcaggattcttgagtttggtc

SEQ ID NO: 97640 - protein, 318 aa, Arabidopsis thaliana; identical to SEQ ID NO: 24974
  peptide (1)..(318): Ceres Seq. ID no. 13487598
  misc_feature (23)..(143): Pfam Name: Rhodanese-like domain Pfam Description: Rhodanese-like domain
  misc_feature (1)..(318): Homolog of NCBI NO: 25456716 NR Description: thiosulfate sulfurtransferase (EC 2.8.1.1)
  misc_feature (1)..(318): Homolog of NCBI NO: 30684873 NR Description: mercaptopyruvate sulfurtransferase (Mst2/Rdh2)
  misc_feature (1)..(318): Homolog of NCBI NO: 18394364 NR Description: mercaptopyruvate sulfurtransferase (Mst2/Rdh2) thaliana] >gi|25288790|pir||T52663 thiosulfate sulfurtransferase
  misc_feature (1)..(318): Homolog of NCBI NO: 25288797 NR Description: hypothetical protein F3O9.26 [imported] - thaliana >gi|4966366|gb|AAD34697.1|AC006341_25 Similar to thiosulfate sulfurtransferase (TST) from Datisca glomerata and
  misc_feature (1)..(318): Homolog of NCBI NO: 18412307 NR Description: mercaptopyruvate sulfurtransferase (Mst1/Rdh1) thaliana] >gi|7488372|pir||T01034 thiosulfate sulfurtransferase
  misc_feature (1)..(318): Homolog of NCBI NO: 25288794 NR Description: thiosulfate sulfurtransferase (EC 2.8.1.1) Mst1
  misc_feature (1)..(313): Homolog of NCBI NO: 4406372 NR Description: thiosulfate sulfurtransferase [Datisca glomerata]
  misc_feature (15)..(317): Homolog of NCBI NO: 14571545 NR Description: thiosulfate transferase [Triticum aestivum]
  misc_feature (17)..(171): Homolog of NCBI NO: 27381801 NR Description: thiosulfate sulfurtransferase [Bradyrhizobium >gi|27354970|dbj|BAC51955.1| thiosulfate sulfurtransferase
  misc_feature (177)..(313): Homolog of NCBI NO: 27381801 NR Description: thiosulfate sulfurtransferase [Bradyrhizobium >gi|27354970|dbj|BAC51955.1| thiosulfate sulfurtransferase

SEQ ID NO: 97641 - protein, 274 aa, Arabidopsis thaliana; identical to SEQ ID NO: 24975
  peptide (1)..(274): Ceres Seq. ID no. 13487599
  misc_feature (1)..(99): Pfam Name: Rhodanese-like domain Pfam Description: Rhodanese-like domain
  misc_feature (1)..(274): Homolog of NCBI NO: 25456716 NR Description: thiosulfate sulfurtransferase (EC 2.8.1.1)
  misc_feature (1)..(274): Homolog of NCBI NO: 30684873 NR Description: mercaptopyruvate sulfurtransferase (Mst2/Rdh2)
  misc_feature (1)..(274): Homolog of NCBI NO: 18394364 NR Description: mercaptopyruvate sulfurtransferase (Mst2/Rdh2) thaliana] >gi|25288790|pir||T52663 thiosulfate sulfurtransferase
  misc_feature (1)..(274): Homolog of NCBI NO: 25288797 NR Description: hypothetical protein F3O9.26 [imported] - thaliana >gi|4966366|gb|AAD34697.1|AC006341_25 Similar to thiosulfate sulfurtransferase (TST) from Datisca glomerata and
  misc_feature (1)..(274): Homolog of NCBI NO: 18412307 NR Description: mercaptopyruvate sulfurtransferase (Mst1/Rdh1) thaliana] >gi|7488372|pir||T01034 thiosulfate sulfurtransferase
  misc_feature (1)..(274): Homolog of NCBI NO: 25288794 NR Description: thiosulfate sulfurtransferase (EC 2.8.1.1) Mst1
  misc_feature (1)..(269): Homolog of NCBI NO: 4406372 NR Description: thiosulfate sulfurtransferase [Datisca glomerata]
  misc_feature (1)..(273): Homolog of NCBI NO: 14571545 NR Description: thiosulfate transferase [Triticum aestivum]
  misc_feature (1)..(127): Homolog of NCBI NO: 27381801 NR Description: thiosulfate sulfurtransferase [Bradyrhizobium >gi|27354970|dbj|BAC51955.1| thiosulfate sulfurtransferase
  misc_feature (133)..(269): Homolog of NCBI NO: 27381801 NR Description: thiosulfate sulfurtransferase [Bradyrhizobium >gi|27354970|dbj|BAC51955.1| thiosulfate sulfurtransferase

SEQ ID NO: 97642 - protein, 237 aa, Arabidopsis thaliana; identical to SEQ ID NO: 24976
  peptide (1)..(237): Ceres Seq. ID no. 13487600
  misc_feature (1)..(62): Pfam Name: Rhodanese-like domain Pfam Description: Rhodanese-like domain
  misc_feature (1)..(237): Homolog of NCBI NO: 25456716 NR Description: thiosulfate sulfurtransferase (EC 2.8.1.1)
  misc_feature (1)..(237): Homolog of NCBI NO: 30684873 NR Description: mercaptopyruvate sulfurtransferase (Mst2/Rdh2)
  misc_feature (1)..(237): Homolog of NCBI NO: 18394364 NR Description: mercaptopyruvate sulfurtransferase (Mst2/Rdh2) thaliana] >gi|25288790|pir||T52663 thiosulfate sulfurtransferase
  misc_feature (1)..(237): Homolog of NCBI NO: 25288797 NR Description: hypothetical protein F3O9.26 [imported] - thaliana >gi|4966366|gb|AAD34697.1|AC006341_25 Similar to thiosulfate sulfurtransferase (TST) from Datisca glomerata and
  misc_feature (1)..(237): Homolog of NCBI NO: 18412307 NR Description: mercaptopyruvate sulfurtransferase (Mst1/Rdh1) thaliana] >gi|7488372|pir||T01034 thiosulfate sulfurtransferase
  misc_feature (1)..(237): Homolog of NCBI NO: 25288794 NR Description: thiosulfate sulfurtransferase (EC 2.8.1.1) Mst1
  misc_feature (1)..(232): Homolog of NCBI NO: 4406372 NR Description: thiosulfate sulfurtransferase [Datisca glomerata]
  misc_feature (1)..(236): Homolog of NCBI NO: 14571545 NR Description: thiosulfate transferase [Triticum aestivum]
  misc_feature (1)..(90): Homolog of NCBI NO: 27381801 NR Description: thiosulfate sulfurtransferase [Bradyrhizobium >gi|27354970|dbj|BAC51955.1| thiosulfate sulfurtransferase
  misc_feature (96)..(232): Homolog of NCBI NO: 27381801 NR Description: thiosulfate sulfurtransferase [Bradyrhizobium >gi|27354970|dbj|BAC51955.1| thiosulfate sulfurtransferase

SEQ ID NO: 97643 - DNA, 1297 bp, Arabidopsis thaliana
  misc_feature (1)..(1297): Ceres Seq. ID no. 13487658
  misc_feature: MA Experiment ID: 20000451 Result: Down-regulated in Transcription
  misc_feature: MA Experiment 20000451 PARAMETER Experiment Name: At_CS6879_Shoots-Roots_P Parameter: Age (day) Value: 14
  misc_feature: MA Experiment 20000451 PARAMETER Experiment Name: At_CS6879_Shoots-Roots_P Parameter: Organism Value: A. thaliana
  misc_feature: MA Experiment 20000451 PARAMETER Experiment Name: At_CS6879_Shoots-Roots_P Parameter: Plant Line Value: CS6879 vs. WS
  misc_feature: MA Experiment 20000451 PARAMETER Experiment Name: At_CS6879_Shoots-Roots_P Parameter: Tissue Value: Roots
  misc_feature: MA Experiment ID: 20001905 Result: Down-regulated in Transcription
  misc_feature: MA Experiment 20001905 PARAMETER Experiment Name: At_Drought_Reproduction_P Parameter: Age (day) Value: 40
  misc_feature: MA Experiment 20001905 PARAMETER Experiment Name: At_Drought_Reproduction_P Parameter: Organism Value: A. thaliana
  misc_feature: MA Experiment 20001905 PARAMETER Experiment Name: At_Drought_Reproduction_P Parameter: Plant Line Value: WS
  misc_feature: MA Experiment 20001905 PARAMETER Experiment Name: At_Drought_Reproduction_P Parameter: Timepoint (day) Value: 10
  misc_feature: MA Experiment 20001905 PARAMETER Experiment Name: At_Drought_Reproduction_P Parameter: Tissue Value: Rosettes
  misc_feature: MA Experiment 20001905 PARAMETER Experiment Name: At_Drought_Reproduction_P Parameter: Treatment Value: Drought vs. No Drought
cttcctgcgtcaatggcgactcaaggtcaggttatcacttgcaaagctgcggtggcttacgagccgaacaagcctctggtcatcgaagatgtgcaagtggctccacctcaagctggtgaggttcggatcaagatcctctacactgctctttgtcacaccgacgcttacacttggagcggcaaggatcctgaaggtctctttccttgtattctaggtcatgaggctgctgggattgttgagagtgttggtgaaggagtaactgaagttcaagctggagatcatgttatcccttgttatcaagctgagtgtcgtgaatgcaagttttgcaaatctgggaagactaacctttgtggcaaggtgagatctgctactggtgttgggattatgatgaatgaccgtaagtcgaggttctcggttaatgggaaacccatttatcacttcatgggtacttccacgtttagtcagtatactgttgttcatgatgttagcgtcgccaaaattgatcctactgctcctttggataaagtttgccttcttggatgtggtgttcccactggccttggagcagtttggaatactgcaaaagtagaaccagggtcaaatgttgccattttcggtcttggcactgttggacttgctgttgccgagggtgcgaaaacagctggtgcttcaaggatcattggcattgacatcgatagcaagaagtatgaaactgcaaagaagtttggtgttaacgaatttgtgaacccaaaggatcacgacaagccaattcaggaagtgattgtcgatctcactgatggcggtgttgactacagctttgagtgcatcgggaatgtctccgtgatgagagctgcattggagtgctgtcacaagggatggggaacttcggtcatagttggtgttgcagcatcaggacaagagatatcaactcgtccgttccaactcgtgactggccgtgtgtggaaaggaacagcttttggtggtttcaagagtcgaacccaagtgccttggcttgtagaaaagtacatgaacaaggagataaaagtggatgaatacataacacacaacttgaccttgggagaaatcaataaggctttcgatctattgcacgaaggtacttgccttcgttgtgtcctcgataccagcaaatgactatatgggtcctctctgctttaatctatgtgttcttgtgactttcgtcttttatcggtattgacatttcctaagagcaacagactactctactcgtgtgtgtctcgtttctatcttatgcttcaataaaatatcaattaagacc

SEQ ID NO: 97644 - protein, 383 aa, Arabidopsis thaliana
  peptide (1)..(383): Ceres Seq. ID no. 13487659
  misc_feature (5)..(383): Homolog of NCBI NO: 15240054 NR Description: alcohol dehydrogenase class III
  misc_feature (5)..(383): Homolog of NCBI NO: 2129562 NR Description: alcohol dehydrogenase (EC 1.1.1.1) class III -
  misc_feature (5)..(383): Homolog of NCBI NO: 1498024 NR Description: glutathione-dependent formaldehyde dehydrogenase
  misc_feature (6)..(383): Homolog of NCBI NO: 3023271 NR Description: ALCOHOL DEHYDROGENASE CLASS III
  misc_feature (7)..(379): Homolog of NCBI NO: 6225010 NR Description: ALCOHOL DEHYDROGENASE CLASS III
  misc_feature (6)..(379): Homolog of NCBI NO: 3121727 NR Description: ALCOHOL DEHYDROGENASE CLASS III
  misc_feature (5)..(379): Homolog of NCBI NO: 5902742 NR Description: ALCOHOL DEHYDROGENASE CLASS III FORMALDEHYDE DEHYDROGENASE) (FDH) (FALDH) >gi|2117436|pir||JC4967
  misc_feature (5)..(379): Homolog of NCBI NO: 18858257 NR Description: alcohol dehydrogenase 5 [Danio rerio]
  misc_feature (5)..(379): Homolog of NCBI NO: 25283011 NR Description: alcohol dehydrogenase (EC 1.1.1.1) 3 - zebra fish
  misc_feature (6)..(379): Homolog of NCBI NO: 5902740 NR Description: ALCOHOL DEHYDROGENASE CLASS III H CHAIN
LPASMATQGQVITCKAAVAYEPNKPLVIEDVQVAPPQAGEVRIKILYTALCHTDAYTWSGKDPEGLFPCILGHEAAGIVESVGEGVTEVQAGDHVIPCYQAECRECKFCKSGKTNLCGKVRSATGVGIMMNDRKSRFSVNGKPIYHFMGTSTFSQYTVVHDVSVAKIDPTAPLDKVCLLGCGVPTGLGAVWNTAKVEPGSNVAIFGLGTVGLAVAEGAKTAGASRIIGIDIDSKKYETAKKFGVNEFVNPKDHDKPIQEVIVDLTDGGVDYSFECIGNVSVMRAALECCHKGWGTSVIVGVAASGQEISTRPFQLVTGRVWKGTAFGGFKSRTQVPWLVEKYMNKEIKVDEYITHNLTLGEINKAFDLLHEGTCLRCVLDTSK

SEQ ID NO: 97645 - protein, 379 aa, Arabidopsis thaliana; identical to SEQ ID NO: 22337
  peptide (1)..(379): Ceres Seq. ID no. 13487660
  misc_feature (1)..(379): Homolog of NCBI NO: 15240054 NR Description: alcohol dehydrogenase class III
  misc_feature (1)..(379): Homolog of NCBI NO: 2129562 NR Description: alcohol dehydrogenase (EC 1.1.1.1) class III -
  misc_feature (1)..(379): Homolog of NCBI NO: 1498024 NR Description: glutathione-dependent formaldehyde dehydrogenase
  misc_feature (2)..(379): Homolog of NCBI NO: 3023271 NR Description: ALCOHOL DEHYDROGENASE CLASS III
  misc_feature (3)..(375): Homolog of NCBI NO: 6225010 NR Description: ALCOHOL DEHYDROGENASE CLASS III
  misc_feature (2)..(375): Homolog of NCBI NO: 3121727 NR Description: ALCOHOL DEHYDROGENASE CLASS III
  misc_feature (1)..(375): Homolog of NCBI NO: 5902742 NR Description: ALCOHOL DEHYDROGENASE CLASS III FORMALDEHYDE DEHYDROGENASE) (FDH) (FALDH) >gi|2117436|pir||JC4967
  misc_feature (1)..(375): Homolog of NCBI NO: 18858257 NR Description: alcohol dehydrogenase 5 [Danio rerio]
  misc_feature (1)..(375): Homolog of NCBI NO: 25283011 NR Description: alcohol dehydrogenase (EC 1.1.1.1) 3 - zebra fish
  misc_feature (2)..(375): Homolog of NCBI NO: 5902740 NR Description: ALCOHOL DEHYDROGENASE CLASS III H CHAIN

SEQ ID NO: 97646 - protein, 255 aa, Arabidopsis thaliana; identical to SEQ ID NO: 22338
  peptide (1)..(255): Ceres Seq. ID no. 13487661
  misc_feature (1)..(255): Homolog of NCBI NO: 15240054 NR Description: alcohol dehydrogenase class III
  misc_feature (1)..(255): Homolog of NCBI NO: 2129562 NR Description: alcohol dehydrogenase (EC 1.1.1.1) class III -
  misc_feature (1)..(255): Homolog of NCBI NO: 1498024 NR Description: glutathione-dependent formaldehyde dehydrogenase
  misc_feature (1)..(255): Homolog of NCBI NO: 3023271 NR Description: ALCOHOL DEHYDROGENASE CLASS III
  misc_feature (1)..(251): Homolog of NCBI NO: 6225010 NR Description: ALCOHOL DEHYDROGENASE CLASS III
  misc_feature (1)..(251): Homolog of NCBI NO: 3121727 NR Description: ALCOHOL DEHYDROGENASE CLASS III
  misc_feature (1)..(251): Homolog of NCBI NO: 5902742 NR Description: ALCOHOL DEHYDROGENASE CLASS III FORMALDEHYDE DEHYDROGENASE) (FDH) (FALDH) >gi|2117436|pir||JC4967
  misc_feature (1)..(251): Homolog of NCBI NO: 18858257 NR Description: alcohol dehydrogenase 5 [Danio rerio]
  misc_feature (1)..(251): Homolog of NCBI NO: 25283011 NR Description: alcohol dehydrogenase (EC 1.1.1.1) 3 - zebra fish
  misc_feature (1)..(251): Homolog of NCBI NO: 5902740 NR Description: ALCOHOL DEHYDROGENASE CLASS III H CHAIN

SEQ ID NO: 97647 - DNA, 1788 bp, Arabidopsis thaliana
  misc_feature (1)..(1788): Ceres Seq. ID no. 13488442
  misc_feature: MA Experiment ID: 108461 Result: Up-regulated in Transcription
  misc_feature: MA Experiment 108461 PARAMETER Experiment Name: At_Germinating_Seeds_cDNA_P Parameter: Age (day) Value: 1 vs. 0
  misc_feature: MA Experiment 108461 PARAMETER Experiment Name: At_Germinating_Seeds_cDNA_P Parameter: Tissue Value: Germinating Seeds
  misc_feature: MA Experiment ID: 108462 Result: Up-regulated in Transcription
  misc_feature: MA Experiment 108462 PARAMETER Experiment Name: At_Germinating_Seeds_cDNA_P Parameter: Age (day) Value: 2 vs. 0
  misc_feature: MA Experiment 108462 PARAMETER Experiment Name: At_Germinating_Seeds_cDNA_P Parameter: Tissue Value: Germinating Seeds
  misc_feature: MA Experiment ID: 108501 Result: Up-regulated in Transcription
  misc_feature: MA Experiment 108501 PARAMETER Experiment Name: At_ap2_floral_buds_cDNA_P Parameter: Plant Line Value: ap2 (Ler.)
  misc_feature: MA Experiment 108501 PARAMETER Experiment Name: At_ap2_floral_buds_cDNA_P Parameter: Tissue Value: Closed Flower
  misc_feature: MA Experiment ID: 108569 Result: Up-regulated in Transcription
  misc_feature: MA Experiment 108569 PARAMETER Experiment Name: At_0.001%_MeJA__cDNA_P Parameter: Timepoint (hr) Value: 6
  misc_feature: MA Experiment 108569 PARAMETER Experiment Name: At_0.001%_MeJA__cDNA_P Parameter: Tissue Value: Aerial
  misc_feature: MA Experiment 108569 PARAMETER Experiment Name: At_0.001%_MeJA__cDNA_P Parameter: Treatment Value: 0.001% MeJA vs. No Treatment
  misc_feature: MA Experiment ID: 108573 Result: Up-regulated in Transcription
  misc_feature: MA Experiment 108573 PARAMETER Experiment Name: At_Drought_cDNA_P Parameter: Timepoint (hr) Value: 6
  misc_feature: MA Experiment 108573 PARAMETER Experiment Name: At_Drought_cDNA_P Parameter: Tissue Value: Aerial
  misc_feature: MA Experiment 108573 PARAMETER Experiment Name: At_Drought_cDNA_P Parameter: Treatment Value: Drought vs. No Drought
  misc_feature: MA Experiment ID: 108577 Result: Down-regulated in Transcription
  misc_feature: MA Experiment 108577 PARAMETER Experiment Name: At_42deg_Heat_cDNA_P Parameter: Temperature (deg C) Value: 42 vs. 22
  misc_feature: MA Experiment 108577 PARAMETER Experiment Name: At_42deg_Heat_cDNA_P Parameter: Timepoint (hr) Value: 6
  misc_feature: MA Experiment 108577 PARAMETER Experiment Name: At_42deg_Heat_cDNA_P Parameter: Tissue Value: Aerial
  misc_feature: MA Experiment ID: 108579 Result: Up-regulated in Transcription
  misc_feature: MA Experiment 108579 PARAMETER Experiment Name: At_4deg_Cold_cDNA_P Parameter: Temperature (deg C) Value: 4 vs. 22
  misc_feature: MA Experiment 108579 PARAMETER Experiment Name: At_4deg_Cold_cDNA_P Parameter: Timepoint (hr) Value: 6
  misc_feature: MA Experiment 108579 PARAMETER Experiment Name: At_4deg_Cold_cDNA_P Parameter: Tissue Value: Aerial
  misc_feature: MA Experiment ID: 20000113 Result: Down-regulated in Transcription
  misc_feature: MA Experiment 20000113 PARAMETER Experiment Name: At_42deg_Heat_cDNA_P Parameter: Temperature (deg C) Value: 42 vs. 22
  misc_feature: MA Experiment 20000113 PARAMETER Experiment Name: At_42deg_Heat_cDNA_P Parameter: Timepoint (hr) Value: 8
  misc_feature: MA Experiment 20000113 PARAMETER Experiment Name: At_42deg_Heat_cDNA_P Parameter: Tissue Value: Aerial
  misc_feature: MA Experiment ID: 20000173 Result: Down-regulated in Transcription
  misc_feature: MA Experiment 20000173 PARAMETER Experiment Name: At_42deg_Heat_P Parameter: Age (day) Value: 14
  misc_feature: MA Experiment 20000173 PARAMETER Experiment Name: At_42deg_Heat_P Parameter: Organism Value: A. thaliana
  misc_feature: MA Experiment 20000173 PARAMETER Experiment Name: At_42deg_Heat_P Parameter: Plant Line Value: WS
  misc_feature: MA Experiment 20000173 PARAMETER Experiment Name: At_42deg_Heat_P Parameter: Temperature (deg C) Value: 42 vs. 22
  misc_feature: MA Experiment 20000173 PARAMETER Experiment Name: At_42deg_Heat_P Parameter: Timepoint (hr) Value: 6
  misc_feature: MA Experiment 20000173 PARAMETER Experiment Name: At_42deg_Heat_P Parameter: Tissue Value: Aerial
  misc_feature: MA Experiment ID: 20000179 Result: Up-regulated in Transcription
  misc_feature: MA Experiment 20000179 PARAMETER Experiment Name: At_Germinating_Seeds_P Parameter: Age (hr) Value: 6 vs. 0
  misc_feature: MA Experiment 20000179 PARAMETER Experiment Name: At_Germinating_Seeds_P Parameter: Tissue Value: Germinating Seeds
  misc_feature: MA Experiment ID: 20000180 Result: Up-regulated in Transcription
  misc_feature: MA Experiment 20000180 PARAMETER Experiment Name: At_Germinating_Seeds_P Parameter: Age (hr) Value: 24 vs. 0
  misc_feature: MA Experiment 20000180 PARAMETER Experiment Name: At_Germinating_Seeds_P Parameter: Tissue Value: Germinating Seeds
  misc_feature: MA Experiment ID: 20000213 Result: Up-regulated in Transcription
  misc_feature: MA Experiment 20000213 PARAMETER Experiment Name: At_4deg_Cold_P Parameter: Timepoint (hr) Value: 2
  misc_feature: MA Experiment ID: 20000224 Result: Down-regulated in Transcription
  misc_feature: MA Experiment ID: 20000227 Result: Up-regulated in Transcription
  misc_feature: MA Experiment 20000227 PARAMETER Experiment Name: At_Root-Tips-vs-Tops_P Parameter: Tissue Value: Root Tips vs. Root Tops
  misc_feature: MA Experiment ID: 20000794 Result: Down-regulated in Transcription
  misc_feature: MA Experiment 20000794 PARAMETER Experiment Name: At_Petals_P Parameter: Age (day) Value: 23-25 days
  misc_feature: MA Experiment 20000794 PARAMETER Experiment Name: At_Petals_P Parameter: Plant Line Value: WS
  misc_feature: MA Experiment 20000794 PARAMETER Experiment Name: At_Petals_P Parameter: Tissue Value: Petals vs. Whole plant
atcattgtccctcagacaaatttcactcgctcatctctgtctgaatctcacaagaagaagtgaaagatggtgaagatatgttgtattggagctgggtatgttggtggaccaacaatggcagtgattgcattgaaatgtccagacgttgaagtagcggttgttgatatctctgtaccacgtatcaacgcttggaacagtgacacgcttccgatttacgagcctggtcttgatgatgttgtgaagcaatgccgtggcaagaaccttttctttagtactgatgttgagaaacatgttagggaagctgatattgtgtttgtttctgtcaacacaccgactaagactagaggtcttggtgctggtaaagctgcggatcttacgtactgggagagcgctgcgcgtatgatcgctgatgtttcggtatcggataagattgtcgttgagaaatcgactgttccggttaaaacagctgaagctattgagaagattttgacacataacagtaaagggattaagtttcagattctttcgaatcccgagtttttggcggaaggaaccgcgattaaggacctatttaatccggaccgtgttcttatcggagggcgggaaaccccagaagggtttaaagcggtgcagactctcaagaatgtgtatgcacactgggttcctgaaggccaaatcataacaaccaatctctggtctgctgagctgtccaagcttgcggcaaacgctttcttggctcaaaggatttcatcagtgaatgctatgtcggctctgtgtgaagccacaggcgcagatgtcacgcaagtgtcttacgcggttggtacagactcaaggattggtcccaagttcttgaactcgagtgttggattcggtggttcgtgtttccagaaggacattctgaatcttgtctacatctgtgagtgcaacggactcccggaagtggcagagtactggaagcaagtcatcaagatcaatgactaccagaagagccggttcgtgaaccgtgttgtttcctccatgttcaactctgtatcaaacaagaagattgcggttctcggtttcgcattcaagaaagacaccggtgacacaagggagactccagccatcgatgtgtgcaagggtcttttagaagacaaagcaaggctaagcatttacgacccacaagtgactgaggatcagatccagagggatttatccatgaacaagttcgactgggaccatcctctacatttgcagccaatgagcccaacaacagtgaaacaagtgaccgttacttgggacgcatacgaagcaactaaggacgctcacggtatctgcatcatgaccgagtgggatgagttcaagaaccttgatttccagaagatctttgacaacatgcagaaaccagctttcgtgttcgatggaagaaacattatgaatctgcaaaagctaagggagattggtttcattgtttactccattgcctctcgacgactggctcaaggacatgcctgccgttgcctaatgatgttcattgctgactctttcgtcctccatcatttgtgcttttcttcttcttgtggtttgtctttaagacttgttatatttcttacaatatgtttgttatgttctctggtgtgtgttttgttttttttggtattactttcatatttttttggtcgaagaggacttgtattcgacaatgtcgcttcaattttgttgtttccttagaaactaaataaatattggtttatattggagtaaaatgtgtttgtactttgtagttaatcgttgaaagttttgccactt

SEQ ID NO: 97648 - protein, 547 aa, Arabidopsis thaliana
  peptide (1)..(547): Ceres Seq. ID no. 13488443
  misc_feature (2)..(200): Pfam Name: UDP-glucose/GDP-mannose dehydrogenase family, Pfam Description: UDP-glucose/GDP-mannose dehydrogenase family,
  misc_feature (1)..(465): Homolog of NCBI NO: 15228687 NR Description: UDP-glucose dehydrogenase -related [Arabidopsis
  misc_feature (1)..(465): Homolog of NCBI NO: 21618158 NR Description: UDP-glucose dehydrogenase, putative [Arabidopsis
  misc_feature (1)..(465): Homolog of NCBI NO: 15983404 NR Description: AT3g29360/MUO10_6 [Arabidopsis thaliana]
  misc_feature (1)..(465): Homolog of NCBI NO: 15241704 NR Description: UDP-glucose dehydrogenase-related protein
  misc_feature (1)..(465): Homolog of NCBI NO: 30102540 NR Description: At5g39320 [Arabidopsis thaliana]
  misc_feature (1)..(465): Homolog of NCBI NO: 15242316 NR Description: UDP-glucose dehydrogenase-related protein
MVKICCIGAGYVGGPTMAVIALKCPDVEVAVVDISVPRINAWNSDTLPIYEPGLDDVVKQCRGKNLFFSTDVEKHVREADIVFVSVNTPTKTRGLGAGKAADLTYWESAARMIADVSVSDKIVVEKSTVPVKTAEAIEKILTHNSKGIKFQILSNPEFLAEGTAIKDLFNPDRVLIGGRETPEGFKAVQTLKNVYAHWVPEGQIITTNLWSAELSKLAANAFLAQRISSVNAMSALCEATGADVTQVSYAVGTDSRIGPKFLNSSVGFGGSCFQKDILNLVYICECNGLPEVAEYWKQVIKINDYQKSRFVNRVVSSMFNSVSNKKIAVLGFAFKKDTGDTRETPAIDVCKGLLEDKARLSIYDPQVTEDQIQRDLSMNKFDWDHPLHLQPMSPTTVKQVTVTWDAYEATKDAHGICIMTEWDEFKNLDFQKIFDNMQKPAFVFDGRNIMNLQKLREIGFIVYSIASRRLAQGHACRCLMMFIADSFVLHHLCFSSSCGLSLRLVIFLTICLLCSLVCVLFFLVLLSYFFGRRGLVFDNVASILLFP

SEQ ID NO: 97649 - protein, 531 aa, Arabidopsis thaliana
  peptide (1)..(531): Ceres Seq. ID no. 13488444
  misc_feature (1)..(184): Pfam Name: UDP-glucose/GDP-mannose dehydrogenase family, Pfam Description: UDP-glucose/GDP-mannose dehydrogenase family,
  misc_feature (1)..(449): Homolog of NCBI NO: 15228687 NR Description: UDP-glucose dehydrogenase -related [Arabidopsis
  misc_feature (1)..(449): Homolog of NCBI NO: 21618158 NR Description: UDP-glucose dehydrogenase, putative [Arabidopsis
  misc_feature (1)..(449): Homolog of NCBI NO: 15983404 NR Description: AT3g29360/MUO10_6 [Arabidopsis thaliana]
  misc_feature (1)..(449): Homolog of NCBI NO: 15241704 NR Description: UDP-glucose dehydrogenase-related protein
  misc_feature (1)..(449): Homolog of NCBI NO: 30102540 NR Description: At5g39320 [Arabidopsis thaliana]
  misc_feature (1)..(449): Homolog of NCBI NO: 15242316 NR Description: UDP-glucose dehydrogenase-related protein
MAVIALKCPDVEVAVVDISVPRINAWNSDTLPIYEPGLDDVVKQCRGKNLFFSTDVEKHVREADIVFVSVNTPTKTRGLGAGKAADLTYWESAARMIADVSVSDKIVVEKSTVPVKTAEAIEKILTHNSKGIKFQILSNPEFLAEGTAIKDLFNPDRVLIGGRETPEGFKAVQTLKNVYAHWVPEGQIITTNLWSAELSKLAANAFLAQRISSVNAMSALCEATGADVTQVSYAVGTDSRIGPKFLNSSVGFGGSCFQKDILNLVYICECNGLPEVAEYWKQVIKINDYQKSRFVNRVVSSMFNSVSNKKIAVLGFAFKKDTGDTRETPAIDVCKGLLEDKARLSIYDPQVTEDQIQRDLSMNKFDWDHPLHLQPMSPTTVKQVTVTWDAYEATKDAHGICIMTEWDEFKNLDFQKIFDNMQKPAFVFDGRNIMNLQKLREIGFIVYSIASRRLAQGHACRCLMMFIADSFVLHHLCFSSSCGLSLRLVIFLTICLLCSLVCVLFFLVLLSYFFGRRGLVFDNVASILLFP

SEQ ID NO: 97650 - protein, 436 aa, Arabidopsis thaliana
  peptide (1)..(436): Ceres Seq. ID no. 13488445
  misc_feature (1)..(89): Pfam Name: UDP-glucose/GDP-mannose dehydrogenase family, Pfam Description: UDP-glucose/GDP-mannose dehydrogenase family,
  misc_feature (1)..(354): Homolog of NCBI NO: 15228687 NR Description: UDP-glucose dehydrogenase -related [Arabidopsis
  misc_feature (1)..(354): Homolog of NCBI NO: 21618158 NR Description: UDP-glucose dehydrogenase, putative [Arabidopsis
  misc_feature (1)..(354): Homolog of NCBI NO: 15983404 NR Description: AT3g29360/MUO10_6 [Arabidopsis thaliana]
  misc_feature (1)..(354): Homolog of NCBI NO: 15241704 NR Description: UDP-glucose dehydrogenase-related protein
  misc_feature (1)..(354): Homolog of NCBI NO: 30102540 NR Description: At5g39320 [Arabidopsis thaliana]
  misc_feature (1)..(354): Homolog of NCBI NO: 15242316 NR Description: UDP-glucose dehydrogenase-related protein
MIADVSVSDKIVVEKSTVPVKTAEAIEKILTHNSKGIKFQILSNPEFLAEGTAIKDLFNPDRVLIGGRETPEGFKAVQTLKNVYAHWVPEGQIITTNLWSAELSKLAANAFLAQRISSVNAMSALCEATGADVTQVSYAVGTDSRIGPKFLNSSVGFGGSCFQKDILNLVYICECNGLPEVAEYWKQVIKINDYQKSRFVNRVVSSMFNSVSNKKIAVLGFAFKKDTGDTRETPAIDVCKGLLEDKARLSIYDPQVTEDQIQRDLSMNKFDWDHPLHLQPMSPTTVKQVTVTWDAYEATKDAHGICIMTEWDEFKNLDFQKIFDNMQKPAFVFDGRNIMNLQKLREIGFIVYSIASRRLAQGHACRCLMMFIADSFVLHHLCFSSSCGLSLRLVIFLTICLLCSLVCVLFFLVLLSYFFGRRGLVFDNVASILLFP

SEQ ID NO: 97651 - DNA, 1055 bp, Arabidopsis thaliana
  misc_feature (1)..(1055): Ceres Seq. ID no. 13488494
  misc_feature: MA Experiment ID: 108501 Result: Up-regulated in Transcription
  misc_feature: MA Experiment 108501 PARAMETER Experiment Name: At_ap2_floral_buds_cDNA_P Parameter: Plant Line Value: ap2 (Ler.)
  misc_feature: MA Experiment 108501 PARAMETER Experiment Name: At_ap2_floral_buds_cDNA_P Parameter: Tissue Value: Closed Flower
  misc_feature: MA Experiment ID: 20000184 Result: Down-regulated in Transcription
  misc_feature: MA Experiment 20000184 PARAMETER Experiment Name: At_Shoots__P Parameter: Age (day) Value: 7
  misc_feature: MA Experiment 20000184 PARAMETER Experiment Name: At_Shoots__P Parameter: Tissue Value: Shoots vs. Whole Plant
  misc_feature: MA Experiment ID: 20000234 Result: Up-regulated in Transcription
  misc_feature: MA Experiment 20000234 PARAMETER Experiment Name: At_Siliques_P Parameter: Age (day) Value: 21
  misc_feature: MA Experiment 20000234 PARAMETER Experiment Name: At_Siliques_P Parameter: Organism Value: A. thaliana
  misc_feature: MA Experiment 20000234 PARAMETER Experiment Name: At_Siliques_P Parameter: Plant Line Value: WS
  misc_feature: MA Experiment 20000234 PARAMETER Experiment Name: At_Siliques_P Parameter: Tissue Value: Less Than 5mm Siliques vs. Whole Plant
  misc_feature: MA Experiment ID: 20000264 Result: Up-regulated in Transcription
  misc_feature: MA Experiment 20000264 PARAMETER Experiment Name: At_Open_Flower_P Parameter: Age (day) Value: 21
  misc_feature: MA Experiment 20000264 PARAMETER Experiment Name: At_Open_Flower_P Parameter: Plant Line Value: WS
  misc_feature: MA Experiment 20000264 PARAMETER Experiment Name: At_Open_Flower_P Parameter: Tissue Value: Open Flower vs. Whole Plant
  misc_feature: MA Experiment ID: 20000265 Result: Up-regulated in Transcription
  misc_feature: MA Experiment 20000265 PARAMETER Experiment Name: At_Open_Flower_P Parameter: Age (day) Value: 21
  misc_feature: MA Experiment 20000265 PARAMETER Experiment Name: At_Open_Flower_P Parameter: Plant Line Value: WS
  misc_feature: MA Experiment 20000265 PARAMETER Experiment Name: At_Open_Flower_P Parameter: Tissue Value: Closed Flower vs. Whole Plant
  misc_feature: MA Experiment ID: 20000286 Result: Up-regulated in Transcription
  misc_feature: MA Experiment 20000286 PARAMETER Experiment Name: At_Open_Flower_P Parameter: Age (day) Value: 21
  misc_feature: MA Experiment 20000286 PARAMETER Experiment Name: At_Open_Flower_P Parameter: Plant Line Value: WS
  misc_feature: MA Experiment 20000286 PARAMETER Experiment Name: At_Open_Flower_P Parameter: Tissue Value: Half Open vs. Whole Plant
  misc_feature: MA Experiment ID: 20000794 Result: Down-regulated in Transcription
  misc_feature: MA Experiment 20000794 PARAMETER Experiment Name: At_Petals_P Parameter: Age (day) Value: 23-25 days
  misc_feature: MA Experiment 20000794 PARAMETER Experiment Name: At_Petals_P Parameter: Plant Line Value: WS
  misc_feature: MA Experiment 20000794 PARAMETER Experiment Name: At_Petals_P Parameter: Tissue Value: Petals vs. Whole plant
gtttttgggattctcaaaaaactcaaaataaactttcctcattttttttttctttcttttgttttgttttctttataaaggagaaagaaagagaaagagagtttccgaaagctgaattgagttgggtgaagcaaattctcaggatgggaagaggaaagatagaaataaagaggatagagaactcaacaaatcgacaagtgacgttttgcaaaagaagaaatggacttctgaagaaagcctatgagctttcggtcctttgcgatgcagaagttgcgctcattgttttctccactcgtggccgtctctatgaatacgccaataacaacataagatcaaccattgagaggtacaagaaagcttgttctgatagcaccaacactagcactgtccaagaaatcaatgccgcgtactatcaacaagaatctgctaagctgagacaacagatccaaacgattcaaaactccaacaggaatctgatgggagactctttgagttccttaagtgtcaaggaactaaaacaagttgagaatcgccttgagaaagctatctctaggatcaggtccaagaagcatgagttgcttttagttgaaatcgaaaacgcgcagaaaagggagattgagcttgacaatgagaacatctatctaagaactaaggtagcagaagtggagaggtatcaacaacaccatcatcaaatggttagtggttcagagattaatgcaattgaagctttagcctcacgcaattactttgctcatagcattatgactgctggttctggatctggtaatggaggttcttactctgatcccgacaagaaaattcttcatctcggataatctcgtctgcgaaaaaccgagctgcaataactctctgcatgcatctggggattctttgctcagatttatctctacataaaatatgttttggtgcaaaataattcaaagtacaatgaaggtattggtccttcaagactcattgcaatttgtgttgtgtaatgattaagacatactctagtttttattgcttcgtatcatagtatctattctatggtatct

SEQ ID NO: 97652 - protein, 277 aa, Arabidopsis thaliana; identical to SEQ ID NO: 97560
  peptide (1)..(277): Ceres Seq. ID no. 13488495
  misc_feature (121)..(220): Pfam Name: K-box region Pfam Description: K-box region
  misc_feature (48)..(277): Homolog of NCBI NO: 15234874 NR Description: MADS-box protein [Arabidopsis thaliana]
  misc_feature (48)..(277): Homolog of NCBI NO: 30681253 NR Description: MADS-box protein [Arabidopsis thaliana]
  misc_feature (48)..(277): Homolog of NCBI NO: 23194453 NR Description: MADS box protein GHMADS-2 [Gossypium hirsutum]
  misc_feature (48)..(277): Homolog of NCBI NO: 4103342 NR Description: agamous-like putative transcription factor
  misc_feature (48)..(277): Homolog of NCBI NO: 20385590 NR Description: MADS-box protein 5 [Vitis vinifera]
  misc_feature (48)..(277): Homolog of NCBI NO: 7446521 NR Description: MADS-box protein - cucumber
  misc_feature (48)..(277): Homolog of NCBI NO: 27763670 NR Description: mads-box transcription factor [Momordica
  misc_feature (48)..(277): Homolog of NCBI NO: 29467048 NR Description: MADS-box transcription factor AG [Agapanthus
  misc_feature (48)..(276): Homolog of NCBI NO: 1568513 NR Description: fbp11 [Petunia x hybrida]
  misc_feature (48)..(277): Homolog of NCBI NO: 21955182 NR Description: transcription factor MADS1 [Hyacinthus orientalis]

SEQ ID NO: 97653 - protein, 230 aa, Arabidopsis thaliana; identical to SEQ ID NO: 44274
  peptide (1)..(230): Ceres Seq. ID no. 13488496
  misc_feature (74)..(173): Pfam Name: K-box region Pfam Description: K-box region
  misc_feature (1)..(230): Homolog of NCBI NO: 15234874 NR Description: MADS-box protein [Arabidopsis thaliana]
  misc_feature (1)..(230): Homolog of NCBI NO: 30681253 NR Description: MADS-box protein [Arabidopsis thaliana]
  misc_feature (1)..(230): Homolog of NCBI NO: 23194453 NR Description: MADS box protein GHMADS-2 [Gossypium hirsutum]
  misc_feature (1)..(230): Homolog of NCBI NO: 4103342 NR Description: agamous-like putative transcription factor
  misc_feature (1)..(230): Homolog of NCBI NO: 20385590 NR Description: MADS-box protein 5 [Vitis vinifera]
  misc_feature (1)..(230): Homolog of NCBI NO: 7446521 NR Description: MADS-box protein - cucumber
  misc_feature (1)..(230): Homolog of NCBI NO: 27763670 NR Description: mads-box transcription factor [Momordica
  misc_feature (1)..(230): Homolog of NCBI NO: 29467048 NR Description: MADS-box transcription factor AG [Agapanthus
  misc_feature (1)..(229): Homolog of NCBI NO: 1568513 NR Description: fbp11 [Petunia x hybrida]
  misc_feature (1)..(230): Homolog of NCBI NO: 21955182 NR Description: transcription factor MADS1 [Hyacinthus orientalis]

SEQ ID NO: 97654 - DNA, 928 bp, Arabidopsis thaliana
  misc_feature (1)..(928): Ceres Seq. ID no. 13489155
  misc_feature: MA Experiment ID: 20000169 Result: Up-regulated in Transcription
  misc_feature: MA Experiment 20000169 PARAMETER Experiment Name: At_100uM_ABA_P Parameter: Age (day) Value: 14
  misc_feature: MA Experiment 20000169 PARAMETER Experiment Name: At_100uM_ABA_P Parameter: Organism Value: A. thaliana
  misc_feature: MA Experiment 20000169 PARAMETER Experiment Name: At_100uM_ABA_P Parameter: Plant Line Value: WS
  misc_feature: MA Experiment 20000169 PARAMETER Experiment Name: At_100uM_ABA_P Parameter: Timepoint (hr) Value: 6
  misc_feature: MA Experiment 20000169 PARAMETER Experiment Name: At_100uM_ABA_P Parameter: Tissue Value: Aerial
  misc_feature: MA Experiment 20000169 PARAMETER Experiment Name: At_100uM_ABA_P Parameter: Treatment Value: 100uM ABA vs. No Treatment
  misc_feature: MA Experiment ID: 20000180 Result: Up-regulated in Transcription
  misc_feature: MA Experiment 20000180 PARAMETER Experiment Name: At_Germinating_Seeds_P Parameter: Age (hr) Value: 24 vs. 0
  misc_feature: MA Experiment 20000180 PARAMETER Experiment Name: At_Germinating_Seeds_P Parameter: Tissue Value: Germinating Seeds
  misc_feature: MA Experiment ID: 20000182 Result: Up-regulated in Transcription
  misc_feature: MA Experiment 20000182 PARAMETER Experiment Name: At_2mM_SA_P Parameter: Age (day) Value: 14
  misc_feature: MA Experiment 20000182 PARAMETER Experiment Name: At_2mM_SA_P Parameter: Organism Value: A. thaliana
  misc_feature: MA Experiment 20000182 PARAMETER Experiment Name: At_2mM_SA_P Parameter: Plant Line Value: WS
  misc_feature: MA Experiment 20000182 PARAMETER Experiment Name: At_2mM_SA_P Parameter: Timepoint (hr) Value: 6
  misc_feature: MA Experiment 20000182 PARAMETER Experiment Name: At_2mM_SA_P Parameter: Tissue Value: Aerial
  misc_feature: MA Experiment 20000182 PARAMETER Experiment Name: At_2mM_SA_P Parameter: Treatment Value: 2mM SA vs. No Treatment
  misc_feature: MA Experiment ID: 20000185 Result: Up-regulated in Transcription
  misc_feature: MA Experiment 20000185 PARAMETER Experiment Name: At_Roots__P Parameter: Age (day) Value: 7 vs. 21
  misc_feature: MA Experiment 20000185 PARAMETER Experiment Name: At_Roots__P Parameter: Organism Value: A. thaliana
  misc_feature: MA Experiment 20000185 PARAMETER Experiment Name: At_Roots__P Parameter: Tissue Value: Roots vs. Whole Plant
  misc_feature: MA Experiment ID: 20000227 Result: Down-regulated in Transcription
  misc_feature: MA Experiment 20000227 PARAMETER Experiment Name: At_Root-Tips-vs-Tops_P Parameter: Tissue Value: Root Tips vs. Root Tops
  misc_feature: MA Experiment ID: 20000234 Result: Down-regulated in Transcription
  misc_feature: MA Experiment 20000234 PARAMETER Experiment Name: At_Siliques_P Parameter: Age (day) Value: 21
  misc_feature: MA Experiment 20000234 PARAMETER Experiment Name: At_Siliques_P Parameter: Organism Value: A. thaliana
  misc_feature: MA Experiment 20000234 PARAMETER Experiment Name: At_Siliques_P Parameter: Plant Line Value: WS
  misc_feature: MA Experiment 20000234 PARAMETER Experiment Name: At_Siliques_P Parameter: Tissue Value: Less Than 5mm Siliques vs. Whole Plant
  misc_feature: MA Experiment ID: 20000267 Result: Up-regulated in Transcription
  misc_feature: MA Experiment 20000267 PARAMETER Experiment Name: At_Drought_P Parameter: Age (day) Value: 7
  misc_feature: MA Experiment 20000267 PARAMETER Experiment Name: At_Drought_P Parameter: Organism Value: A. thaliana
  misc_feature: MA Experiment 20000267 PARAMETER Experiment Name: At_Drought_P Parameter: Plant Line Value: WS
  misc_feature: MA Experiment 20000267 PARAMETER Experiment Name: At_Drought_P Parameter: Timepoint (hr) Value: 6
  misc_feature: MA Experiment 20000267 PARAMETER Experiment Name: At_Drought_P Parameter: Tissue Value: Whole Plant
  misc_feature: MA Experiment 20000267 PARAMETER Experiment Name: At_Drought_P Parameter: Treatment Value: Drought vs. No Drought
  misc_feature: MA Experiment ID: 20000286 Result: Down-regulated in Transcription
  misc_feature: MA Experiment 20000286 PARAMETER Experiment Name: At_Open_Flower_P Parameter: Age (day) Value: 21
  misc_feature: MA Experiment 20000286 PARAMETER Experiment Name: At_Open_Flower_P Parameter: Plant Line Value: WS
  misc_feature: MA Experiment 20000286 PARAMETER Experiment Name: At_Open_Flower_P Parameter: Tissue Value: Half Open vs. Whole Plant
  misc_feature: MA Experiment ID: 20000439 Result: Up-regulated in Transcription
  misc_feature: MA Experiment 20000439 PARAMETER Experiment Name: At_Roots__P Parameter: Age (day) Value: 14 vs. 21
  misc_feature: MA Experiment 20000439 PARAMETER Experiment Name: At_Roots__P Parameter: Organism Value: A. thaliana
  misc_feature: MA Experiment 20000439 PARAMETER Experiment Name: At_Roots__P Parameter: Tissue Value: Roots vs. Whole Plant
  misc_feature: MA Experiment ID: 20000453 Result: Up-regulated in Transcription
  misc_feature: MA Experiment 20000453 PARAMETER Experiment Name: At_100uM_ABA_P Parameter: Age (day) Value: 15
  misc_feature: MA Experiment 20000453 PARAMETER Experiment Name: At_100uM_ABA_P Parameter: Organism Value: A. thaliana
  misc_feature: MA Experiment 20000453 PARAMETER Experiment Name: At_100uM_ABA_P Parameter: Plant Line Value: WS
  misc_feature: MA Experiment 20000453 PARAMETER Experiment Name: At_100uM_ABA_P Parameter: Timepoint (hr) Value: 24
  misc_feature: MA Experiment 20000453 PARAMETER Experiment Name: At_100uM_ABA_P Parameter: Tissue Value: Aerial
  misc_feature: MA Experiment 20000453 PARAMETER Experiment Name: At_100uM_ABA_P Parameter: Treatment Value: 100uM ABA vs. No Treatment
  misc_feature: MA Experiment ID: 20001248 Result: Down-regulated in Transcription
  misc_feature: MA Experiment 20001248 PARAMETER Experiment Name: At_Far-red-induction_P Parameter: Age (day) Value: 7
  misc_feature: MA Experiment 20001248 PARAMETER Experiment Name: At_Far-red-induction_P Parameter: Light Value: Far-red vs. White
  misc_feature: MA Experiment 20001248 PARAMETER Experiment Name: At_Far-red-induction_P Parameter: Organism Value: A. thaliana
  misc_feature: MA Experiment 20001248 PARAMETER Experiment Name: At_Far-red-induction_P Parameter: Plant Line Value: Columbia
  misc_feature: MA Experiment 20001248 PARAMETER Experiment Name: At_Far-red-induction_P Parameter: Timepoint (hr) Value: 4
  misc_feature: MA Experiment 20001248 PARAMETER Experiment Name: At_Far-red-induction_P Parameter: Tissue Value: Whole Plant
  misc_feature: MA Experiment ID: 20001451 Result: Up-regulated in Transcription
  misc_feature: MA Experiment 20001451 PARAMETER Experiment Name: At_Far-red-induction_P Parameter: Age (day) Value: 7
  misc_feature: MA Experiment 20001451 PARAMETER Experiment Name: At_Far-red-induction_P Parameter: Light Value: Far-red vs. White
  misc_feature: MA Experiment 20001451 PARAMETER Experiment Name: At_Far-red-induction_P Parameter: Organism Value: A. thaliana
  misc_feature: MA Experiment 20001451 PARAMETER Experiment Name: At_Far-red-induction_P Parameter: Plant Line Value: Columbia
  misc_feature: MA Experiment 20001451 PARAMETER Experiment Name: At_Far-red-induction_P Parameter: Timepoint (hr) Value: 24
  misc_feature: MA Experiment 20001451 PARAMETER Experiment Name: At_Far-red-induction_P Parameter: Tissue Value: Whole Plant
  misc_feature: MA Experiment ID: 20001904 Result: Up-regulated in Transcription
  misc_feature: MA Experiment 20001904 PARAMETER Experiment Name: At_Drought_Reproduction_P Parameter: Age (day) Value: 37
  misc_feature: MA Experiment 20001904 PARAMETER Experiment Name: At_Drought_Reproduction_P Parameter: Organism Value: A. thaliana
  misc_feature: MA Experiment 20001904 PARAMETER Experiment Name: At_Drought_Reproduction_P Parameter: Plant Line Value: WS
  misc_feature: MA Experiment 20001904 PARAMETER Experiment Name: At_Drought_Reproduction_P Parameter: Timepoint (day) Value: 7
  misc_feature: MA Experiment 20001904 PARAMETER Experiment Name: At_Drought_Reproduction_P Parameter: Tissue Value: Rosettes
  misc_feature: MA Experiment 20001904 PARAMETER Experiment Name: At_Drought_Reproduction_P Parameter: Treatment Value: Drought vs. No Drought
  misc_feature: MA Experiment ID: 20001905 Result: Up-regulated in Transcription
  misc_feature: MA Experiment 20001905 PARAMETER Experiment Name: At_Drought_Reproduction_P Parameter: Age (day) Value: 40
  misc_feature: MA Experiment 20001905 PARAMETER Experiment Name: At_Drought_Reproduction_P Parameter: Organism Value: A. thaliana
  misc_feature: MA Experiment 20001905 PARAMETER Experiment Name: At_Drought_Reproduction_P Parameter: Plant Line Value: WS
  misc_feature: MA Experiment 20001905 PARAMETER Experiment Name: At_Drought_Reproduction_P Parameter: Timepoint (day) Value: 10
  misc_feature: MA Experiment 20001905 PARAMETER Experiment Name: At_Drought_Reproduction_P Parameter: Tissue Value: Rosettes
  misc_feature: MA Experiment 20001905 PARAMETER Experiment Name: At_Drought_Reproduction_P Parameter: Treatment Value: Drought vs. No Drought
  misc_feature: MA Experiment ID: 20001906 Result: Up-regulated in Transcription
  misc_feature: MA Experiment 20001906 PARAMETER Experiment Name: At_Drought_Reproduction_P Parameter: Age (day) Value: 35
  misc_feature: MA Experiment 20001906 PARAMETER Experiment Name: At_Drought_Reproduction_P Parameter: Organism Value: A. thaliana
  misc_feature: MA Experiment 20001906 PARAMETER Experiment Name: At_Drought_Reproduction_P Parameter: Plant Line Value: WS
  misc_feature: MA Experiment 20001906 PARAMETER Experiment Name: At_Drought_Reproduction_P Parameter: Timepoint (day) Value: 5
  misc_feature: MA Experiment 20001906 PARAMETER Experiment Name: At_Drought_Reproduction_P Parameter: Tissue Value: Siliques
  misc_feature: MA Experiment 20001906 PARAMETER Experiment Name: At_Drought_Reproduction_P Parameter: Treatment Value: Drought vs. No Drought
  misc_feature: MA Experiment ID: 20001908 Result: Up-regulated in Transcription
  misc_feature: MA Experiment 20001908 PARAMETER Experiment Name: At_Drought_Reproduction_P Parameter: Age (day) Value: 40
  misc_feature: MA Experiment 20001908 PARAMETER Experiment Name: At_Drought_Reproduction_P Parameter: Organism Value: A. thaliana
  misc_feature: MA Experiment 20001908 PARAMETER Experiment Name: At_Drought_Reproduction_P Parameter: Plant Line Value: WS
  misc_feature: MA Experiment 20001908 PARAMETER Experiment Name: At_Drought_Reproduction_P Parameter: Timepoint (day) Value: 10
  misc_feature: MA Experiment 20001908 PARAMETER Experiment Name: At_Drought_Reproduction_P Parameter: Tissue Value: Siliques
  misc_feature: MA Experiment 20001908 PARAMETER Experiment Name: At_Drought_Reproduction_P Parameter: Treatment Value: Drought vs. No Drought
atcacataccaaaaaaaggcaaaacactcacgaaagaagaaacggagaggatgaagcattatgtgctagttcacggaggctgccacggtgcgtggtgttggtacaaggtgaagccgatgcttgaacattccggccaccgtgtcacggtttttgatcttacggcgcatggtgtgaacatgagcagagtagaagatattcagactttggaggatttcgctaagccgttgcttgaggttcttgagtcttttggctcggatgataaagtagtcctcgtcgcgcatagcctcggtggaataccggctgctcttgcagccgacatgtttcctagtaaaatctctgttgctgtcttcgttacttcttttatgcccgacacaacgaatccaccttcttacgtgttcgaaaagtttctcggaagcattacagaagaagaacgtatggacttcgagttagggagctatggaacagatgaccatccactaaagactgcttttcttggacctaactacttgaagaatatgtatctactttctcctatcgaagattatgaattggccaaaatgttgatgagagtcacaccggctattactagtaatctgacggggactaaaagcttaacggcacaaggatatggatcgattagtcgtgtgtatatcgtatgcggagaagataagggtatacgtgtagatttccaacgatggatgattgagaactctccggttaaagaagtgatggagatcaaagatgcagatcatatgcctatgttttccaagcctcatgaactctgtgatcgtcttctaaagattgctgataaatatccctaagcaagaatatctatgacaatatcaataattttcatgggaataagtttttttattgttctgttcacaaaatatgtggaaaaaaaaaaagacaacaatagaatttacgc

SEQ ID NO: 97655 - protein, 272 aa, Arabidopsis thaliana
  peptide (1)..(272): Ceres Seq. ID no. 13489156
  misc_feature (45)..(266): Pfam Name: alpha/beta hydrolase fold Pfam Description: alpha/beta hydrolase fold
  misc_feature (17)..(272): Homolog of NCBI NO: 15235445 NR Description: hydrolase, alpha/beta fold family [Arabidopsis
  misc_feature (13)..(271): Homolog of NCBI NO: 15227859 NR Description: hydrolase, alpha/beta fold family [Arabidopsis
  misc_feature (13)..(271): Homolog of NCBI NO: 15227851 NR Description: hydrolase, alpha/beta fold family [Arabidopsis
  misc_feature (13)..(271): Homolog of NCBI NO: 15227850 NR Description: hydrolase, alpha/beta fold family [Arabidopsis
  misc_feature (13)..(271): Homolog of NCBI NO: 28393451 NR Description: putative acetone-cyanohydrin lyase [Arabidopsis
  misc_feature (13)..(271): Homolog of NCBI NO: 15227865 NR Description: esterase, putative [Arabidopsis thaliana]
  misc_feature (13)..(271): Homolog of NCBI NO: 15227867 NR Description: esterase, putative [Arabidopsis thaliana]
  misc_feature (13)..(271): Homolog of NCBI NO: 27754457 NR Description: putative acetone-cyanohydrin lyase [Arabidopsis
  misc_feature (13)..(271): Homolog of NCBI NO: 21554666 NR Description: putative acetone-cyanohydrin lyase [Arabidopsis
  misc_feature (13)..(271): Homolog of NCBI NO: 15227863 NR Description: hydrolase, alpha/beta fold family [Arabidopsis
HIPKKGKTLTKEETERMKHYVLVHGGCHGAWCWYKVKPMLEHSGHRVTVFDLTAHGVNMSRVEDIQTLEDFAKPLLEVLESFGSDDKVVLVAHSLGGIPAALAADMFPSKISVAVFVTSFMPDTTNPPSYVFEKFLGSITEEERMDFELGSYGTDDHPLKTAFLGPNYLKNMYLLSPIEDYELAKMLMRVTPAITSNLTGTKSLTAQGYGSISRVYIVCGEDKGIRVDFQRWMIENSPVKEVMEIKDADHMPMFSKPHELCDRLLKIADKYP

SEQ ID NO: 97656 - protein, 256 aa, Arabidopsis thaliana; identical to SEQ ID NO: 37348
  peptide (1)..(256): Ceres Seq. ID no. 13489157
  misc_feature (29)..(250): Pfam Name: alpha/beta hydrolase fold Pfam Description: alpha/beta hydrolase fold
  misc_feature (1)..(256): Homolog of NCBI NO: 15235445 NR Description: hydrolase, alpha/beta fold family [Arabidopsis
  misc_feature (1)..(255): Homolog of NCBI NO: 15227859 NR Description: hydrolase, alpha/beta fold family [Arabidopsis
  misc_feature (1)..(255): Homolog of NCBI NO: 15227851 NR Description: hydrolase, alpha/beta fold family [Arabidopsis
  misc_feature (1)..(255): Homolog of NCBI NO: 15227850 NR Description: hydrolase, alpha/beta fold family [Arabidopsis
  misc_feature (1)..(255): Homolog of NCBI NO: 28393451 NR Description: putative acetone-cyanohydrin lyase [Arabidopsis
  misc_feature (1)..(255): Homolog of NCBI NO: 15227865 NR Description: esterase, putative [Arabidopsis thaliana]
  misc_feature (1)..(255): Homolog of NCBI NO: 15227867 NR Description: esterase, putative [Arabidopsis thaliana]
  misc_feature (1)..(255): Homolog of NCBI NO: 27754457 NR Description: putative acetone-cyanohydrin lyase [Arabidopsis
  misc_feature (1)..(255): Homolog of NCBI NO: 21554666 NR Description: putative acetone-cyanohydrin lyase [Arabidopsis
  misc_feature (1)..(255): Homolog of NCBI NO: 15227863 NR Description: hydrolase, alpha/beta fold family [Arabidopsis

SEQ ID NO: 97657 - protein, 234 aa, Arabidopsis thaliana; identical to SEQ ID NO: 37349
  peptide (1)..(234): Ceres Seq. ID no. 13489158
  misc_feature (7)..(228): Pfam Name: alpha/beta hydrolase fold Pfam Description: alpha/beta hydrolase fold
  misc_feature (1)..(234): Homolog of NCBI NO: 15235445 NR Description: hydrolase, alpha/beta fold family [Arabidopsis
  misc_feature (1)..(233): Homolog of NCBI NO: 15227859 NR Description: hydrolase, alpha/beta fold family [Arabidopsis
  misc_feature (1)..(233): Homolog of NCBI NO: 15227851 NR Description: hydrolase, alpha/beta fold family [Arabidopsis
  misc_feature (1)..(233): Homolog of NCBI NO: 15227850 NR Description: hydrolase, alpha/beta fold family [Arabidopsis
  misc_feature (1)..(233): Homolog of NCBI NO: 28393451 NR Description: putative acetone-cyanohydrin lyase [Arabidopsis
  misc_feature (1)..(233): Homolog of NCBI NO: 15227865 NR Description: esterase, putative [Arabidopsis thaliana]
  misc_feature (1)..(233): Homolog of NCBI NO: 15227867 NR Description: esterase, putative [Arabidopsis thaliana]
  misc_feature (1)..(233): Homolog of NCBI NO: 27754457 NR Description: putative acetone-cyanohydrin lyase [Arabidopsis
  misc_feature (1)..(233): Homolog of NCBI NO: 21554666 NR Description: putative acetone-cyanohydrin lyase [Arabidopsis
  misc_feature (1)..(233): Homolog of NCBI NO: 15227863 NR Description: hydrolase, alpha/beta fold family [Arabidopsis

SEQ ID NO: 97658 - DNA, 1025 bp, Arabidopsis thaliana
  misc_feature (1)..(1025): Ceres Seq. ID no. 13489889
  misc_feature: MA Experiment ID: 20000113 Result: Down-regulated in Transcription
  misc_feature: MA Experiment 20000113 PARAMETER Experiment Name: At_42deg_Heat_cDNA_P Parameter: Temperature (deg C) Value: 42 vs. 22
  misc_feature: MA Experiment 20000113 PARAMETER Experiment Name: At_42deg_Heat_cDNA_P Parameter: Timepoint (hr) Value: 8
  misc_feature: MA Experiment 20000113 PARAMETER Experiment Name: At_42deg_Heat_cDNA_P Parameter: Tissue Value: Aerial
  misc_feature: MA Experiment ID: 20000173 Result: Down-regulated in Transcription
  misc_feature: MA Experiment 20000173 PARAMETER Experiment Name: At_42deg_Heat_P Parameter: Age (day) Value: 14
  misc_feature: MA Experiment 20000173 PARAMETER Experiment Name: At_42deg_Heat_P Parameter: Organism Value: A. thaliana
  misc_feature: MA Experiment 20000173 PARAMETER Experiment Name: At_42deg_Heat_P Parameter: Plant Line Value: WS
  misc_feature: MA Experiment 20000173 PARAMETER Experiment Name: At_42deg_Heat_P Parameter: Temperature (deg C) Value: 42 vs. 22
  misc_feature: MA Experiment 20000173 PARAMETER Experiment Name: At_42deg_Heat_P Parameter: Timepoint (hr) Value: 6
  misc_feature: MA Experiment 20000173 PARAMETER Experiment Name: At_42deg_Heat_P Parameter: Tissue Value: Aerial
  misc_feature: MA Experiment ID: 20000180 Result: Up-regulated in Transcription
  misc_feature: MA Experiment 20000180 PARAMETER Experiment Name: At_Germinating_Seeds_P Parameter: Age (hr) Value: 24 vs. 0
  misc_feature: MA Experiment 20000180 PARAMETER Experiment Name: At_Germinating_Seeds_P Parameter: Tissue Value: Germinating Seeds
  misc_feature: MA Experiment ID: 20001911 Result: Down-regulated in Transcription
  misc_feature: MA Experiment 20001911 PARAMETER Experiment Name: At_Drought_Reproduction_P Parameter: Age (day) Value: 40
  misc_feature: MA Experiment 20001911 PARAMETER Experiment Name: At_Drought_Reproduction_P Parameter: Organism Value: A. thaliana
  misc_feature: MA Experiment 20001911 PARAMETER Experiment Name: At_Drought_Reproduction_P Parameter: Plant Line Value: WS
  misc_feature: MA Experiment 20001911 PARAMETER Experiment Name: At_Drought_Reproduction_P Parameter: Timepoint (day) Value: 10
  misc_feature: MA Experiment 20001911 PARAMETER Experiment Name: At_Drought_Reproduction_P Parameter: Tissue Value: Flowers
  misc_feature: MA Experiment 20001911 PARAMETER Experiment Name: At_Drought_Reproduction_P Parameter: Treatment Value: Drought vs. No Drought
aaaaaaacttctgaatctccgaaaaaagccaatcgggggaagaaaaaaattcaacggccgtctggttactgtcttgcttgcttccgacgatctatcttccccgagtagatttgaaatggctgctcctcctgctagagctcgtgctgattacgattacctcattaaacttctgctgatcggagacagcggtgttggtaagagttgccttctcttacgtttctcagatggctcgtttaccaccagtttcattacaactattgggattgattttaagatacggactattgagctcgatgggaagagaattaagctgcaaatctgggatactgccggacaggagcggttccgcacaatcacaactgcgtactaccgtggagccatggggattttgcttgtgtatgatgtgactgatgaatcatctttcaacaacatcaggaattggatccgtaacattgagcagcatgcttctgatagtgtcaacaagattctagttgggaacaaagcagatatggatgaaagcaaaagagctgtgccaaaatctaagggccaagctcttgcagatgaatatggaatgaagtttttcgagactagtgccaagactaacttaaacgttgaggaagttttcttctctattgctaaagacattaagcaaagacttgcagataccgatgcacgagctgagccgcaaacaatcaaaatcaaccaatccgaccaaggtgcgggaacatctcaagctactcagaaatcagcatgttgcggcacataaaaattgggtccacgacgcctgtcaaaggagagaatctggctagtgaaagagaaatggtatttggaaagaaaaaatgaaaaaggaaatcaatcttcttttgcttttcttctatatgagatggtgtttctacgtattcttttaagattctctctttccctaatggtatagtgtgactgtgaaggacacaattcgtattccatatttctggaatggattctctgacatcagattatgacttatgataatatcagtttatctc

SEQ ID NO: 97659 - protein, 254 aa, Arabidopsis thaliana; identical to SEQ ID NO: 20797
  peptide (1)..(254): Ceres Seq. ID no. 13489890
  misc_feature (55)..(217): Pfam Name: Ras family Pfam Description: Ras family
  misc_feature (39)..(254): Homolog of NCBI NO: 15231847 NR Description: Ras-related GTP-binding protein, putative
  misc_feature (39)..(254): Homolog of NCBI NO: 15238542 NR Description: Ras family GTP-binding protein [Arabidopsis
  misc_feature (39)..(254): Homolog of NCBI NO: 15231322 NR Description: Ras family GTP-binding protein [Arabidopsis
  misc_feature (39)..(254): Homolog of NCBI NO: 1362066 NR Description: GTP-binding protein GTP6 - garden pea
  misc_feature (39)..(254): Homolog of NCBI NO: 2808638 NR Description: small GTP-binding protein [Daucus carota]
  misc_feature (39)..(254): Homolog of NCBI NO: 18447917 NR Description: ras-related protein RAB8-3 [Nicotiana tabacum]
  misc_feature (39)..(254): Homolog of NCBI NO: 18447913 NR Description: ras-related protein RAB8-1 [Nicotiana tabacum]
  misc_feature (39)..(254): Homolog of NCBI NO: 5669640 NR Description: ethylene-responsive small GTP-binding protein
  misc_feature (39)..(254): Homolog of NCBI NO: 18447921 NR Description: ras-related protein RAB8-5 [Nicotiana tabacum]
  misc_feature (39)..(254): Homolog of NCBI NO: 18447915 NR Description: ras-related protein RAB8-2 [Nicotiana tabacum]

SEQ ID NO: 97660 - protein, 216 aa, Arabidopsis thaliana; identical to SEQ ID NO: 20798
  peptide (1)..(216): Ceres Seq. ID no. 13489891
  misc_feature (17)..(179): Pfam Name: Ras family Pfam Description: Ras family
  misc_feature (1)..(216): Homolog of NCBI NO: 15231847 NR Description: Ras-related GTP-binding protein, putative
  misc_feature (1)..(216): Homolog of NCBI NO: 15238542 NR Description: Ras family GTP-binding protein [Arabidopsis
  misc_feature (1)..(216): Homolog of NCBI NO: 15231322 NR Description: Ras family GTP-binding protein [Arabidopsis
  misc_feature (1)..(216): Homolog of NCBI NO: 1362066 NR Description: GTP-binding protein GTP6 - garden pea
  misc_feature (1)..(216): Homolog of NCBI NO: 2808638 NR Description: small GTP-binding protein [Daucus carota]
  misc_feature (1)..(216): Homolog of NCBI NO: 18447913 NR Description: ras-related protein RAB8-1 [Nicotiana tabacum]
  misc_feature (1)..(216): Homolog of NCBI NO: 18447917 NR Description: ras-related protein RAB8-3 [Nicotiana tabacum]
  misc_feature (1)..(216): Homolog of NCBI NO: 5669640 NR Description: ethylene-responsive small GTP-binding protein
  misc_feature (1)..(216): Homolog of NCBI NO: 18447921 NR Description: ras-related protein RAB8-5 [Nicotiana tabacum]
  misc_feature (1)..(216): Homolog of NCBI NO: 18447915 NR Description: ras-related protein RAB8-2 [Nicotiana tabacum]

SEQ ID NO: 97661 - protein, 128 aa, Arabidopsis thaliana; identical to SEQ ID NO: 20799
  peptide (1)..(128): Ceres Seq. ID no. 13489892
  misc_feature (1)..(91): Pfam Name: Ras family Pfam Description: Ras family
  misc_feature (1)..(128): Homolog of NCBI NO: 15231847 NR Description: Ras-related GTP-binding protein, putative
  misc_feature (1)..(128): Homolog of NCBI NO: 15238542 NR Description: Ras family GTP-binding protein [Arabidopsis
  misc_feature (1)..(128): Homolog of NCBI NO: 15231322 NR Description: Ras family GTP-binding protein [Arabidopsis
  misc_feature (1)..(128): Homolog of NCBI NO: 1362066 NR Description: GTP-binding protein GTP6 - garden pea
  misc_feature (1)..(128): Homolog of NCBI NO: 2808638 NR Description: small GTP-binding protein [Daucus carota]
  misc_feature (1)..(128): Homolog of NCBI NO: 18447913 NR Description: ras-related protein RAB8-1 [Nicotiana tabacum]
  misc_feature (1)..(128): Homolog of NCBI NO: 18447917 NR Description: ras-related protein RAB8-3 [Nicotiana tabacum]
  misc_feature (1)..(128): Homolog of NCBI NO: 5669640 NR Description: ethylene-responsive small GTP-binding protein
  misc_feature (1)..(128): Homolog of NCBI NO: 18447921 NR Description: ras-related protein RAB8-5 [Nicotiana tabacum]
  misc_feature (1)..(128): Homolog of NCBI NO: 18447915 NR Description: ras-related protein RAB8-2 [Nicotiana tabacum]

SEQ ID NO: 97662 - DNA, 991 bp, Arabidopsis thaliana
  misc_feature (1)..(991): Ceres Seq. ID no. 13490309
  misc_feature: MA Experiment ID: 108434 Result: Up-regulated in Transcription
  misc_feature: MA Experiment 108434 PARAMETER Experiment Name: At_Root_Tips_cDNA_P Parameter: Tissue Value: Root Tips
  misc_feature: MA Experiment ID: 108461 Result: Down-regulated in Transcription
  misc_feature: MA Experiment 108461 PARAMETER Experiment Name: At_Germinating_Seeds_cDNA_P Parameter: Age (day) Value: 1 vs. 0
  misc_feature: MA Experiment 108461 PARAMETER Experiment Name: At_Germinating_Seeds_cDNA_P Parameter: Tissue Value: Germinating Seeds
  misc_feature: MA Experiment ID: 108462 Result: Down-regulated in Transcription
  misc_feature: MA Experiment 108462 PARAMETER Experiment Name: At_Germinating_Seeds_cDNA_P Parameter: Age (day) Value: 2 vs. 0
  misc_feature: MA Experiment 108462 PARAMETER Experiment Name: At_Germinating_Seeds_cDNA_P Parameter: Tissue Value: Germinating Seeds
  misc_feature: MA Experiment ID: 108463 Result: Down-regulated in Transcription
  misc_feature: MA Experiment 108463 PARAMETER Experiment Name: At_Germinating_Seeds_cDNA_P Parameter: Age (day) Value: 3 vs. 0
  misc_feature: MA Experiment 108463 PARAMETER Experiment Name: At_Germinating_Seeds_cDNA_P Parameter: Tissue Value: Germinating Seeds
  misc_feature: MA Experiment ID: 108464 Result: Down-regulated in Transcription
  misc_feature: MA Experiment 108464 PARAMETER Experiment Name: At_Germinating_Seeds_cDNA_P Parameter: Age (day) Value: 4 vs. 0
  misc_feature: MA Experiment 108464 PARAMETER Experiment Name: At_Germinating_Seeds_cDNA_P Parameter: Tissue Value: Germinating Seeds
  misc_feature: MA Experiment ID: 108585 Result: Up-regulated in Transcription
  misc_feature: MA Experiment 108585 PARAMETER Experiment Name: At_5mM_NaNP_cDNA_P Parameter: Timepoint (hr) Value: 6
  misc_feature: MA Experiment 108585 PARAMETER Experiment Name: At_5mM_NaNP_cDNA_P Parameter: Tissue Value: Aerial
  misc_feature: MA Experiment 108585 PARAMETER Experiment Name: At_5mM_NaNP_cDNA_P Parameter: Treatment Value: null
  misc_feature: MA Experiment ID: 20000071 Result: Up-regulated in Transcription
  misc_feature: MA Experiment 20000071 PARAMETER Experiment Name: At_100uM_ABA_Mutants_cDNA_P Parameter: Plant Line Value: CS8104
  misc_feature: MA Experiment 20000071 PARAMETER Experiment Name: At_100uM_ABA_Mutants_cDNA_P Parameter: Timepoint (hr) Value: 6
  misc_feature: MA Experiment 20000071 PARAMETER Experiment Name: At_100uM_ABA_Mutants_cDNA_P Parameter: Tissue Value: Aerial
  misc_feature: MA Experiment 20000071 PARAMETER Experiment Name: At_100uM_ABA_Mutants_cDNA_P Parameter: Treatment Value: 100uM ABA vs. No Treatment
  misc_feature: MA Experiment ID: 20000088 Result: Up-regulated in Transcription
  misc_feature: MA Experiment 20000088 PARAMETER Experiment Name: At_100uM_ABA_Mutants_cDNA_P Parameter: Plant Line Value: Landsberg
  misc_feature: MA Experiment 20000088 PARAMETER Experiment Name: At_100uM_ABA_Mutants_cDNA_P Parameter: Timepoint (hr) Value: 6
  misc_feature: MA Experiment 20000088 PARAMETER Experiment Name: At_100uM_ABA_Mutants_cDNA_P Parameter: Tissue Value: Aerial
  misc_feature: MA Experiment 20000088 PARAMETER Experiment Name: At_100uM_ABA_Mutants_cDNA_P Parameter: Treatment Value: 100uM ABA vs. No Treatment
  misc_feature: MA Experiment ID: 20000111 Result: Down-regulated in Transcription
  misc_feature: MA Experiment 20000111 PARAMETER Experiment Name: At_42deg_Heat_cDNA_P Parameter: Temperature (deg C) Value: 42 vs. 22
  misc_feature: MA Experiment 20000111 PARAMETER Experiment Name: At_42deg_Heat_cDNA_P Parameter: Timepoint (hr) Value: 6
  misc_feature: MA Experiment 20000111 PARAMETER Experiment Name: At_42deg_Heat_cDNA_P Parameter: Tissue Value: Aerial
  misc_feature: MA Experiment ID: 20000173 Result: Down-regulated in Transcription
  misc_feature: MA Experiment 20000173 PARAMETER Experiment Name: At_42deg_Heat_P Parameter: Age (day) Value: 14
  misc_feature: MA Experiment 20000173 PARAMETER Experiment Name: At_42deg_Heat_P Parameter: Organism Value: A. thaliana
  misc_feature: MA Experiment 20000173 PARAMETER Experiment Name: At_42deg_Heat_P Parameter: Plant Line Value: WS
  misc_feature: MA Experiment 20000173 PARAMETER Experiment Name: At_42deg_Heat_P Parameter: Temperature (deg C) Value: 42 vs. 22
  misc_feature: MA Experiment 20000173 PARAMETER Experiment Name: At_42deg_Heat_P Parameter: Timepoint (hr) Value: 6
  misc_feature: MA Experiment 20000173 PARAMETER Experiment Name: At_42deg_Heat_P Parameter: Tissue Value: Aerial
  misc_feature: MA Experiment ID: 20000179 Result: Down-regulated in Transcription
  misc_feature: MA Experiment 20000179 PARAMETER Experiment Name: At_Germinating_Seeds_P Parameter: Age (hr) Value: 6 vs. 0
  misc_feature: MA Experiment 20000179 PARAMETER Experiment Name: At_Germinating_Seeds_P Parameter: Tissue Value: Germinating Seeds
  misc_feature: MA Experiment ID: 20000180 Result: Down-regulated in Transcription
  misc_feature: MA Experiment 20000180 PARAMETER Experiment Name: At_Germinating_Seeds_P Parameter: Age (hr) Value: 24 vs. 0
  misc_feature: MA Experiment 20000180 PARAMETER Experiment Name: At_Germinating_Seeds_P Parameter: Tissue Value: Germinating Seeds
  misc_feature: Pfam Name: Proteasome Pfam Description: Proteasome A-type and B-type
cttctctgcaagaaacctaaaagcctatttatttcacctctctctctctctctctgcaactaatcacttgttcgatctcgaagctgaagctaaagctttcgctaatttgcttaaggagctatgggagatagtcagtactcgttttctctcaccactttcagcccatctggtaagctggtgcagatagaacatgcccttacagctgttggatctggccaaacatctttagggattaaagcttctaatggagttgtcattgcaactgaaaagaagttgccttctattctggttgatgaagcatctgttcaaaaaattcagcatttgactcctaatattggagttgtttacagtggcatgggtcctgattttcgagttcttgttaggaagagtaggaaacaggctgagcaatatcttcgtctgtacaaagaacccatccctgttacccaacttgtaagggaaaccgctactgttatgcaagagtttactcaatcgggaggtgttaggcctttcggggtttccttgctggtggctggatatgatgacaagggtccacaattgtatcaggtggatccatctggctcttatttctcctggaaagcttcagccatggggaagaacgtttctaatgcaaaaaccttccttgagaaaaggtacacagaagacatggaacttgacgatgccattcacacagcgatactgacattgaaagaaggctttgagggagagatctcaagcaaaaatattgaaattggcaaaatcggtgctgacaaagttttcagggtactaacaccagcagagatcgatgattaccttgctgaagtcgagtaactcccagcatagtctagcaacaaagtttaagaccggaatttcgtggcatttacagtcttaaagagttgttttttctgtaaaactttggatctttaaatagtttgttgctgaacacaagctgagtgtctctcaataactaatgaaatctgtttctttttttctc

SEQ ID NO: 97663 - protein, 235 aa, Arabidopsis thaliana; identical to SEQ ID NO: 28105
  peptide (1)..(235): Ceres Seq. ID no. 13490310
  misc_feature: Pfam Name: Proteasome Pfam Description: Proteasome A-type and B-type
  misc_feature (1)..(235): Homolog of NCBI NO: 15219257 NR Description: 20S proteasome alpha subunit B (PAB1) thaliana] >gi|6093778|sp|O23708|PSA2_ARATH Proteasome subunit type 2 (20S proteasome alpha subunit B) >gi|25290062|pir||T51968
  misc_feature (1)..(235): Homolog of NCBI NO: 15219317 NR Description: 20S proteasome alpha subunit B, putative thaliana] >gi|20453128|gb|AAM19806.1| At1g79210/YUP8H12R_1 thaliana] >gi|21689609|gb|AAM67426.1| At1g79210/YUP8H12R_1
  misc_feature (1)..(235): Homolog of NCBI NO: 12229921 NR Description: Proteasome subunit alpha type 2 (20S proteasome
  misc_feature (1)..(227): Homolog of NCBI NO: 7435868 NR Description: proteasome chain - rice
  misc_feature (1)..(235): Homolog of NCBI NO: 7435867 NR Description: hypothetical protein YUP8H12R.19 - Arabidopsis
  misc_feature (1)..(234): Homolog of NCBI NO: 6093780 NR Description: Proteasome subunit alpha type 2
  misc_feature (1)..(234): Homolog of NCBI NO: 130852 NR Description: Proteasome subunit alpha type 2 (Proteasome C3) (Macropain subunit C3) (Multicatalytic endopeptidase complex
  misc_feature (1)..(234): Homolog of NCBI NO: 19168518 NR Description: PROSAg25 protein [Anopheles gambiae]
  misc_feature (1)..(234): Homolog of NCBI NO: 31241267 NR Description: ENSANGP00000011336 [Anopheles gambiae]
  misc_feature (1)..(234): Homolog of NCBI NO: 4506181 NR Description: proteasome alpha 2 subunit; proteasome subunit proteasome component C3; macropain subunit C3; multicatalytic complex subunit C3 [Homo sapiens] >gi|130850|sp|P25787|PSA2_HUMAN

SEQ ID NO: 97664 - protein, 157 aa, Arabidopsis thaliana; identical to SEQ ID NO: 28106
  peptide (1)..(157): Ceres Seq. ID no. 13490311
  misc_feature: Pfam Name: Proteasome Pfam Description: Proteasome A-type and B-type
  misc_feature (1)..(157): Homolog of NCBI NO: 15219257 NR Description: 20S proteasome alpha subunit B (PAB1) thaliana] >gi|6093778|sp|O23708|PSA2_ARATH Proteasome subunit type 2 (20S proteasome alpha subunit B) >gi|25290062|pir||T51968
  misc_feature (1)..(157): Homolog of NCBI NO: 15219317 NR Description: 20S proteasome alpha subunit B, putative thaliana] >gi|20453128|gb|AAM19806.1| At1g79210/YUP8H12R_1 thaliana] >gi|21689609|gb|AAM67426.1| At1g79210/YUP8H12R_1
  misc_feature (1)..(157): Homolog of NCBI NO: 12229921 NR Description: Proteasome subunit alpha type 2 (20S proteasome
  misc_feature (1)..(149): Homolog of NCBI NO: 7435868 NR Description: proteasome chain - rice
  misc_feature (1)..(157): Homolog of NCBI NO: 7435867 NR Description: hypothetical protein YUP8H12R.19 - Arabidopsis
  misc_feature (1)..(156): Homolog of NCBI NO: 6093780 NR Description: Proteasome subunit alpha type 2
  misc_feature (1)..(156): Homolog of NCBI NO: 130852 NR Description: Proteasome subunit alpha type 2 (Proteasome C3) (Macropain subunit C3) (Multicatalytic endopeptidase complex
  misc_feature (1)..(156): Homolog of NCBI NO: 19168518 NR Description: PROSAg25 protein [Anopheles gambiae]
  misc_feature (1)..(156): Homolog of NCBI NO: 31241267 NR Description: ENSANGP00000011336 [Anopheles gambiae]
  misc_feature (1)..(156): Homolog of NCBI NO: 4506181 NR Description: proteasome alpha 2 subunit; proteasome subunit proteasome component C3; macropain subunit C3; multicatalytic complex subunit C3 [Homo sapiens] >gi|130850|sp|P25787|PSA2_HUMAN

SEQ ID NO: 97665 - protein, 118 aa, Arabidopsis thaliana; identical to SEQ ID NO: 28107
  peptide (1)..(118): Ceres Seq. ID no. 13490312
  misc_feature: Pfam Name: Proteasome Pfam Description: Proteasome A-type and B-type
  misc_feature (1)..(118): Homolog of NCBI NO: 15219257 NR Description: 20S proteasome alpha subunit B (PAB1) thaliana] >gi|6093778|sp|O23708|PSA2_ARATH Proteasome subunit type 2 (20S proteasome alpha subunit B) >gi|25290062|pir||T51968
  misc_feature (1)..(118): Homolog of NCBI NO: 15219317 NR Description: 20S proteasome alpha subunit B, putative thaliana] >gi|20453128|gb|AAM19806.1| At1g79210/YUP8H12R_1 thaliana] >gi|21689609|gb|AAM67426.1| At1g79210/YUP8H12R_1
  misc_feature (1)..(118): Homolog of NCBI NO: 12229921 NR Description: Proteasome subunit alpha type 2 (20S proteasome
  misc_feature (1)..(110): Homolog of NCBI NO: 7435868 NR Description: proteasome chain - rice
  misc_feature (1)..(118): Homolog of NCBI NO: 7435867 NR Description: hypothetical protein YUP8H12R.19 - Arabidopsis
  misc_feature (1)..(117): Homolog of NCBI NO: 6093780 NR Description: Proteasome subunit alpha type 2
  misc_feature (1)..(117): Homolog of NCBI NO: 130852 NR Description: Proteasome subunit alpha type 2 (Proteasome C3) (Macropain subunit C3) (Multicatalytic endopeptidase complex
  misc_feature (1)..(117): Homolog of NCBI NO: 19168518 NR Description: PROSAg25 protein [Anopheles gambiae]
  misc_feature (1)..(117): Homolog of NCBI NO: 31241267 NR Description: ENSANGP00000011336 [Anopheles gambiae]
  misc_feature (1)..(117): Homolog of NCBI NO: 4506181 NR Description: proteasome alpha 2 subunit; proteasome subunit proteasome component C3; macropain subunit C3; multicatalytic complex subunit C3 [Homo sapiens] >gi|130850|sp|P25787|PSA2_HUMAN

SEQ ID NO: 97666 - DNA, 1708 bp, Arabidopsis thaliana
  misc_feature (1)..(1708): Ceres Seq. ID no. 13490417
  misc_feature: MA Experiment ID: 108462 Result: Down-regulated in Transcription
  misc_feature: MA Experiment 108462 PARAMETER Experiment Name: At_Germinating_Seeds_cDNA_P Parameter: Age (day) Value: 2 vs. 0
  misc_feature: MA Experiment 108462 PARAMETER Experiment Name: At_Germinating_Seeds_cDNA_P Parameter: Tissue Value: Germinating Seeds
  misc_feature: MA Experiment ID: 108463 Result: Down-regulated in Transcription
  misc_feature: MA Experiment 108463 PARAMETER Experiment Name: At_Germinating_Seeds_cDNA_P Parameter: Age (day) Value: 3 vs. 0
  misc_feature: MA Experiment 108463 PARAMETER Experiment Name: At_Germinating_Seeds_cDNA_P Parameter: Tissue Value: Germinating Seeds
  misc_feature: MA Experiment ID: 108464 Result: Down-regulated in Transcription
  misc_feature: MA Experiment 108464 PARAMETER Experiment Name: At_Germinating_Seeds_cDNA_P Parameter: Age (day) Value: 4 vs. 0
  misc_feature: MA Experiment 108464 PARAMETER Experiment Name: At_Germinating_Seeds_cDNA_P Parameter: Tissue Value: Germinating Seeds
  misc_feature: MA Experiment ID: 108488 Result: Up-regulated in Transcription
  misc_feature: MA Experiment ID: 108579 Result: Up-regulated in Transcription
  misc_feature: MA Experiment 108579 PARAMETER Experiment Name: At_4deg_Cold_cDNA_P Parameter: Temperature (deg C) Value: 4 vs. 22
  misc_feature: MA Experiment 108579 PARAMETER Experiment Name: At_4deg_Cold_cDNA_P Parameter: Timepoint (hr) Value: 6
  misc_feature: MA Experiment 108579 PARAMETER Experiment Name: At_4deg_Cold_cDNA_P Parameter: Tissue Value: Aerial
  misc_feature: MA Experiment ID: 20000112 Result: Down-regulated in Transcription
  misc_feature: MA Experiment 20000112 PARAMETER Experiment Name: At_42deg_Heat_cDNA_P Parameter: Temperature (deg C) Value: 42 vs. 22
  misc_feature: MA Experiment 20000112 PARAMETER Experiment Name: At_42deg_Heat_cDNA_P Parameter: Timepoint (hr) Value: 2
  misc_feature: MA Experiment 20000112 PARAMETER Experiment Name: At_42deg_Heat_cDNA_P Parameter: Tissue Value: Aerial
  misc_feature: MA Experiment ID: 20000113 Result: Down-regulated in Transcription
  misc_feature: MA Experiment 20000113 PARAMETER Experiment Name: At_42deg_Heat_cDNA_P Parameter: Temperature (deg C) Value: 42 vs. 22
  misc_feature: MA Experiment 20000113 PARAMETER Experiment Name: At_42deg_Heat_cDNA_P Parameter: Timepoint (hr) Value: 8
  misc_feature: MA Experiment 20000113 PARAMETER Experiment Name: At_42deg_Heat_cDNA_P Parameter: Tissue Value: Aerial
  misc_feature: MA Experiment ID: 20000144 Result: Down-regulated in Transcription
  misc_feature: MA Experiment 20000144 PARAMETER Experiment Name: At_42deg_Heat_cDNA_P Parameter: Temperature (deg C) Value: 42 vs. 22
  misc_feature: MA Experiment 20000144 PARAMETER Experiment Name: At_42deg_Heat_cDNA_P Parameter: Timepoint (hr) Value: 1
  misc_feature: MA Experiment 20000144 PARAMETER Experiment Name: At_42deg_Heat_cDNA_P Parameter: Tissue Value: Aerial
  misc_feature: MA Experiment ID: 20000171 Result: Down-regulated in Transcription
  misc_feature: MA Experiment 20000171 PARAMETER Experiment Name: At_42deg_Heat_P Parameter: Age (day) Value: 14
  misc_feature: MA Experiment 20000171 PARAMETER Experiment Name: At_42deg_Heat_P Parameter: Organism Value: A. thaliana
  misc_feature: MA Experiment 20000171 PARAMETER Experiment Name: At_42deg_Heat_P Parameter: Plant Line Value: WS
  misc_feature: MA Experiment 20000171 PARAMETER Experiment Name: At_42deg_Heat_P Parameter: Temperature (deg C) Value: 42 vs. 22
  misc_feature: MA Experiment 20000171 PARAMETER Experiment Name: At_42deg_Heat_P Parameter: Timepoint (hr) Value: 1
  misc_feature: MA Experiment 20000171 PARAMETER Experiment Name: At_42deg_Heat_P Parameter: Tissue Value: Aerial
  misc_feature: MA Experiment ID: 20000173 Result: Down-regulated in Transcription
  misc_feature: MA Experiment 20000173 PARAMETER Experiment Name: At_42deg_Heat_P Parameter: Age (day) Value: 14
  misc_feature: MA Experiment 20000173 PARAMETER Experiment Name: At_42deg_Heat_P Parameter: Organism Value: A. thaliana
  misc_feature: MA Experiment 20000173 PARAMETER Experiment Name: At_42deg_Heat_P Parameter: Plant Line Value: WS
  misc_feature: MA Experiment 20000173 PARAMETER Experiment Name: At_42deg_Heat_P Parameter: Temperature (deg C) Value: 42 vs. 22
  misc_feature: MA Experiment 20000173 PARAMETER Experiment Name: At_42deg_Heat_P Parameter: Timepoint (hr) Value: 6
  misc_feature: MA Experiment 20000173 PARAMETER Experiment Name: At_42deg_Heat_P Parameter: Tissue Value: Aerial
  misc_feature: MA Experiment ID: 20000185 Result: Down-regulated in Transcription
  misc_feature: MA Experiment 20000185 PARAMETER Experiment Name: At_Roots__P Parameter: Age (day) Value: 7 vs. 21
  misc_feature: MA Experiment 20000185 PARAMETER Experiment Name: At_Roots__P Parameter: Organism Value: A. thaliana
  misc_feature: MA Experiment 20000185 PARAMETER Experiment Name: At_Roots__P Parameter: Tissue Value: Roots vs. Whole Plant
  misc_feature: MA Experiment ID: 20000213 Result: Up-regulated in Transcription
  misc_feature: MA Experiment 20000213 PARAMETER Experiment Name: At_4deg_Cold_P Parameter: Timepoint (hr) Value: 2
  misc_feature: MA Experiment ID: 20000224 Result: Down-regulated in Transcription
  misc_feature: MA Experiment ID: 20000227 Result: Down-regulated in Transcription
  misc_feature: MA Experiment 20000227 PARAMETER Experiment Name: At_Root-Tips-vs-Tops_P Parameter: Tissue Value: Root Tips vs. Root Tops
  misc_feature: MA Experiment ID: 20000234 Result: Up-regulated in Transcription
  misc_feature: MA Experiment 20000234 PARAMETER Experiment Name: At_Siliques_P Parameter: Age (day) Value: 21
  misc_feature: MA Experiment 20000234 PARAMETER Experiment Name: At_Siliques_P Parameter: Organism Value: A. thaliana
  misc_feature: MA Experiment 20000234 PARAMETER Experiment Name: At_Siliques_P Parameter: Plant Line Value: WS
  misc_feature: MA Experiment 20000234 PARAMETER Experiment Name: At_Siliques_P Parameter: Tissue Value: Less Than 5mm Siliques vs. Whole Plant
  misc_feature: MA Experiment ID: 20000264 Result: Up-regulated in Transcription
  misc_feature: MA Experiment 20000264 PARAMETER Experiment Name: At_Open_Flower_P Parameter: Age (day) Value: 21
  misc_feature: MA Experiment 20000264 PARAMETER Experiment Name: At_Open_Flower_P Parameter: Plant Line Value: WS
  misc_feature: MA Experiment 20000264 PARAMETER Experiment Name: At_Open_Flower_P Parameter: Tissue Value: Open Flower vs. Whole Plant
  misc_feature: MA Experiment ID: 20000265 Result: Up-regulated in Transcription
  misc_feature: MA Experiment 20000265 PARAMETER Experiment Name: At_Open_Flower_P Parameter: Age (day) Value: 21
  misc_feature: MA Experiment 20000265 PARAMETER Experiment Name: At_Open_Flower_P Parameter: Plant Line Value: WS
  misc_feature: MA Experiment 20000265 PARAMETER Experiment Name: At_Open_Flower_P Parameter: Tissue Value: Closed Flower vs. Whole Plant
  misc_feature: MA Experiment ID: 20000286 Result: Up-regulated in Transcription
  misc_feature: MA Experiment 20000286 PARAMETER Experiment Name: At_Open_Flower_P Parameter: Age (day) Value: 21
  misc_feature: MA Experiment 20000286 PARAMETER Experiment Name: At_Open_Flower_P Parameter: Plant Line Value: WS
  misc_feature: MA Experiment 20000286 PARAMETER Experiment Name: At_Open_Flower_P Parameter: Tissue Value: Half Open vs. Whole Plant
  misc_feature: MA Experiment ID: 20000327 Result: Down-regulated in Transcription
  misc_feature: MA Experiment 20000327 PARAMETER Experiment Name: At_42deg_Heat_Sub_P Parameter: Age (day) Value: 14
  misc_feature: MA Experiment 20000327 PARAMETER Experiment Name: At_42deg_Heat_Sub_P Parameter: Organism Value: A. thaliana
  misc_feature: MA Experiment 20000327 PARAMETER Experiment Name: At_42deg_Heat_Sub_P Parameter: Plant Line Value: WS
  misc_feature: MA Experiment 20000327 PARAMETER Experiment Name: At_42deg_Heat_Sub_P Parameter: Temperature (deg C) Value: 42 vs. 22
  misc_feature: MA Experiment 20000327 PARAMETER Experiment Name: At_42deg_Heat_Sub_P Parameter: Timepoint (hr) Value: 1
  misc_feature: MA Experiment 20000327 PARAMETER Experiment Name: At_42deg_Heat_Sub_P Parameter: Tissue Value: Aerial
  misc_feature: MA Experiment ID: 20000328 Result: Down-regulated in Transcription
  misc_feature: MA Experiment 20000328 PARAMETER Experiment Name: At_42deg_Heat_Sub_P Parameter: Age (day) Value: 14
  misc_feature: MA Experiment 20000328 PARAMETER Experiment Name: At_42deg_Heat_Sub_P Parameter: Organism Value: A. thaliana
  misc_feature: MA Experiment 20000328 PARAMETER Experiment Name: At_42deg_Heat_Sub_P Parameter: Plant Line Value: WS
  misc_feature: MA Experiment 20000328 PARAMETER Experiment Name: At_42deg_Heat_Sub_P Parameter: Temperature (deg C) Value: 42 vs. 22
  misc_feature: MA Experiment 20000328 PARAMETER Experiment Name: At_42deg_Heat_Sub_P Parameter: Timepoint (hr) Value: 6
  misc_feature: MA Experiment 20000328 PARAMETER Experiment Name: At_42deg_Heat_Sub_P Parameter: Tissue Value: Aerial
  misc_feature: MA Experiment ID: 20000329 Result: Up-regulated in Transcription
  misc_feature: MA Experiment 20000329 PARAMETER Experiment Name: At_4deg_Cold_Sub_P Parameter: Age (day) Value: 14
  misc_feature: MA Experiment 20000329 PARAMETER Experiment Name: At_4deg_Cold_Sub_P Parameter: Organism Value: A. thaliana
  misc_feature: MA Experiment 20000329 PARAMETER Experiment Name: At_4deg_Cold_Sub_P Parameter: Plant Line Value: WS
  misc_feature: MA Experiment 20000329 PARAMETER Experiment Name: At_4deg_Cold_Sub_P Parameter: Temperature (deg C) Value: 4 vs. 22
  misc_feature: MA Experiment 20000329 PARAMETER Experiment Name: At_4deg_Cold_Sub_P Parameter: Timepoint (hr) Value: 6
  misc_feature: MA Experiment 20000329 PARAMETER Experiment Name: At_4deg_Cold_Sub_P Parameter: Tissue Value: Aerial
  misc_feature: MA Experiment ID: 20000332 Result: Up-regulated in Transcription
  misc_feature: MA Experiment 20000332 PARAMETER Experiment Name: At_4deg_Cold_Sub_P Parameter: Age (day) Value: 14
  misc_feature: MA Experiment 20000332 PARAMETER Experiment Name: At_4deg_Cold_Sub_P Parameter: Organism Value: A. thaliana
  misc_feature: MA Experiment 20000332 PARAMETER Experiment Name: At_4deg_Cold_Sub_P Parameter: Plant Line Value: WS
  misc_feature: MA Experiment 20000332 PARAMETER Experiment Name: At_4deg_Cold_Sub_P Parameter: Temperature (deg C) Value: 4 vs. 22
  misc_feature: MA Experiment 20000332 PARAMETER Experiment Name: At_4deg_Cold_Sub_P Parameter: Timepoint (hr) Value: 2
  misc_feature: MA Experiment 20000332 PARAMETER Experiment Name: At_4deg_Cold_Sub_P Parameter: Tissue Value: Aerial
  misc_feature: MA Experiment ID: 20000349 Result: Down-regulated in Transcription
  misc_feature: MA Experiment 20000349 PARAMETER Experiment Name: At_100uM_ABA_Sub_P Parameter: Age (day) Value: 14
  misc_feature: MA Experiment 20000349 PARAMETER Experiment Name: At_100uM_ABA_Sub_P Parameter: Organism Value: A. thaliana
  misc_feature: MA Experiment 20000349 PARAMETER Experiment Name: At_100uM_ABA_Sub_P Parameter: Plant Line Value: WS
  misc_feature: MA Experiment 20000349 PARAMETER Experiment Name: At_100uM_ABA_Sub_P Parameter: Timepoint (hr) Value: 6
  misc_feature: MA Experiment 20000349 PARAMETER Experiment Name: At_100uM_ABA_Sub_P Parameter: Tissue Value: Aerial
  misc_feature: MA Experiment 20000349 PARAMETER Experiment Name: At_100uM_ABA_Sub_P Parameter: Treatment Value: 100uM ABA vs. No Treatment
  misc_feature: MA Experiment ID: 20000355 Result: Up-regulated in Transcription
  misc_feature: MA Experiment 20000355 PARAMETER Experiment Name: At_Siliques_Sub_P Parameter: Age (day) Value: 21
  misc_feature: MA Experiment 20000355 PARAMETER Experiment Name: At_Siliques_Sub_P Parameter: Organism Value: A. thaliana
  misc_feature: MA Experiment 20000355 PARAMETER Experiment Name: At_Siliques_Sub_P Parameter: Plant Line Value: WS
  misc_feature: MA Experiment 20000355 PARAMETER Experiment Name: At_Siliques_Sub_P Parameter: Tissue Value: Less Than 5mm Siliques vs. Whole Plant
  misc_feature: MA Experiment ID: 20000437 Result: Down-regulated in Transcription
  misc_feature: MA Experiment 20000437 PARAMETER Experiment Name: At_Drought_P Parameter: Age (day) Value: 8
  misc_feature: MA Experiment 20000437 PARAMETER Experiment Name: At_Drought_P Parameter: Organism Value: A. thaliana
  misc_feature: MA Experiment 20000437 PARAMETER Experiment Name: At_Drought_P Parameter: Plant Line Value: WS
  misc_feature: MA Experiment 20000437 PARAMETER Experiment Name: At_Drought_P Parameter: Timepoint (hr) Value: 24
  misc_feature: MA Experiment 20000437 PARAMETER Experiment Name: At_Drought_P Parameter: Tissue Value: Whole Plant
  misc_feature: MA Experiment 20000437 PARAMETER Experiment Name: At_Drought_P Parameter: Treatment Value: Drought vs. No Drought
  misc_feature: MA Experiment ID: 20000440 Result: Up-regulated in Transcription
  misc_feature: MA Experiment 20000440 PARAMETER Experiment Name: At_Closed-Flower__Sub_P Parameter: Tissue Value: Closed Flower vs. Whole Plant
  misc_feature: MA Experiment ID: 20001554 Result: Down-regulated in Transcription
  misc_feature: MA Experiment 20001554 PARAMETER Experiment Name: At_Drought_Soil_Dry_P Parameter: Age (day) Value: 21
  misc_feature: MA Experiment 20001554 PARAMETER Experiment Name: At_Drought_Soil_Dry_P Parameter: Organism Value: A. thaliana
  misc_feature: MA Experiment 20001554 PARAMETER Experiment Name: At_Drought_Soil_Dry_P Parameter: Plant Line Value: WS
  misc_feature: MA Experiment 20001554 PARAMETER Experiment Name: At_Drought_Soil_Dry_P Parameter: Post Timepoint (hr) Value: None
  misc_feature: MA Experiment 20001554 PARAMETER Experiment Name: At_Drought_Soil_Dry_P Parameter: Post-Treatment Value: None
  misc_feature: MA Experiment 20001554 PARAMETER Experiment Name: At_Drought_Soil_Dry_P Parameter: Timepoint (day) Value: 7
  misc_feature: MA Experiment 20001554 PARAMETER Experiment Name: At_Drought_Soil_Dry_P Parameter: Treatment Value: Drought vs. No Drought
  misc_feature: MA Experiment ID: 20001555 Result: Down-regulated in Transcription
  misc_feature: MA Experiment 20001555 PARAMETER Experiment Name: At_Drought_Soil_Dry_P Parameter: Age (day) Value: 24
  misc_feature: MA Experiment 20001555 PARAMETER Experiment Name: At_Drought_Soil_Dry_P Parameter: Organism Value: A. thaliana
  misc_feature: MA Experiment 20001555 PARAMETER Experiment Name: At_Drought_Soil_Dry_P Parameter: Plant Line Value: WS
  misc_feature: MA Experiment 20001555 PARAMETER Experiment Name: At_Drought_Soil_Dry_P Parameter: Post Timepoint (hr) Value: None
  misc_feature: MA Experiment 20001555 PARAMETER Experiment Name: At_Drought_Soil_Dry_P Parameter: Post-Treatment Value: None
  misc_feature: MA Experiment 20001555 PARAMETER Experiment Name: At_Drought_Soil_Dry_P Parameter: Timepoint (day) Value: 10
  misc_feature: MA Experiment 20001555 PARAMETER Experiment Name: At_Drought_Soil_Dry_P Parameter: Treatment Value: Drought vs. No Drought
  misc_feature: MA Experiment ID: 20001557 Result: Up-regulated in Transcription
  misc_feature: MA Experiment 20001557 PARAMETER Experiment Name: At_Drought_Soil_Dry_P Parameter: Age (day) Value: 27
  misc_feature: MA Experiment 20001557 PARAMETER Experiment Name: At_Drought_Soil_Dry_P Parameter: Organism Value: A. thaliana
  misc_feature: MA Experiment 20001557 PARAMETER Experiment Name: At_Drought_Soil_Dry_P Parameter: Plant Line Value: WS
  misc_feature: MA Experiment 20001557 PARAMETER Experiment Name: At_Drought_Soil_Dry_P Parameter: Post Timepoint (hr) Value: 3
  misc_feature: MA Experiment 20001557 PARAMETER Experiment Name: At_Drought_Soil_Dry_P Parameter: Post-Treatment Value: Re-Water vs. No Drought
  misc_feature: MA Experiment 20001557 PARAMETER Experiment Name: At_Drought_Soil_Dry_P Parameter: Timepoint (day) Value: 13
  misc_feature: MA Experiment 20001557 PARAMETER Experiment Name: At_Drought_Soil_Dry_P Parameter: Treatment Value: Drought vs. No Drought
  misc_feature: MA Experiment ID: 20001558 Result: Up-regulated in Transcription
  misc_feature: MA Experiment 20001558 PARAMETER Experiment Name: At_Drought_Soil_Dry_P Parameter: Age (day) Value: 27
  misc_feature: MA Experiment 20001558 PARAMETER Experiment Name: At_Drought_Soil_Dry_P Parameter: Organism Value: A. thaliana
  misc_feature: MA Experiment 20001558 PARAMETER Experiment Name: At_Drought_Soil_Dry_P Parameter: Plant Line Value: WS
  misc_feature: MA Experiment 20001558 PARAMETER Experiment Name: At_Drought_Soil_Dry_P Parameter: Post Timepoint (hr) Value: 6
  misc_feature: MA Experiment 20001558 PARAMETER Experiment Name: At_Drought_Soil_Dry_P Parameter: Post-Treatment Value: Re-Water vs. No Drought
  misc_feature: MA Experiment 20001558 PARAMETER Experiment Name: At_Drought_Soil_Dry_P Parameter: Timepoint (day) Value: 13
  misc_feature: MA Experiment 20001558 PARAMETER Experiment Name: At_Drought_Soil_Dry_P Parameter: Treatment Value: Drought vs. No Drought
  misc_feature: MA Experiment ID: 20001757 Result: Up-regulated in Transcription
  misc_feature: MA Experiment 20001757 PARAMETER Experiment Name: At_50mM_NH4NO3_L-to-H_P Parameter: Timepoint (hr) Value: 6
  misc_feature: MA Experiment 20001757 PARAMETER Experiment Name: At_50mM_NH4NO3_L-to-H_P Parameter: Tissue Value: Leaf
  misc_feature: MA Experiment 20001757 PARAMETER Experiment Name: At_50mM_NH4NO3_L-to-H_P Parameter: Treatment Value: 50mM NH4NO3 vs 100mM Mannitol
  misc_feature: MA Experiment ID: 20001807 Result: Up-regulated in Transcription
  misc_feature: MA Experiment 20001807 PARAMETER Experiment Name: At_50mM_NH4NO3_L-to-H_Sub_P Parameter: Timepoint (hr) Value: 6
  misc_feature: MA Experiment 20001807 PARAMETER Experiment Name: At_50mM_NH4NO3_L-to-H_Sub_P Parameter: Tissue Value: Leaf
  misc_feature: MA Experiment 20001807 PARAMETER Experiment Name: At_50mM_NH4NO3_L-to-H_Sub_P Parameter: Treatment Value: 50mM NH4NO3 vs 100mM Mannitol
  misc_feature: MA Experiment ID: 20001904 Result: Down-regulated in Transcription
  misc_feature: MA Experiment 20001904 PARAMETER Experiment Name: At_Drought_Reproduction_P Parameter: Age (day) Value: 37
  misc_feature: MA Experiment 20001904 PARAMETER Experiment Name: At_Drought_Reproduction_P Parameter: Organism Value: A. thaliana
  misc_feature: MA Experiment 20001904 PARAMETER Experiment Name: At_Drought_Reproduction_P Parameter: Plant Line Value: WS
  misc_feature: MA Experiment 20001904 PARAMETER Experiment Name: At_Drought_Reproduction_P Parameter: Timepoint (day) Value: 7
  misc_feature: MA Experiment 20001904 PARAMETER Experiment Name: At_Drought_Reproduction_P Parameter: Tissue Value: Rosettes
  misc_feature: MA Experiment 20001904 PARAMETER Experiment Name: At_Drought_Reproduction_P Parameter: Treatment Value: Drought vs. No Drought
  misc_feature: MA Experiment ID: 20001906 Result: Down-regulated in Transcription
  misc_feature: MA Experiment 20001906 PARAMETER Experiment Name: At_Drought_Reproduction_P Parameter: Age (day) Value: 35
  misc_feature: MA Experiment 20001906 PARAMETER Experiment Name: At_Drought_Reproduction_P Parameter: Organism Value: A. thaliana
  misc_feature: MA Experiment 20001906 PARAMETER Experiment Name: At_Drought_Reproduction_P Parameter: Plant Line Value: WS
  misc_feature: MA Experiment 20001906 PARAMETER Experiment Name: At_Drought_Reproduction_P Parameter: Timepoint (day) Value: 5
  misc_feature: MA Experiment 20001906 PARAMETER Experiment Name: At_Drought_Reproduction_P Parameter: Tissue Value: Siliques
  misc_feature: MA Experiment 20001906 PARAMETER Experiment Name: At_Drought_Reproduction_P Parameter: Treatment Value: Drought vs. No Drought
  misc_feature: MA Experiment ID: 20001908 Result: Down-regulated in Transcription
  misc_feature: MA Experiment 20001908 PARAMETER Experiment Name: At_Drought_Reproduction_P Parameter: Age (day) Value: 40
  misc_feature: MA Experiment 20001908 PARAMETER Experiment Name: At_Drought_Reproduction_P Parameter: Organism Value: A. thaliana
  misc_feature: MA Experiment 20001908 PARAMETER Experiment Name: At_Drought_Reproduction_P Parameter: Plant Line Value: WS
  misc_feature: MA Experiment 20001908 PARAMETER Experiment Name: At_Drought_Reproduction_P Parameter: Timepoint (day) Value: 10
  misc_feature: MA Experiment 20001908 PARAMETER Experiment Name: At_Drought_Reproduction_P Parameter: Tissue Value: Siliques
  misc_feature: MA Experiment 20001908 PARAMETER Experiment Name: At_Drought_Reproduction_P Parameter: Treatment Value: Drought vs. No Drought
  misc_feature: MA Experiment ID: 20001911 Result: Down-regulated in Transcription
  misc_feature: MA Experiment 20001911 PARAMETER Experiment Name: At_Drought_Reproduction_P Parameter: Age (day) Value: 40
  misc_feature: MA Experiment 20001911 PARAMETER Experiment Name: At_Drought_Reproduction_P Parameter: Organism Value: A. thaliana
  misc_feature: MA Experiment 20001911 PARAMETER Experiment Name: At_Drought_Reproduction_P Parameter: Plant Line Value: WS
  misc_feature: MA Experiment 20001911 PARAMETER Experiment Name: At_Drought_Reproduction_P Parameter: Timepoint (day) Value: 10
  misc_feature: MA Experiment 20001911 PARAMETER Experiment Name: At_Drought_Reproduction_P Parameter: Tissue Value: Flowers
  misc_feature: MA Experiment 20001911 PARAMETER Experiment Name: At_Drought_Reproduction_P Parameter: Treatment Value: Drought vs. No Drought
actcgccactttcctcgagaaaacgaaaaaaaaagatggtaggaagaagaaaagctttactcttttctctctgtttcttcttcctctctcttccttccttctcttcccttccatccttccaaaccctattccccaattctcattcccttccttgtgcttctcccgtctcattccaacccgactccgactccgagtcactgctagaatccgaatttgaatccggatccgactccgagtcttcttcttccattactctaaacctcgaccacatcgatgctctctcctccaacaaaacacccgacgagctattcagctcccgtctccaacgtgactcccggcgcgtgaaatctatcgccacactcgccgctcaaatccccggaagaaacgtgactcacgcgccacgacccggtggattcagcagctcagtcgtctctggtctctctcaaggaagcggtgaatacttcacgcgcctcggtgtcggcactccggcgagatatgtttacatggtgctcgacaccggcagcgacatcgtctggctacaatgcgctccttgtcggagatgctactctcaatccgacccgatattcgacccgagaaaatccaagacctatgccacaatcccctgttcttcacctcactgccgccgattagactccgccggatgcaacacccgtcgtaagacttgtctctaccaagtctcttacggagatggttctttcaccgtcggcgatttctccaccgaaacgctaactttccggcgaaatcgcgttaaaggcgttgctctcggatgtggccacgacaacgaaggtctcttcgtcggagccgccggtttattaggactcggtaaaggtaaattatcgttccccggtcaaaccggtcaccggtttaatcagaaattctcttactgtttagtcgacagatccgcttcttcgaaaccttcctcggtcgtcttcggaaacgccgccgtatcacgaatcgcgagattcacgccacttttgtcaaacccaaaactcgacactttctactacgtcgggcttctgggaattagcgtcggagggacacgtgtccccggcgtaacggcttctctttttaaacttgaccagatcggtaacggtggagttattatcgattcgggtacgtctgtgacccggttgatccgaccagcttatattgctatgagagacgcgttccgggtcggagctaagacattgaaaagagctccggatttctcactcttcgacacgtgtttcgatctctccaatatgaacgaggttaaagtaccgacggtggttttacatttccgtggagctgacgtatcacttccggcgacgaattacctgatccctgtggataccaacggcaagttctgttttgcgtttgccggtacgatgggcggactatccataattgggaatatccagcaacagggtttccgggttgtatacgacttagcgagttcccgggtcgggtttgctccaggaggatgcgcttaataattagatctgaccggagccggtacggataatgtacttttgttttctcaatttaatgcttagacttgttttttttttttttataaatcggacaagtgaatctttaagcggtggagttgaatacgtgttgataaaatcttcacgtgttgtcggctgtattattagtatcgtctttattttacatctcggaccaaagagagcgtgtatgattttct

SEQ ID NO: 97667 - protein, 496 aa, Arabidopsis thaliana
  peptide (1)..(496): Ceres Seq. ID no. 13490418
  misc_feature (102)..(490): Pfam Name: Eukaryotic aspartyl protease Pfam Description: Eukaryotic aspartyl protease
  misc_feature (12)..(496): Homolog of NCBI NO: 15223368 NR Description: chloroplast nucleoid DNA binding protein -related
  misc_feature (12)..(496): Homolog of NCBI NO: 21594980 NR Description: chloroplast nucleoid DNA binding protein,
  misc_feature (17)..(495): Homolog of NCBI NO: 15228618 NR Description: expressed protein [Arabidopsis thaliana]
  misc_feature (52)..(495): Homolog of NCBI NO: 15290061 NR Description: nucleoid DNA-binding protein cnd41-like protein
  misc_feature (21)..(495): Homolog of NCBI NO: 15222611 NR Description: expressed protein [Arabidopsis thaliana]
  misc_feature (60)..(495): Homolog of NCBI NO: 15229656 NR Description: chloroplast nucleoid DNA-binding protein -related thaliana] >gi|11994113|dbj|BAB01116.1| CND41, chloroplast
  misc_feature (60)..(495): Homolog of NCBI NO: 19424106 NR Description: putative chloroplast nucleoid DNA-binding protein
  misc_feature (102)..(495): Homolog of NCBI NO: 34895664 NR Description: nucleoid DNA-binding protein cnd41-like protein
  misc_feature (19)..(495): Homolog of NCBI NO: 28392860 NR Description: unknown protein [Arabidopsis thaliana]
  misc_feature (17)..(346): Homolog of NCBI NO: 14532550 NR Description: AT3g61820/F15G16_210 [Arabidopsis thaliana]
SPLSSRKRKKKMVGRRKALLFSLCFFFLSLPSFSSLPSFQTLFPNSHSLPCASPVSFQPDSDSESLLESEFESGSDSESSSSITLNLDHIDALSSNKTPDELFSSRLQRDSRRVKSIATLAAQIPGRNVTHAPRPGGFSSSVVSGLSQGSGEYFTRLGVGTPARYVYMVLDTGSDIVWLQCAPCRRCYSQSDPIFDPRKSKTYATIPCSSPHCRRLDSAGCNTRRKTCLYQVSYGDGSFTVGDFSTETLTFRRNRVKGVALGCGHDNEGLFVGAAGLLGLGKGKLSFPGQTGHRFNQKFSYCLVDRSASSKPSSVVFGNAAVSRIARFTPLLSNPKLDTFYYVGLLGISVGGTRVPGVTASLFKLDQIGNGGVIIDSGTSVTRLIRPAYIAMRDAFRVGAKTLKRAPDFSLFDTCFDLSNMNEVKVPTVVLHFRGADVSLPATNYLIPVDTNGKFCFAFAGTMGGLSIIGNIQQQGFRVVYDLASSRVGFAPGGCA

SEQ ID NO: 97668 - protein, 485 aa, Arabidopsis thaliana
  peptide (1)..(485): Ceres Seq. ID no. 13490419
  misc_feature (91)..(479): Pfam Name: Eukaryotic aspartyl protease Pfam Description: Eukaryotic aspartyl protease
  misc_feature (1)..(485): Homolog of NCBI NO: 15223368 NR Description: chloroplast nucleoid DNA binding protein -related
  misc_feature (1)..(485): Homolog of NCBI NO: 21594980 NR Description: chloroplast nucleoid DNA binding protein,
  misc_feature (6)..(484): Homolog of NCBI NO: 15228618 NR Description: expressed protein [Arabidopsis thaliana]
  misc_feature (41)..(484): Homolog of NCBI NO: 15290061 NR Description: nucleoid DNA-binding protein cnd41-like protein
  misc_feature (10)..(484): Homolog of NCBI NO: 15222611 NR Description: expressed protein [Arabidopsis thaliana]
  misc_feature (49)..(484): Homolog of NCBI NO: 15229656 NR Description: chloroplast nucleoid DNA-binding protein -related thaliana] >gi|11994113|dbj|BAB01116.1| CND41, chloroplast
  misc_feature (49)..(484): Homolog of NCBI NO: 19424106 NR Description: putative chloroplast nucleoid DNA-binding protein
  misc_feature (91)..(484): Homolog of NCBI NO: 34895664 NR Description: nucleoid DNA-binding protein cnd41-like protein
  misc_feature (8)..(484): Homolog of NCBI NO: 28392860 NR Description: unknown protein [Arabidopsis thaliana]
  misc_feature (6)..(335): Homolog of NCBI NO: 14532550 NR Description: AT3g61820/F15G16_210 [Arabidopsis thaliana]
MVGRRKALLFSLCFFFLSLPSFSSLPSFQTLFPNSHSLPCASPVSFQPDSDSESLLESEFESGSDSESSSSITLNLDHIDALSSNKTPDELFSSRLQRDSRRVKSIATLAAQIPGRNVTHAPRPGGFSSSVVSGLSQGSGEYFTRLGVGTPARYVYMVLDTGSDIVWLQCAPCRRCYSQSDPIFDPRKSKTYATIPCSSPHCRRLDSAGCNTRRKTCLYQVSYGDGSFTVGDFSTETLTFRRNRVKGVALGCGHDNEGLFVGAAGLLGLGKGKLSFPGQTGHRFNQKFSYCLVDRSASSKPSSVVFGNAAVSRIARFTPLLSNPKLDTFYYVGLLGISVGGTRVPGVTASLFKLDQIGNGGVIIDSGTSVTRLIRPAYIAMRDAFRVGAKTLKRAPDFSLFDTCFDLSNMNEVKVPTVVLHFRGADVSLPATNYLIPVDTNGKFCFAFAGTMGGLSIIGNIQQQGFRVVYDLASSRVGFAPGGCA

SEQ ID NO: 97669 - protein, 329 aa, Arabidopsis thaliana
  peptide (1)..(329): Ceres Seq. ID no. 13490420
  misc_feature (1)..(323): Pfam Name: Eukaryotic aspartyl protease Pfam Description: Eukaryotic aspartyl protease
  misc_feature (1)..(329): Homolog of NCBI NO: 15223368 NR Description: chloroplast nucleoid DNA binding protein -related
  misc_feature (1)..(329): Homolog of NCBI NO: 21594980 NR Description: chloroplast nucleoid DNA binding protein,
  misc_feature (1)..(328): Homolog of NCBI NO: 15228618 NR Description: expressed protein [Arabidopsis thaliana]
  misc_feature (1)..(328): Homolog of NCBI NO: 15290061 NR Description: nucleoid DNA-binding protein cnd41-like protein
  misc_feature (1)..(328): Homolog of NCBI NO: 15222611 NR Description: expressed protein [Arabidopsis thaliana]
  misc_feature (1)..(328): Homolog of NCBI NO: 15229656 NR Description: chloroplast nucleoid DNA-binding protein -related thaliana] >gi|11994113|dbj|BAB01116.1| CND41, chloroplast
  misc_feature (1)..(328): Homolog of NCBI NO: 19424106 NR Description: putative chloroplast nucleoid DNA-binding protein
  misc_feature (1)..(328): Homolog of NCBI NO: 34895664 NR Description: nucleoid DNA-binding protein cnd41-like protein
  misc_feature (1)..(328): Homolog of NCBI NO: 28392860 NR Description: unknown protein [Arabidopsis thaliana]
  misc_feature (1)..(179): Homolog of NCBI NO: 14532550 NR Description: AT3g61820/F15G16_210 [Arabidopsis thaliana]
MVLDTGSDIVWLQCAPCRRCYSQSDPIFDPRKSKTYATIPCSSPHCRRLDSAGCNTRRKTCLYQVSYGDGSFTVGDFSTETLTFRRNRVKGVALGCGHDNEGLFVGAAGLLGLGKGKLSFPGQTGHRFNQKFSYCLVDRSASSKPSSVVFGNAAVSRIARFTPLLSNPKLDTFYYVGLLGISVGGTRVPGVTASLFKLDQIGNGGVIIDSGTSVTRLIRPAYIAMRDAFRVGAKTLKRAPDFSLFDTCFDLSNMNEVKVPTVVLHFRGADVSLPATNYLIPVDTNGKFCFAFAGTMGGLSIIGNIQQQGFRVVYDLASSRVGFAPGGCA

SEQ ID NO: 97670 - DNA, 1225 bp, Arabidopsis thaliana
  misc_feature (1)..(1225): Ceres Seq. ID no. 13490440
  misc_feature: MA Experiment ID: 108434 Result: Down-regulated in Transcription
  misc_feature: MA Experiment 108434 PARAMETER Experiment Name: At_Root_Tips_cDNA_P Parameter: Tissue Value: Root Tips
  misc_feature: MA Experiment ID: 108462 Result: Up-regulated in Transcription
  misc_feature: MA Experiment 108462 PARAMETER Experiment Name: At_Germinating_Seeds_cDNA_P Parameter: Age (day) Value: 2 vs. 0
  misc_feature: MA Experiment 108462 PARAMETER Experiment Name: At_Germinating_Seeds_cDNA_P Parameter: Tissue Value: Germinating Seeds
  misc_feature: MA Experiment ID: 108463 Result: Up-regulated in Transcription
  misc_feature: MA Experiment 108463 PARAMETER Experiment Name: At_Germinating_Seeds_cDNA_P Parameter: Age (day) Value: 3 vs. 0
  misc_feature: MA Experiment 108463 PARAMETER Experiment Name: At_Germinating_Seeds_cDNA_P Parameter: Tissue Value: Germinating Seeds
  misc_feature: MA Experiment ID: 108464 Result: Up-regulated in Transcription
  misc_feature: MA Experiment 108464 PARAMETER Experiment Name: At_Germinating_Seeds_cDNA_P Parameter: Age (day) Value: 4 vs. 0
  misc_feature: MA Experiment 108464 PARAMETER Experiment Name: At_Germinating_Seeds_cDNA_P Parameter: Tissue Value: Germinating Seeds
  misc_feature: MA Experiment ID: 108569 Result: Up-regulated in Transcription
  misc_feature: MA Experiment 108569 PARAMETER Experiment Name: At_0.001%_MeJA__cDNA_P Parameter: Timepoint (hr) Value: 6
  misc_feature: MA Experiment 108569 PARAMETER Experiment Name: At_0.001%_MeJA__cDNA_P Parameter: Tissue Value: Aerial
  misc_feature: MA Experiment 108569 PARAMETER Experiment Name: At_0.001%_MeJA__cDNA_P Parameter: Treatment Value: 0.001% MeJA vs. No Treatment
  misc_feature: MA Experiment ID: 108573 Result: Up-regulated in Transcription
  misc_feature: MA Experiment 108573 PARAMETER Experiment Name: At_Drought_cDNA_P Parameter: Timepoint (hr) Value: 6
  misc_feature: MA Experiment 108573 PARAMETER Experiment Name: At_Drought_cDNA_P Parameter: Tissue Value: Aerial
  misc_feature: MA Experiment 108573 PARAMETER Experiment Name: At_Drought_cDNA_P Parameter: Treatment Value: Drought vs. No Drought
  misc_feature: MA Experiment ID: 108577 Result: Up-regulated in Transcription
  misc_feature: MA Experiment 108577 PARAMETER Experiment Name: At_42deg_Heat_cDNA_P Parameter: Temperature (deg C) Value: 42 vs. 22
  misc_feature: MA Experiment 108577 PARAMETER Experiment Name: At_42deg_Heat_cDNA_P Parameter: Timepoint (hr) Value: 6
  misc_feature: MA Experiment 108577 PARAMETER Experiment Name: At_42deg_Heat_cDNA_P Parameter: Tissue Value: Aerial
  misc_feature: MA Experiment ID: 108594 Result: Down-regulated in Transcription
  misc_feature: MA Experiment 108594 PARAMETER Experiment Name: At_Ler-rhl_Root_cDNA_P Parameter: Plant Line Value: null
  misc_feature: MA Experiment ID: 108595 Result: Down-regulated in Transcription
  misc_feature: MA Experiment 108595 PARAMETER Experiment Name: At_Ler-pi_Ovule_cDNA_P Parameter: Plant Line Value: null
  misc_feature: MA Experiment ID: 108605 Result: Up-regulated in Transcription
  misc_feature: MA Experiment 108605 PARAMETER Experiment Name: At_100uM_ABA_cDNA_P Parameter: Timepoint (hr) Value: 6
  misc_feature: MA Experiment 108605 PARAMETER Experiment Name: At_100uM_ABA_cDNA_P Parameter: Tissue Value: Aerial
  misc_feature: MA Experiment 108605 PARAMETER Experiment Name: At_100uM_ABA_cDNA_P Parameter: Treatment Value: 100uM ABA vs. No Treatment
  misc_feature: MA Experiment ID: 108668 Result: Up-regulated in Transcription
  misc_feature: MA Experiment 108668 PARAMETER Experiment Name: At_2mM_SA_cDNA_P Parameter: Plant Line Value: WS
  misc_feature: MA Experiment 108668 PARAMETER Experiment Name: At_2mM_SA_cDNA_P Parameter: Timepoint (hr) Value: 6
  misc_feature: MA Experiment 108668 PARAMETER Experiment Name: At_2mM_SA_cDNA_P Parameter: Treatment Value: 2mM SA vs. No Treatment
  misc_feature: MA Experiment ID: 20000089 Result: Down-regulated in Transcription
  misc_feature: MA Experiment ID: 20000090 Result: Down-regulated in Transcription
  misc_feature: MA Experiment ID: 20000113 Result: Up-regulated in Transcription
  misc_feature: MA Experiment 20000113 PARAMETER Experiment Name: At_42deg_Heat_cDNA_P Parameter: Temperature (deg C) Value: 42 vs. 22
  misc_feature: MA Experiment 20000113 PARAMETER Experiment Name: At_42deg_Heat_cDNA_P Parameter: Timepoint (hr) Value: 8
  misc_feature: MA Experiment 20000113 PARAMETER Experiment Name: At_42deg_Heat_cDNA_P Parameter: Tissue Value: Aerial
  misc_feature: MA Experiment ID: 20000169 Result: Up-regulated in Transcription
  misc_feature: MA Experiment 20000169 PARAMETER Experiment Name: At_100uM_ABA_P Parameter: Age (day) Value: 14
  misc_feature: MA Experiment 20000169 PARAMETER Experiment Name: At_100uM_ABA_P Parameter: Organism Value: A. thaliana
  misc_feature: MA Experiment 20000169 PARAMETER Experiment Name: At_100uM_ABA_P Parameter: Plant Line Value: WS
  misc_feature: MA Experiment 20000169 PARAMETER Experiment Name: At_100uM_ABA_P Parameter: Timepoint (hr) Value: 6
  misc_feature: MA Experiment 20000169 PARAMETER Experiment Name: At_100uM_ABA_P Parameter: Tissue Value: Aerial
  misc_feature: MA Experiment 20000169 PARAMETER Experiment Name: At_100uM_ABA_P Parameter: Treatment Value: 100uM ABA vs. No Treatment
  misc_feature: MA Experiment ID: 20000180 Result: Up-regulated in Transcription
  misc_feature: MA Experiment 20000180 PARAMETER Experiment Name: At_Germinating_Seeds_P Parameter: Age (hr) Value: 24 vs. 0
  misc_feature: MA Experiment 20000180 PARAMETER Experiment Name: At_Germinating_Seeds_P Parameter: Tissue Value: Germinating Seeds
  misc_feature: MA Experiment ID: 20000182 Result: Up-regulated in Transcription
  misc_feature: MA Experiment 20000182 PARAMETER Experiment Name: At_2mM_SA_P Parameter: Age (day) Value: 14
  misc_feature: MA Experiment 20000182 PARAMETER Experiment Name: At_2mM_SA_P Parameter: Organism Value: A. thaliana
  misc_feature: MA Experiment 20000182 PARAMETER Experiment Name: At_2mM_SA_P Parameter: Plant Line Value: WS
  misc_feature: MA Experiment 20000182 PARAMETER Experiment Name: At_2mM_SA_P Parameter: Timepoint (hr) Value: 6
  misc_feature: MA Experiment 20000182 PARAMETER Experiment Name: At_2mM_SA_P Parameter: Tissue Value: Aerial
  misc_feature: MA Experiment 20000182 PARAMETER Experiment Name: At_2mM_SA_P Parameter: Treatment Value: 2mM SA vs. No Treatment
  misc_feature: MA Experiment ID: 20000234 Result: Down-regulated in Transcription
  misc_feature: MA Experiment 20000234 PARAMETER Experiment Name: At_Siliques_P Parameter: Age (day) Value: 21
  misc_feature: MA Experiment 20000234 PARAMETER Experiment Name: At_Siliques_P Parameter: Organism Value: A. thaliana
  misc_feature: MA Experiment 20000234 PARAMETER Experiment Name: At_Siliques_P Parameter: Plant Line Value: WS
  misc_feature: MA Experiment 20000234 PARAMETER Experiment Name: At_Siliques_P Parameter: Tissue Value: Less Than 5mm Siliques vs. Whole Plant
  misc_feature: MA Experiment ID: 20000451 Result: Down-regulated in Transcription
  misc_feature: MA Experiment 20000451 PARAMETER Experiment Name: At_CS6879_Shoots-Roots_P Parameter: Age (day) Value: 14
  misc_feature: MA Experiment 20000451 PARAMETER Experiment Name: At_CS6879_Shoots-Roots_P Parameter: Organism Value: A. thaliana
  misc_feature: MA Experiment 20000451 PARAMETER Experiment Name: At_CS6879_Shoots-Roots_P Parameter: Plant Line Value: CS6879 vs. WS
  misc_feature: MA Experiment 20000451 PARAMETER Experiment Name: At_CS6879_Shoots-Roots_P Parameter: Tissue Value: Roots
  misc_feature: MA Experiment ID: 20000506 Result: Up-regulated in Transcription
  misc_feature: MA Experiment 20000506 PARAMETER Experiment Name: At_Wounding_P Parameter: Organism Value: A. thaliana
  misc_feature: MA Experiment 20000506 PARAMETER Experiment Name: At_Wounding_P Parameter: Plant Line Value: WS
  misc_feature: MA Experiment 20000506 PARAMETER Experiment Name: At_Wounding_P Parameter: Timepoint (hr) Value: 6
  misc_feature: MA Experiment 20000506 PARAMETER Experiment Name: At_Wounding_P Parameter: Tissue Value: Aerial
  misc_feature: MA Experiment 20000506 PARAMETER Experiment Name: At_Wounding_P Parameter: Treatment Value: Wounding vs. No Wounding
  misc_feature: MA Experiment ID: 20001247 Result: Up-regulated in Transcription
  misc_feature: MA Experiment 20001247 PARAMETER Experiment Name: At_Far-red-induction_P Parameter: Age (day) Value: 7
  misc_feature: MA Experiment 20001247 PARAMETER Experiment Name: At_Far-red-induction_P Parameter: Light Value: Far-red vs. White
  misc_feature: MA Experiment 20001247 PARAMETER Experiment Name: At_Far-red-induction_P Parameter: Organism Value: A. thaliana
  misc_feature: MA Experiment 20001247 PARAMETER Experiment Name: At_Far-red-induction_P Parameter: Plant Line Value: Columbia
  misc_feature: MA Experiment 20001247 PARAMETER Experiment Name: At_Far-red-induction_P Parameter: Timepoint (hr) Value: 1
  misc_feature: MA Experiment 20001247 PARAMETER Experiment Name: At_Far-red-induction_P Parameter: Tissue Value: Whole Plant
  misc_feature: MA Experiment ID: 20001450 Result: Up-regulated in Transcription
  misc_feature: MA Experiment 20001450 PARAMETER Experiment Name: At_Far-red-induction_P Parameter: Age (day) Value: 7
  misc_feature: MA Experiment 20001450 PARAMETER Experiment Name: At_Far-red-induction_P Parameter: Light Value: Far-red vs. White
  misc_feature: MA Experiment 20001450 PARAMETER Experiment Name: At_Far-red-induction_P Parameter: Organism Value: A. thaliana
  misc_feature: MA Experiment 20001450 PARAMETER Experiment Name: At_Far-red-induction_P Parameter: Plant Line Value: Columbia
  misc_feature: MA Experiment 20001450 PARAMETER Experiment Name: At_Far-red-induction_P Parameter: Timepoint (hr) Value: 8
  misc_feature: MA Experiment 20001450 PARAMETER Experiment Name: At_Far-red-induction_P Parameter: Tissue Value: Whole Plant
  misc_feature: MA Experiment ID: 20001556 Result: Down-regulated in Transcription
  misc_feature: MA Experiment 20001556 PARAMETER Experiment Name: At_Drought_Soil_Dry_P Parameter: Age (day) Value: 26
  misc_feature: MA Experiment 20001556 PARAMETER Experiment Name: At_Drought_Soil_Dry_P Parameter: Organism Value: A. thaliana
  misc_feature: MA Experiment 20001556 PARAMETER Experiment Name: At_Drought_Soil_Dry_P Parameter: Plant Line Value: WS
  misc_feature: MA Experiment 20001556 PARAMETER Experiment Name: At_Drought_Soil_Dry_P Parameter: Post Timepoint (hr) Value: None
  misc_feature: MA Experiment 20001556 PARAMETER Experiment Name: At_Drought_Soil_Dry_P Parameter: Post-Treatment Value: None
  misc_feature: MA Experiment 20001556 PARAMETER Experiment Name: At_Drought_Soil_Dry_P Parameter: Timepoint (day) Value: 12
  misc_feature: MA Experiment 20001556 PARAMETER Experiment Name: At_Drought_Soil_Dry_P Parameter: Treatment Value: Drought vs. No Drought
  misc_feature: MA Experiment ID: 20001559 Result: Down-regulated in Transcription
  misc_feature: MA Experiment 20001559 PARAMETER Experiment Name: At_Drought_Soil_Dry_P Parameter: Age (day) Value: 28
  misc_feature: MA Experiment 20001559 PARAMETER Experiment Name: At_Drought_Soil_Dry_P Parameter: Organism Value: A. thaliana
  misc_feature: MA Experiment 20001559 PARAMETER Experiment Name: At_Drought_Soil_Dry_P Parameter: Plant Line Value: WS
  misc_feature: MA Experiment 20001559 PARAMETER Experiment Name: At_Drought_Soil_Dry_P Parameter: Post Timepoint (hr) Value: 29
  misc_feature: MA Experiment 20001559 PARAMETER Experiment Name: At_Drought_Soil_Dry_P Parameter: Post-Treatment Value: Re-Water vs. No Drought
  misc_feature: MA Experiment 20001559 PARAMETER Experiment Name: At_Drought_Soil_Dry_P Parameter: Timepoint (day) Value: 14
  misc_feature: MA Experiment 20001559 PARAMETER Experiment Name: At_Drought_Soil_Dry_P Parameter: Treatment Value: Drought vs. No Drought
  misc_feature: MA Experiment ID: 20001905 Result: Down-regulated in Transcription
  misc_feature: MA Experiment 20001905 PARAMETER Experiment Name: At_Drought_Reproduction_P Parameter: Age (day) Value: 40
  misc_feature: MA Experiment 20001905 PARAMETER Experiment Name: At_Drought_Reproduction_P Parameter: Organism Value: A. thaliana
  misc_feature: MA Experiment 20001905 PARAMETER Experiment Name: At_Drought_Reproduction_P Parameter: Plant Line Value: WS
  misc_feature: MA Experiment 20001905 PARAMETER Experiment Name: At_Drought_Reproduction_P Parameter: Timepoint (day) Value: 10
  misc_feature: MA Experiment 20001905 PARAMETER Experiment Name: At_Drought_Reproduction_P Parameter: Tissue Value: Rosettes
  misc_feature: MA Experiment 20001905 PARAMETER Experiment Name: At_Drought_Reproduction_P Parameter: Treatment Value: Drought vs. No Drought
  misc_feature: MA Experiment ID: 20001907 Result: Down-regulated in Transcription
  misc_feature: MA Experiment 20001907 PARAMETER Experiment Name: At_Drought_Reproduction_P Parameter: Age (day) Value: 37
  misc_feature: MA Experiment 20001907 PARAMETER Experiment Name: At_Drought_Reproduction_P Parameter: Organism Value: A. thaliana
  misc_feature: MA Experiment 20001907 PARAMETER Experiment Name: At_Drought_Reproduction_P Parameter: Plant Line Value: WS
  misc_feature: MA Experiment 20001907 PARAMETER Experiment Name: At_Drought_Reproduction_P Parameter: Timepoint (day) Value: 7
  misc_feature: MA Experiment 20001907 PARAMETER Experiment Name: At_Drought_Reproduction_P Parameter: Tissue Value: Siliques
  misc_feature: MA Experiment 20001907 PARAMETER Experiment Name: At_Drought_Reproduction_P Parameter: Treatment Value: Drought vs. No Drought
  misc_feature: MA Experiment ID: 20001908 Result: Down-regulated in Transcription
  misc_feature: MA Experiment 20001908 PARAMETER Experiment Name: At_Drought_Reproduction_P Parameter: Age (day) Value: 40
  misc_feature: MA Experiment 20001908 PARAMETER Experiment Name: At_Drought_Reproduction_P Parameter: Organism Value: A. thaliana
  misc_feature: MA Experiment 20001908 PARAMETER Experiment Name: At_Drought_Reproduction_P Parameter: Plant Line Value: WS
  misc_feature: MA Experiment 20001908 PARAMETER Experiment Name: At_Drought_Reproduction_P Parameter: Timepoint (day) Value: 10
  misc_feature: MA Experiment 20001908 PARAMETER Experiment Name: At_Drought_Reproduction_P Parameter: Tissue Value: Siliques
  misc_feature: MA Experiment 20001908 PARAMETER Experiment Name: At_Drought_Reproduction_P Parameter: Treatment Value: Drought vs. No Drought
agaaaacattactgataaaactacaaaaatagctggaatggagcattcaaaactctgtccaaagtccaaacggttaaattatcactgacccaatccaataattagatttatttaagaagaagaagaagaaaaaaaacagagctttacaatttctctctacagagatcgaagatatggaaggcaaggaagaagacgttagagttggagctaacaagttcccggagagacaaccaatcggaacatcagctcagagtgacaaggactacaaggaaccaccaccagctccgtttttcgaacctggtgagctttcttcatggtctttttggagagctgggatcgctgagttcatcgctacttttctctttctctacatcactgtcttgactgttatgggagtgaaaaggtcaccgaacatgtgtgcttccgtcggaatccaaggaatcgcttgggctttcggtggtatgatatttgccttagtctactgtaccgctggtatctccggtggacacatcaacccagcggttacttttggtctgttcttagcccggaagctgtcgcttactagagctctgtactacatagtgatgcagtgcttgggagctatctgtggtgctggagtggttaaagggttccagcctaagcaataccaggctctaggaggaggagctaacactgtggctcatggttacaccaagggaagtggtcttggagctgagatcattggcacattcgttcttgtatacacagtcttctcagcaactgacgccaagagaaatgctcgtgactctcatgtccctattcttgcaccactcccaatcgggtttgcggttttcttggttcacttggcaaccatcccaatcactggcacaggcatcaacccagctagaagccttggagctgcaatcatctacaacaaagaccattcctgggatgaccactgggtgttttgggttggccccttcattggagctgcacttgctgctctttaccatgtggttgtcatcagagccatccccttcaagtccagaagctaagtaaaaacaagacatcaagtcctctggtttctggccttgtccttagttgcttctatagttctattgttgatctactacatgtatgtgtgcaatgtgtttatctatgtgccctcttaatgcaatatttgtaaacaaggaagaagttccaaaggagaattatttgcaaattatgatgtttaacatgtttatta

SEQ ID NO: 97671 - protein, 286 aa, Arabidopsis thaliana
  peptide (1)..(286): Ceres Seq. ID no. 13490441
  misc_feature (44)..(273): Pfam Name: Major intrinsic protein Pfam Description: Major intrinsic protein
  misc_feature (1)..(286): Homolog of NCBI NO: 15233109 NR Description: plasma membrane intrinsic protein 1A [Arabidopsis >gi|21431895|sp|P43285|WC1A_ARATH Plasma membrane intrinsic
  misc_feature (1)..(286): Homolog of NCBI NO: 472873 NR Description: plasma membrane intrinsic protein 1a [Arabidopsis
  misc_feature (1)..(286): Homolog of NCBI NO: 3551131 NR Description: plasma membrane aquaporin (PAQ1) [Raphanus
  misc_feature (1)..(286): Homolog of NCBI NO: 21594059 NR Description: plasma membrane intrinsic protein 1a [Arabidopsis
  misc_feature (1)..(286): Homolog of NCBI NO: 10799093 NR Description: aquaporin PIP1b1 [Brassica oleracea]
  misc_feature (1)..(286): Homolog of NCBI NO: 15225913 NR Description: plasma membrane intrinsic protein 1B [Arabidopsis >gi|1175011|sp|Q06611|WC1B_ARATH Plasma membrane intrinsic
  misc_feature (1)..(286): Homolog of NCBI NO: 10799095 NR Description: aquaporin PIP1b2 [Brassica oleracea]
  misc_feature (1)..(286): Homolog of NCBI NO: 1199804 NR Description: transmembrane channel protein [Brassica oleracea]
  misc_feature (1)..(286): Homolog of NCBI NO: 4467357 NR Description: PIP1b protein [Arabidopsis thaliana]
  misc_feature (1)..(286): Homolog of NCBI NO: 7209556 NR Description: plasma membrane aquaporin 1b [Raphanus sativus]
MEGKEEDVRVGANKFPERQPIGTSAQSDKDYKEPPPAPFFEPGELSSWSFWRAGIAEFIATFLFLYITVLTVMGVKRSPNMCASVGIQGIAWAFGGMIFALVYCTAGISGGHINPAVTFGLFLARKLSLTRALYYIVMQCLGAICGAGVVKGFQPKQYQALGGGANTVAHGYTKGSGLGAEIIGTFVLVYTVFSATDAKRNARDSHVPILAPLPIGFAVFLVHLATIPITGTGINPARSLGAAIIYNKDHSWDDHWVFWVGPFIGAALAALYHVVVIRAIPFKSRS

SEQ ID NO: 97672 - protein, 214 aa, Arabidopsis thaliana; identical to SEQ ID NO: 27567
  peptide (1)..(214): Ceres Seq. ID no. 13490442
  misc_feature (1)..(201): Pfam Name: Major intrinsic protein Pfam Description: Major intrinsic protein
  misc_feature (1)..(214): Homolog of NCBI NO: 15233109 NR Description: plasma membrane intrinsic protein 1A [Arabidopsis >gi|21431895|sp|P43285|WC1A_ARATH Plasma membrane intrinsic
  misc_feature (1)..(214): Homolog of NCBI NO: 472873 NR Description: plasma membrane intrinsic protein 1a [Arabidopsis
  misc_feature (1)..(214): Homolog of NCBI NO: 3551131 NR Description: plasma membrane aquaporin (PAQ1) [Raphanus
  misc_feature (1)..(214): Homolog of NCBI NO: 21594059 NR Description: plasma membrane intrinsic protein 1a [Arabidopsis
  misc_feature (1)..(214): Homolog of NCBI NO: 10799093 NR Description: aquaporin PIP1b1 [Brassica oleracea]
  misc_feature (1)..(214): Homolog of NCBI NO: 15225913 NR Description: plasma membrane intrinsic protein 1B [Arabidopsis >gi|1175011|sp|Q06611|WC1B_ARATH Plasma membrane intrinsic
  misc_feature (1)..(214): Homolog of NCBI NO: 10799095 NR Description: aquaporin PIP1b2 [Brassica oleracea]
  misc_feature (1)..(214): Homolog of NCBI NO: 1199804 NR Description: transmembrane channel protein [Brassica oleracea]
  misc_feature (1)..(214): Homolog of NCBI NO: 4467357 NR Description: PIP1b protein [Arabidopsis thaliana]
  misc_feature (1)..(214): Homolog of NCBI NO: 7209556 NR Description: plasma membrane aquaporin 1b [Raphanus sativus]

SEQ ID NO: 97673 - protein, 206 aa, Arabidopsis thaliana; identical to SEQ ID NO: 27568
  peptide (1)..(206): Ceres Seq. ID no. 13490443
  misc_feature (1)..(193): Pfam Name: Major intrinsic protein Pfam Description: Major intrinsic protein
  misc_feature (1)..(206): Homolog of NCBI NO: 15233109 NR Description: plasma membrane intrinsic protein 1A [Arabidopsis >gi|21431895|sp|P43285|WC1A_ARATH Plasma membrane intrinsic
  misc_feature (1)..(206): Homolog of NCBI NO: 472873 NR Description: plasma membrane intrinsic protein 1a [Arabidopsis
  misc_feature (1)..(206): Homolog of NCBI NO: 3551131 NR Description: plasma membrane aquaporin (PAQ1) [Raphanus
  misc_feature (1)..(206): Homolog of NCBI NO: 21594059 NR Description: plasma membrane intrinsic protein 1a [Arabidopsis
  misc_feature (1)..(206): Homolog of NCBI NO: 10799093 NR Description: aquaporin PIP1b1 [Brassica oleracea]
  misc_feature (1)..(206): Homolog of NCBI NO: 15225913 NR Description: plasma membrane intrinsic protein 1B [Arabidopsis >gi|1175011|sp|Q06611|WC1B_ARATH Plasma membrane intrinsic
  misc_feature (1)..(206): Homolog of NCBI NO: 10799095 NR Description: aquaporin PIP1b2 [Brassica oleracea]
  misc_feature (1)..(206): Homolog of NCBI NO: 1199804 NR Description: transmembrane channel protein [Brassica oleracea]
  misc_feature (1)..(206): Homolog of NCBI NO: 4467357 NR Description: PIP1b protein [Arabidopsis thaliana]
  misc_feature (1)..(206): Homolog of NCBI NO: 7209556 NR Description: plasma membrane aquaporin 1b [Raphanus sativus]

SEQ ID NO: 97674 - DNA, 1624 bp, Arabidopsis thaliana
  misc_feature (1)..(1624): Ceres Seq. ID no. 13490713
  misc_feature: MA Experiment ID: 108434 Result: Down-regulated in Transcription
  misc_feature: MA Experiment 108434 PARAMETER Experiment Name: At_Root_Tips_cDNA_P Parameter: Tissue Value: Root Tips
  misc_feature: MA Experiment ID: 108462 Result: Down-regulated in Transcription
  misc_feature: MA Experiment 108462 PARAMETER Experiment Name: At_Germinating_Seeds_cDNA_P Parameter: Age (day) Value: 2 vs. 0
  misc_feature: MA Experiment 108462 PARAMETER Experiment Name: At_Germinating_Seeds_cDNA_P Parameter: Tissue Value: Germinating Seeds
  misc_feature: MA Experiment ID: 108463 Result: Down-regulated in Transcription
  misc_feature: MA Experiment 108463 PARAMETER Experiment Name: At_Germinating_Seeds_cDNA_P Parameter: Age (day) Value: 3 vs. 0
  misc_feature: MA Experiment 108463 PARAMETER Experiment Name: At_Germinating_Seeds_cDNA_P Parameter: Tissue Value: Germinating Seeds
  misc_feature: MA Experiment ID: 108464 Result: Down-regulated in Transcription
  misc_feature: MA Experiment 108464 PARAMETER Experiment Name: At_Germinating_Seeds_cDNA_P Parameter: Age (day) Value: 4 vs. 0
  misc_feature: MA Experiment 108464 PARAMETER Experiment Name: At_Germinating_Seeds_cDNA_P Parameter: Tissue Value: Germinating Seeds
  misc_feature: MA Experiment ID: 108573 Result: Up-regulated in Transcription
  misc_feature: MA Experiment 108573 PARAMETER Experiment Name: At_Drought_cDNA_P Parameter: Timepoint (hr) Value: 6
  misc_feature: MA Experiment 108573 PARAMETER Experiment Name: At_Drought_cDNA_P Parameter: Tissue Value: Aerial
  misc_feature: MA Experiment 108573 PARAMETER Experiment Name: At_Drought_cDNA_P Parameter: Treatment Value: Drought vs. No Drought
  misc_feature: MA Experiment ID: 108579 Result: Up-regulated in Transcription
  misc_feature: MA Experiment 108579 PARAMETER Experiment Name: At_4deg_Cold_cDNA_P Parameter: Temperature (deg C) Value: 4 vs. 22
  misc_feature: MA Experiment 108579 PARAMETER Experiment Name: At_4deg_Cold_cDNA_P Parameter: Timepoint (hr) Value: 6
  misc_feature: MA Experiment 108579 PARAMETER Experiment Name: At_4deg_Cold_cDNA_P Parameter: Tissue Value: Aerial
  misc_feature: MA Experiment ID: 108608 Result: Down-regulated in Transcription
  misc_feature: MA Experiment 108608 PARAMETER Experiment Name: At_100uM_ABA_cDNA_P Parameter: Timepoint (hr) Value: 1
  misc_feature: MA Experiment 108608 PARAMETER Experiment Name: At_100uM_ABA_cDNA_P Parameter: Tissue Value: Aerial
  misc_feature: MA Experiment 108608 PARAMETER Experiment Name: At_100uM_ABA_cDNA_P Parameter: Treatment Value: 100uM ABA vs. No Treatment
  misc_feature: MA Experiment ID: 20000112 Result: Up-regulated in Transcription
  misc_feature: MA Experiment 20000112 PARAMETER Experiment Name: At_42deg_Heat_cDNA_P Parameter: Temperature (deg C) Value: 42 vs. 22
  misc_feature: MA Experiment 20000112 PARAMETER Experiment Name: At_42deg_Heat_cDNA_P Parameter: Timepoint (hr) Value: 2
  misc_feature: MA Experiment 20000112 PARAMETER Experiment Name: At_42deg_Heat_cDNA_P Parameter: Tissue Value: Aerial
  misc_feature: MA Experiment ID: 20000144 Result: Up-regulated in Transcription
  misc_feature: MA Experiment 20000144 PARAMETER Experiment Name: At_42deg_Heat_cDNA_P Parameter: Temperature (deg C) Value: 42 vs. 22
  misc_feature: MA Experiment 20000144 PARAMETER Experiment Name: At_42deg_Heat_cDNA_P Parameter: Timepoint (hr) Value: 1
  misc_feature: MA Experiment 20000144 PARAMETER Experiment Name: At_42deg_Heat_cDNA_P Parameter: Tissue Value: Aerial
  misc_feature: MA Experiment ID: 20000166 Result: Down-regulated in Transcription
  misc_feature: MA Experiment 20000166 PARAMETER Experiment Name: At_100uM_ABA_P Parameter: Age (day) Value: 14
  misc_feature: MA Experiment 20000166 PARAMETER Experiment Name: At_100uM_ABA_P Parameter: Organism Value: A. thaliana
  misc_feature: MA Experiment 20000166 PARAMETER Experiment Name: At_100uM_ABA_P Parameter: Plant Line Value: WS
  misc_feature: MA Experiment 20000166 PARAMETER Experiment Name: At_100uM_ABA_P Parameter: Timepoint (hr) Value: 1
  misc_feature: MA Experiment 20000166 PARAMETER Experiment Name: At_100uM_ABA_P Parameter: Tissue Value: Aerial
  misc_feature: MA Experiment 20000166 PARAMETER Experiment Name: At_100uM_ABA_P Parameter: Treatment Value: 100uM ABA vs. No Treatment
  misc_feature: MA Experiment ID: 20000441 Result: Up-regulated in Transcription
  misc_feature: MA Experiment 20000441 PARAMETER Experiment Name: At_1uM_BR-BRZ__P Parameter: Tissue Value: Shoot Apices
  misc_feature: MA Experiment 20000441 PARAMETER Experiment Name: At_1uM_BR-BRZ__P Parameter: Treatment Value: 1uM BR vs. No Treatment
  misc_feature: MA Experiment ID: 20000573 Result: Up-regulated in Transcription
  misc_feature: MA Experiment 20000573 PARAMETER Experiment Name: At_100uM_ABA_Mutants__P Parameter: Organism Value: A. thaliana
  misc_feature: MA Experiment 20000573 PARAMETER Experiment Name: At_100uM_ABA_Mutants__P Parameter: Plant Line Value: CS22 vs. Ler wt
  misc_feature: MA Experiment 20000573 PARAMETER Experiment Name: At_100uM_ABA_Mutants__P Parameter: Timepoint (hr) Value: N/A
  misc_feature: MA Experiment 20000573 PARAMETER Experiment Name: At_100uM_ABA_Mutants__P Parameter: Tissue Value: Whole Plant
  misc_feature: MA Experiment 20000573 PARAMETER Experiment Name: At_100uM_ABA_Mutants__P Parameter: Treatment Value: None
  misc_feature: MA Experiment ID: 20001911 Result: Up-regulated in Transcription
  misc_feature: MA Experiment 20001911 PARAMETER Experiment Name: At_Drought_Reproduction_P Parameter: Age (day) Value: 40
  misc_feature: MA Experiment 20001911 PARAMETER Experiment Name: At_Drought_Reproduction_P Parameter: Organism Value: A. thaliana
  misc_feature: MA Experiment 20001911 PARAMETER Experiment Name: At_Drought_Reproduction_P Parameter: Plant Line Value: WS
  misc_feature: MA Experiment 20001911 PARAMETER Experiment Name: At_Drought_Reproduction_P Parameter: Timepoint (day) Value: 10
  misc_feature: MA Experiment 20001911 PARAMETER Experiment Name: At_Drought_Reproduction_P Parameter: Tissue Value: Flowers
  misc_feature: MA Experiment 20001911 PARAMETER Experiment Name: At_Drought_Reproduction_P Parameter: Treatment Value: Drought vs. No Drought
gagtaacatcgagacaaagaagaaaaactaaaaaagagaaccccaaagaatcgaatatttattatttcgccccgaagattctatttctgatcatttacacccctaaaaagagtagagctttcgtgaagccaccatgtgtggaggagctataatctccgatttcatacctccgccgaggtccctccgcgtcactaacgagtttatctggccggatctgaaaaacaaagtgaaagcttcaaagaagagatcgaataagcgatccgatttcttcgatcttgacgatgatttcgaagctgatttccaagggtttaaggatgactcggcttttgactgcgaagacgatgatgatgtcttcgtcaatgttaagcctttcgtcttcaccgcaactactaagcccgtagcttccgctttcgtctccactgtaggttcagcatatgccaagaaaactgtagagtccgctgagcaagctgagaaatcttctaagaggaagaggaagaatcaataccgagggattaggcagcgtccttggggaaaatgggctgcggagatccgtgatccgagaaaaggctcccgagaatggcttggaacattcgacactgctgaggaagcagcaagagcttatgatgctgcagcacgcagaatccgtggcacgaaagctaaggtgaattttcccgaggagaagaaccctagcgtcgtatcccagaaacgtcctagtgctaagactaataatcttcagaaatcagtggctaaaccaaacaaaagcgtaactttggttcagcagccaacacatctgagtcagcagtactgcaacaactcctttgacaactcttttggtgatatgagtttcatggaagagaagcctcagatgtacaacaatcagtttgggttaacaaactcgttcgatgctggaggtaacaatggataccagtatttcagttccgatcagggcagtaactccttcgactgttctgagttcgggtggagtgatcacggccctaaaacacccgagatctcttcaatgcttgtcaataacaacgaagcatcatttgttgaagaaaccaatgcagccaagaagctcaaaccaaactctgatgagtcagacgatctgatggcataccttgacaacgccttgtgggacaccccactagaagtggaagccatgcttggcgcagatgctggtgctgtgactcaggaagaggaaaacccagtggagctatggagcttagatgagatcaatttcatgctggaaggagacttttgaagtgatcgatggttccttagtttgtaaataaagctgtgttggattttgctgttgggggatggtacaagtcacacctcaagctctatgcattggtatctcatgagcctctcttccatagagagtttctcttttaattttgtcgaaataaaaaaggtgtgatgaagtaaatagaggtataataatatctatctattaagtcttgttttgttctttcatttttgtatttcttttctatttaaaagacagtttattagtcttctgagctctctttttgatctttgttatagcgtatcatcaccctcgaaagtgtaatgttttgtacccccaaacttgtttagcattataataaagtctctttggaac

SEQ ID NO: 97675 - protein, 375 aa, Arabidopsis thaliana
  peptide (1)..(375): Ceres Seq. ID no. 13490714
  misc_feature (121)..(185): Pfam Name: AP2 domain Pfam Description: AP2 domain
  misc_feature (1)..(375): Homolog of NCBI NO: 30683059 NR Description: AP2 domain protein RAP2.2 [Arabidopsis thaliana]
  misc_feature (1)..(375): Homolog of NCBI NO: 30683064 NR Description: AP2 domain protein RAP2.2 [Arabidopsis thaliana]
  misc_feature (1)..(375): Homolog of NCBI NO: 18400321 NR Description: AP2 domain protein RAP2.2 [Arabidopsis thaliana]
  misc_feature (1)..(375): Homolog of NCBI NO: 21553709 NR Description: DNA-binding protein [Arabidopsis thaliana]
  misc_feature (130)..(375): Homolog of NCBI NO: 2281629 NR Description: AP2 domain containing protein RAP2.2 [Arabidopsis
  misc_feature (1)..(350): Homolog of NCBI NO: 21593779 NR Description: AP2 domain containing protein, putative
  misc_feature (1)..(350): Homolog of NCBI NO: 15220971 NR Description: AP2 domain protein RAP2.12 [Arabidopsis thaliana]
  misc_feature (42)..(350): Homolog of NCBI NO: 2281649 NR Description: AP2 domain containing protein RAP2.12
  misc_feature (1)..(319): Homolog of NCBI NO: 38343926 NR Description: ethylene transcription factor [Fagus sylvatica]
  misc_feature (1)..(373): Homolog of NCBI NO: 18496063 NR Description: ethylene responsive element binding protein
MCGGAIISDFIPPPRSLRVTNEFIWPDLKNKVKASKKRSNKRSDFFDLDDDFEADFQGFKDDSAFDCEDDDDVFVNVKPFVFTATTKPVASAFVSTVGSAYAKKTVESAEQAEKSSKRKRKNQYRGIRQRPWGKWAAEIRDPRKGSREWLGTFDTAEEAARAYDAAARRIRGTKAKVNFPEEKNPSVVSQKRPSAKTNNLQKSVAKPNKSVTLVQQPTHLSQQYCNNSFDNSFGDMSFMEEKPQMYNNQFGLTNSFDAGGNNGYQYFSSDQGSNSFDCSEFGWSDHGPKTPEISSMLVNNNEASFVEETNAAKKLKPNSDESDDLMAYLDNALWDTPLEVEAMLGADAGAVTQEEENPVELWSLDEINFMLEGDF

SEQ ID NO: 97676 - DNA, 1523 bp, Arabidopsis thaliana
  misc_feature (1)..(1523): Ceres Seq. ID no. 13490795
  misc_feature: MA Experiment ID: 108434 Result: Up-regulated in Transcription
  misc_feature: MA Experiment 108434 PARAMETER Experiment Name: At_Root_Tips_cDNA_P Parameter: Tissue Value: Root Tips
  misc_feature: MA Experiment ID: 108462 Result: Down-regulated in Transcription
  misc_feature: MA Experiment 108462 PARAMETER Experiment Name: At_Germinating_Seeds_cDNA_P Parameter: Age (day) Value: 2 vs. 0
  misc_feature: MA Experiment 108462 PARAMETER Experiment Name: At_Germinating_Seeds_cDNA_P Parameter: Tissue Value: Germinating Seeds
  misc_feature: MA Experiment ID: 108463 Result: Down-regulated in Transcription
  misc_feature: MA Experiment 108463 PARAMETER Experiment Name: At_Germinating_Seeds_cDNA_P Parameter: Age (day) Value: 3 vs. 0
  misc_feature: MA Experiment 108463 PARAMETER Experiment Name: At_Germinating_Seeds_cDNA_P Parameter: Tissue Value: Germinating Seeds
  misc_feature: MA Experiment ID: 108573 Result: Up-regulated in Transcription
  misc_feature: MA Experiment 108573 PARAMETER Experiment Name: At_Drought_cDNA_P Parameter: Timepoint (hr) Value: 6
  misc_feature: MA Experiment 108573 PARAMETER Experiment Name: At_Drought_cDNA_P Parameter: Tissue Value: Aerial
  misc_feature: MA Experiment 108573 PARAMETER Experiment Name: At_Drought_cDNA_P Parameter: Treatment Value: Drought vs. No Drought
  misc_feature: MA Experiment ID: 108576 Result: Up-regulated in Transcription
  misc_feature: MA Experiment 108576 PARAMETER Experiment Name: At_42deg_Heat_cDNA_P Parameter: Temperature (deg C) Value: 42 vs. 22
  misc_feature: MA Experiment 108576 PARAMETER Experiment Name: At_42deg_Heat_cDNA_P Parameter: Timepoint (hr) Value: 1
  misc_feature: MA Experiment 108576 PARAMETER Experiment Name: At_42deg_Heat_cDNA_P Parameter: Tissue Value: Aerial
  misc_feature: MA Experiment ID: 108577 Result: Up-regulated in Transcription
  misc_feature: MA Experiment 108577 PARAMETER Experiment Name: At_42deg_Heat_cDNA_P Parameter: Temperature (deg C) Value: 42 vs. 22
  misc_feature: MA Experiment 108577 PARAMETER Experiment Name: At_42deg_Heat_cDNA_P Parameter: Timepoint (hr) Value: 6
  misc_feature: MA Experiment 108577 PARAMETER Experiment Name: At_42deg_Heat_cDNA_P Parameter: Tissue Value: Aerial
  misc_feature: MA Experiment ID: 108585 Result: Up-regulated in Transcription
  misc_feature: MA Experiment 108585 PARAMETER Experiment Name: At_5mM_NaNP_cDNA_P Parameter: Timepoint (hr) Value: 6
  misc_feature: MA Experiment 108585 PARAMETER Experiment Name: At_5mM_NaNP_cDNA_P Parameter: Tissue Value: Aerial
  misc_feature: MA Experiment 108585 PARAMETER Experiment Name: At_5mM_NaNP_cDNA_P Parameter: Treatment Value: null
  misc_feature: MA Experiment ID: 20000093 Result: Up-regulated in Transcription
  misc_feature: MA Experiment 20000093 PARAMETER Experiment Name: At_42deg_Heat_cDNA_P Parameter: Temperature (deg C) Value: 42 vs. 22
  misc_feature: MA Experiment 20000093 PARAMETER Experiment Name: At_42deg_Heat_cDNA_P Parameter: Timepoint (hr) Value: 0.5
  misc_feature: MA Experiment 20000093 PARAMETER Experiment Name: At_42deg_Heat_cDNA_P Parameter: Tissue Value: Aerial
  misc_feature: MA Experiment ID: 20000111 Result: Up-regulated in Transcription
  misc_feature: MA Experiment 20000111 PARAMETER Experiment Name: At_42deg_Heat_cDNA_P Parameter: Temperature (deg C) Value: 42 vs. 22
  misc_feature: MA Experiment 20000111 PARAMETER Experiment Name: At_42deg_Heat_cDNA_P Parameter: Timepoint (hr) Value: 6
  misc_feature: MA Experiment 20000111 PARAMETER Experiment Name: At_42deg_Heat_cDNA_P Parameter: Tissue Value: Aerial
  misc_feature: MA Experiment ID: 20000112 Result: Up-regulated in Transcription
  misc_feature: MA Experiment 20000112 PARAMETER Experiment Name: At_42deg_Heat_cDNA_P Parameter: Temperature (deg C) Value: 42 vs. 22
  misc_feature: MA Experiment 20000112 PARAMETER Experiment Name: At_42deg_Heat_cDNA_P Parameter: Timepoint (hr) Value: 2
  misc_feature: MA Experiment 20000112 PARAMETER Experiment Name: At_42deg_Heat_cDNA_P Parameter: Tissue Value: Aerial
  misc_feature: MA Experiment ID: 20000144 Result: Up-regulated in Transcription
  misc_feature: MA Experiment 20000144 PARAMETER Experiment Name: At_42deg_Heat_cDNA_P Parameter: Temperature (deg C) Value: 42 vs. 22
  misc_feature: MA Experiment 20000144 PARAMETER Experiment Name: At_42deg_Heat_cDNA_P Parameter: Timepoint (hr) Value: 1
  misc_feature: MA Experiment 20000144 PARAMETER Experiment Name: At_42deg_Heat_cDNA_P Parameter: Tissue Value: Aerial
  misc_feature: MA Experiment ID: 20000173 Result: Up-regulated in Transcription
  misc_feature: MA Experiment 20000173 PARAMETER Experiment Name: At_42deg_Heat_P Parameter: Age (day) Value: 14
  misc_feature: MA Experiment 20000173 PARAMETER Experiment Name: At_42deg_Heat_P Parameter: Organism Value: A. thaliana
  misc_feature: MA Experiment 20000173 PARAMETER Experiment Name: At_42deg_Heat_P Parameter: Plant Line Value: WS
  misc_feature: MA Experiment 20000173 PARAMETER Experiment Name: At_42deg_Heat_P Parameter: Temperature (deg C) Value: 42 vs. 22
  misc_feature: MA Experiment 20000173 PARAMETER Experiment Name: At_42deg_Heat_P Parameter: Timepoint (hr) Value: 6
  misc_feature: MA Experiment 20000173 PARAMETER Experiment Name: At_42deg_Heat_P Parameter: Tissue Value: Aerial
  misc_feature: MA Experiment ID: 20000179 Result: Down-regulated in Transcription
  misc_feature: MA Experiment 20000179 PARAMETER Experiment Name: At_Germinating_Seeds_P Parameter: Age (hr) Value: 6 vs. 0
  misc_feature: MA Experiment 20000179 PARAMETER Experiment Name: At_Germinating_Seeds_P Parameter: Tissue Value: Germinating Seeds
  misc_feature: MA Experiment ID: 20000180 Result: Down-regulated in Transcription
  misc_feature: MA Experiment 20000180 PARAMETER Experiment Name: At_Germinating_Seeds_P Parameter: Age (hr) Value: 24 vs. 0
  misc_feature: MA Experiment 20000180 PARAMETER Experiment Name: At_Germinating_Seeds_P Parameter: Tissue Value: Germinating Seeds
  misc_feature: MA Experiment ID: 20000224 Result: Down-regulated in Transcription
tcgaatcttcttcttcttatttcttctataccgtcgtcgaaaagctttaccaaaatctcacgcccccgacgattcatcgggatttgagtttgcactaaacccacaatggtttcctatcgtgctaccacagagacgatttccctggctttagaagccaacagctcggaggctattacgatactgtaccaggttttggaagacccttcttcatctcctgaggctatacggatcaaggagcaagcgattacaaacctttgtgatcgattgactgaagagaagagaggtgaggatctccggaaactgttgaccaagttgaggcctttcttttccttaatccccaaggcgaaaactgcgaaaatcgtcagaggaatcattgatgctgtggcaaagattcctggaacaactgatctccagatcactctctgcaaagagatggtcgaatggacccgcgctgagaagcgtactttcctcaggcagcgagtagaggctaggcttgcagctcttttgatggagaacaaggagtatgttgaagctttggcgttgttgagtactttggtaaaagaggttaggagattagatgataagctccttctggtcgacatagacttgctggagagcaaacttcacttctcattgagaaacttacccaaggcaaaagctgcactcactgcagctaggacagctgctaacgctatatatgtcccaccagctcaacaaggcacgatagatctgcagagtgggattcttcatgctgaagagaaagactacaaaaccggatacagttacttctttgaagcctttgagtccttcaacgctctcggagatccgagagcggttttcagtttgaagtacatgttactgtgcaagatcatggttagccaagctgatgatgttgcaggaataatctcctcaaaggctggactacagtacgttggccctgacctggatgccatgaaagcagtcgctgatgctcactcgaagaggtccttgaagttgtttgagaacgcactccgtgactacaaagcacagcttgaagatgacccaattgtccacaggcatctctcttctctctatgacacgcttctggagcaaaatctgtgtcgtttgatcgagcccttctcaagagttgagatagctcacattgctgagctcattggattgccgctcgaccatgtggaaaagaagctatctcagatgatactcgacaagaaatttgcaggtaccttggatcaaggagctggatgcctcatcatcttcgaagacccaaaggcagatgctatctactcggctaccctcgaaaccattgcaaacatggggaaggtcgtcgacagcctttatgtccggtctgccaaaatcatgtcctgagagagtgagtgagttggtcgtatgaatctcattctatcgttctttctttctggttttagatatcgtttggactcaaagaaactgatgtttctcaatggagaaagtaaacttgtctgaattgttcacattactcgttttgcttatgatcttattatgtc

SEQ ID NO: 97677 - protein, 419 aa, Arabidopsis thaliana; identical to SEQ ID NO: 84568
  peptide (1)..(419): Ceres Seq. ID no. 13490796
  misc_feature (281)..(385): Pfam Name: PCI domain Pfam Description: PCI domain
  misc_feature (1)..(419): Homolog of NCBI NO: 15218845 NR Description: 26S proteasome regulatory subunit (RPN6), putative
  misc_feature (1)..(412): Homolog of NCBI NO: 25332510 NR Description: 19S proteosome subunit 9 [imported] - Arabidopsis >gi|3450889|gb|AAC34120.1| 19S proteosome subunit 9 [Arabidopsis
  misc_feature (6)..(419): Homolog of NCBI NO: 38344536 NR Description: OSJNBa0027P08.4 [Oryza sativa (japonica
  misc_feature (110)..(419): Homolog of NCBI NO: 38093742 NR Description: putative proteosome subunit [Oryza sativa
  misc_feature (12)..(417): Homolog of NCBI NO: 17137740 NR Description: Proteasome p44.5 subunit CG10149-PB [Drosophila
  misc_feature (15)..(417): Homolog of NCBI NO: 26342168 NR Description: unnamed protein product [Mus musculus]
  misc_feature (15)..(417): Homolog of NCBI NO: 33585718 NR Description: Unknown (protein for IMAGE:3964625) [Mus musculus]
  misc_feature (15)..(417): Homolog of NCBI NO: 2150046 NR Description: 26S proteasome subunit 9 [Homo sapiens]
  misc_feature (15)..(417): Homolog of NCBI NO: 28872725 NR Description: proteasome 26S non-ATPase subunit 11; 26S regulatory subunit 9 [Homo sapiens]
  misc_feature (15)..(417): Homolog of NCBI NO: 34872897 NR Description: similar to 26S proteasome non-ATPase regulatory

SEQ ID NO: 97678 - protein, 310 aa, Arabidopsis thaliana; identical to SEQ ID NO: 84569
  peptide (1)..(310): Ceres Seq. ID no. 13490797
  misc_feature (172)..(276): Pfam Name: PCI domain Pfam Description: PCI domain
  misc_feature (1)..(310): Homolog of NCBI NO: 15218845 NR Description: 26S proteasome regulatory subunit (RPN6), putative
  misc_feature (1)..(303): Homolog of NCBI NO: 25332510 NR Description: 19S proteosome subunit 9 [imported] - Arabidopsis >gi|3450889|gb|AAC34120.1| 19S proteosome subunit 9 [Arabidopsis
  misc_feature (1)..(310): Homolog of NCBI NO: 38344536 NR Description: OSJNBa0027P08.4 [Oryza sativa (japonica
  misc_feature (1)..(310): Homolog of NCBI NO: 38093742 NR Description: putative proteosome subunit [Oryza sativa
  misc_feature (1)..(308): Homolog of NCBI NO: 17137740 NR Description: Proteasome p44.5 subunit CG10149-PB [Drosophila
  misc_feature (1)..(308): Homolog of NCBI NO: 26342168 NR Description: unnamed protein product [Mus musculus]
  misc_feature (1)..(308): Homolog of NCBI NO: 33585718 NR Description: Unknown (protein for IMAGE:3964625) [Mus musculus]
  misc_feature (1)..(308): Homolog of NCBI NO: 2150046 NR Description: 26S proteasome subunit 9 [Homo sapiens]
  misc_feature (1)..(308): Homolog of NCBI NO: 28872725 NR Description: proteasome 26S non-ATPase subunit 11; 26S regulatory subunit 9 [Homo sapiens]
  misc_feature (1)..(308): Homolog of NCBI NO: 34872897 NR Description: similar to 26S proteasome non-ATPase regulatory

SEQ ID NO: 97679 - protein, 285 aa, Arabidopsis thaliana; identical to SEQ ID NO: 84570
  peptide (1)..(285): Ceres Seq. ID no. 13490798
  misc_feature (147)..(251): Pfam Name: PCI domain Pfam Description: PCI domain
  misc_feature (1)..(285): Homolog of NCBI NO: 15218845 NR Description: 26S proteasome regulatory subunit (RPN6), putative
  misc_feature (1)..(278): Homolog of NCBI NO: 25332510 NR Description: 19S proteosome subunit 9 [imported] - Arabidopsis >gi|3450889|gb|AAC34120.1| 19S proteosome subunit 9 [Arabidopsis
  misc_feature (1)..(285): Homolog of NCBI NO: 38344536 NR Description: OSJNBa0027P08.4 [Oryza sativa (japonica
  misc_feature (1)..(285): Homolog of NCBI NO: 38093742 NR Description: putative proteosome subunit [Oryza sativa
  misc_feature (1)..(283): Homolog of NCBI NO: 17137740 NR Description: Proteasome p44.5 subunit CG10149-PB [Drosophila
  misc_feature (1)..(283): Homolog of NCBI NO: 26342168 NR Description: unnamed protein product [Mus musculus]
  misc_feature (1)..(283): Homolog of NCBI NO: 33585718 NR Description: Unknown (protein for IMAGE:3964625) [Mus musculus]
  misc_feature (1)..(283): Homolog of NCBI NO: 2150046 NR Description: 26S proteasome subunit 9 [Homo sapiens]
  misc_feature (1)..(283): Homolog of NCBI NO: 28872725 NR Description: proteasome 26S non-ATPase subunit 11; 26S regulatory subunit 9 [Homo sapiens]
  misc_feature (1)..(283): Homolog of NCBI NO: 34872897 NR Description: similar to 26S proteasome non-ATPase regulatory

SEQ ID NO: 97680 - DNA, 1359 bp, Arabidopsis thaliana
  misc_feature (1)..(1359): Ceres Seq. ID no. 13490986
  misc_feature: MA Experiment ID: 20000185 Result: Down-regulated in Transcription
  misc_feature: MA Experiment 20000185 PARAMETER Experiment Name: At_Roots__P Parameter: Age (day) Value: 7 vs. 21
  misc_feature: MA Experiment 20000185 PARAMETER Experiment Name: At_Roots__P Parameter: Organism Value: A. thaliana
  misc_feature: MA Experiment 20000185 PARAMETER Experiment Name: At_Roots__P Parameter: Tissue Value: Roots vs. Whole Plant
  misc_feature: MA Experiment ID: 20000437 Result: Down-regulated in Transcription
  misc_feature: MA Experiment 20000437 PARAMETER Experiment Name: At_Drought_P Parameter: Age (day) Value: 8
  misc_feature: MA Experiment 20000437 PARAMETER Experiment Name: At_Drought_P Parameter: Organism Value: A. thaliana
  misc_feature: MA Experiment 20000437 PARAMETER Experiment Name: At_Drought_P Parameter: Plant Line Value: WS
  misc_feature: MA Experiment 20000437 PARAMETER Experiment Name: At_Drought_P Parameter: Timepoint (hr) Value: 24
  misc_feature: MA Experiment 20000437 PARAMETER Experiment Name: At_Drought_P Parameter: Tissue Value: Whole Plant
  misc_feature: MA Experiment 20000437 PARAMETER Experiment Name: At_Drought_P Parameter: Treatment Value: Drought vs. No Drought
  misc_feature: MA Experiment ID: 20000439 Result: Down-regulated in Transcription
  misc_feature: MA Experiment 20000439 PARAMETER Experiment Name: At_Roots__P Parameter: Age (day) Value: 14 vs. 21
  misc_feature: MA Experiment 20000439 PARAMETER Experiment Name: At_Roots__P Parameter: Organism Value: A. thaliana
  misc_feature: MA Experiment 20000439 PARAMETER Experiment Name: At_Roots__P Parameter: Tissue Value: Roots vs. Whole Plant
  misc_feature: MA Experiment ID: 20001905 Result: Down-regulated in Transcription
  misc_feature: MA Experiment 20001905 PARAMETER Experiment Name: At_Drought_Reproduction_P Parameter: Age (day) Value: 40
  misc_feature: MA Experiment 20001905 PARAMETER Experiment Name: At_Drought_Reproduction_P Parameter: Organism Value: A. thaliana
  misc_feature: MA Experiment 20001905 PARAMETER Experiment Name: At_Drought_Reproduction_P Parameter: Plant Line Value: WS
  misc_feature: MA Experiment 20001905 PARAMETER Experiment Name: At_Drought_Reproduction_P Parameter: Timepoint (day) Value: 10
  misc_feature: MA Experiment 20001905 PARAMETER Experiment Name: At_Drought_Reproduction_P Parameter: Tissue Value: Rosettes
  misc_feature: MA Experiment 20001905 PARAMETER Experiment Name: At_Drought_Reproduction_P Parameter: Treatment Value: Drought vs. No Drought
ggattagggagactcgcactcttcttcttcttctttgtacccagaaagaaagagagctccaacaatggctgcttgcgctactcactcctctctcatgctagcatacgccgccgcatccactcgttcccaggaccttacccctactccatctcttttctcttttgccagctccagacccaaccacttgagcttcccgcttcttctccttgggggttccagggaccggagatgtgctgctattgacagagcttccaaccacaagtttattgtctccgccgtggccgctgaggctgacctcgacacggaggaggacctggagcagaccgccaccgccgtccttgatccgcccaagcctaagaaaggaaaagccgctttggttctcaagagagatagaacaaggtctaagaggtttttggaaatccaaaagctaagggaaaccaaaaaggagtatgatgtcaacactgctatctctttgcttaaacaaactgccaacacaaggtttgttgagtctgttgaagcccatttccgtctcaacatcgatcctaagtacaatgaccagcagctgcgtgcaacggtgagcctgcctaagggaactggccagactgttatagtcgctgttcttgcacaaggtgagaaggttgatgaagccaaaagtgcaggggcagatattgtgggcagtgatgatttaatcgaacagattaaaggaggcttcatggagtttgacaagctgattgcatccccggatatgatggtcaaggttgctggcctgggaaagattcttggaccacgggggctcatgccaaatcccaaggctggtacagtcacagcgaacattccccaggctattgaagagttcaagaaggggaaagttgaattcagagcagacaaaactgggattgttcacattccatttgggaaagttaattttacagaggaagaccttctcataaacttccttgcagcagtgaaatcggtggagacaaacaagccaaagggagctaaaggagtgtactggaaaagcgctcacatatgctcgtcaatggggccttccatcaagttgaacataagagagatgatagacttcaagcctcccactgcgaactaatcgacaacgccatttgtaaatggggtccttttgggagacgggcaatgccagtgtagacagagaagagaaacaccaagtctagtctgttagtaatcttttcacgcctcactgctttgtatcactttgatggccatttgcttcttgtcgttatttatttactattgcctattaaaatttggcaaggggctgtacatgtcaggacgcagaactctttagtactctctaaaagaaaagaccttacattgatctttagg

SEQ ID NO: 97681 - protein, 346 aa, Arabidopsis thaliana; identical to SEQ ID NO: 22142
  peptide (1)..(346): Ceres Seq. ID no. 13490987
  misc_feature (125)..(329): Pfam Name: Ribosomal protein L1p/L10e family Pfam Description: Ribosomal protein L1p/L10e family
  misc_feature (1)..(346): Homolog of NCBI NO: 15229443 NR Description: ribosomal protein L1p family [Arabidopsis
  misc_feature (1)..(346): Homolog of NCBI NO: 25456457 NR Description: ribosomal protein L1 protein [imported] - thaliana >gi|7572940|emb|CAA62364.1| L1 protein [Arabidopsis
  misc_feature (3)..(344): Homolog of NCBI NO: 25453504 NR Description: ribosomal protein L1 [imported] - spinach
  misc_feature (110)..(341): Homolog of NCBI NO: 22297840 NR Description: 50S ribosomal protein L1 [Thermosynechococcus BP- 1] >gi|22294017|dbj|BAC07849.1| 50S ribosomal protein L1
  misc_feature (89)..(264): Homolog of NCBI NO: 1350625 NR Description: 50S RIBOSOMAL PROTEIN L1, CHLOROPLAST PRECURSOR
  misc_feature (113)..(341): Homolog of NCBI NO: 17232793 NR Description: 50S ribosomal protein L1 [Nostoc sp. PCC 7120]
  misc_feature (113)..(339): Homolog of NCBI NO: 11467612 NR Description: ribosomal protein L1 [Guillardia theta] CHLOROPLAST 50S RIBOSOMAL PROTEIN L1 >gi|3602937|gb|AAC35598.1|
  misc_feature (113)..(341): Homolog of NCBI NO: 16330010 NR Description: 50S ribosomal protein L1 [Synechocystis sp. PCC >gi|548759|sp|P36236|RL1_SYNY3 50S ribosomal protein L1
  misc_feature (113)..(341): Homolog of NCBI NO: 37521169 NR Description: 50S ribosomal protein L1 [Gloeobacter violaceus]
  misc_feature (113)..(341): Homolog of NCBI NO: 33239681 NR Description: Ribosomal protein L1 [Prochlorococcus marinus marinus str. CCMP1375] >gi|33237206|gb|AAP99275.1| Ribosomal

SEQ ID NO: 97682 - protein, 336 aa, Arabidopsis thaliana; identical to SEQ ID NO: 22143
  peptide (1)..(336): Ceres Seq. ID no. 13490988
  misc_feature (115)..(319): Pfam Name: Ribosomal protein L1p/L10e family Pfam Description: Ribosomal protein L1p/L10e family
  misc_feature (1)..(336): Homolog of NCBI NO: 15229443 NR Description: ribosomal protein L1p family [Arabidopsis
  misc_feature (1)..(336): Homolog of NCBI NO: 25456457 NR Description: ribosomal protein L1 protein [imported] - thaliana >gi|7572940|emb|CAA62364.1| L1 protein [Arabidopsis
  misc_feature (1)..(334): Homolog of NCBI NO: 25453504 NR Description: ribosomal protein L1 [imported] - spinach
  misc_feature (100)..(331): Homolog of NCBI NO: 22297840 NR Description: 50S ribosomal protein L1 [Thermosynechococcus BP- 1] >gi|22294017|dbj|BAC07849.1| 50S ribosomal protein L1
  misc_feature (79)..(254): Homolog of NCBI NO: 1350625 NR Description: 50S RIBOSOMAL PROTEIN L1, CHLOROPLAST PRECURSOR
  misc_feature (103)..(331): Homolog of NCBI NO: 17232793 NR Description: 50S ribosomal protein L1 [Nostoc sp. PCC 7120]
  misc_feature (103)..(329): Homolog of NCBI NO: 11467612 NR Description: ribosomal protein L1 [Guillardia theta] CHLOROPLAST 50S RIBOSOMAL PROTEIN L1 >gi|3602937|gb|AAC35598.1|
  misc_feature (103)..(331): Homolog of NCBI NO: 16330010 NR Description: 50S ribosomal protein L1 [Synechocystis sp. PCC >gi|548759|sp|P36236|RL1_SYNY3 50S ribosomal protein L1
  misc_feature (103)..(331): Homolog of NCBI NO: 37521169 NR Description: 50S ribosomal protein L1 [Gloeobacter violaceus]
  misc_feature (103)..(331): Homolog of NCBI NO: 33239681 NR Description: Ribosomal protein L1 [Prochlorococcus marinus marinus str. CCMP1375] >gi|33237206|gb|AAP99275.1| Ribosomal

SEQ ID NO: 97683 - DNA, 1854 bp, Arabidopsis thaliana
  misc_feature (1)..(1854): Ceres Seq. ID no. 13491356
  misc_feature: MA Experiment ID: 108461 Result: Down-regulated in Transcription
  misc_feature: MA Experiment 108461 PARAMETER Experiment Name: At_Germinating_Seeds_cDNA_P Parameter: Age (day) Value: 1 vs. 0
  misc_feature: MA Experiment 108461 PARAMETER Experiment Name: At_Germinating_Seeds_cDNA_P Parameter: Tissue Value: Germinating Seeds
  misc_feature: MA Experiment ID: 108462 Result: Down-regulated in Transcription
  misc_feature: MA Experiment 108462 PARAMETER Experiment Name: At_Germinating_Seeds_cDNA_P Parameter: Age (day) Value: 2 vs. 0
  misc_feature: MA Experiment 108462 PARAMETER Experiment Name: At_Germinating_Seeds_cDNA_P Parameter: Tissue Value: Germinating Seeds
  misc_feature: MA Experiment ID: 108463 Result: Down-regulated in Transcription
  misc_feature: MA Experiment 108463 PARAMETER Experiment Name: At_Germinating_Seeds_cDNA_P Parameter: Age (day) Value: 3 vs. 0
  misc_feature: MA Experiment 108463 PARAMETER Experiment Name: At_Germinating_Seeds_cDNA_P Parameter: Tissue Value: Germinating Seeds
  misc_feature: MA Experiment ID: 108464 Result: Down-regulated in Transcription
  misc_feature: MA Experiment 108464 PARAMETER Experiment Name: At_Germinating_Seeds_cDNA_P Parameter: Age (day) Value: 4 vs. 0
  misc_feature: MA Experiment 108464 PARAMETER Experiment Name: At_Germinating_Seeds_cDNA_P Parameter: Tissue Value: Germinating Seeds
  misc_feature: MA Experiment ID: 108573 Result: Up-regulated in Transcription
  misc_feature: MA Experiment 108573 PARAMETER Experiment Name: At_Drought_cDNA_P Parameter: Timepoint (hr) Value: 6
  misc_feature: MA Experiment 108573 PARAMETER Experiment Name: At_Drought_cDNA_P Parameter: Tissue Value: Aerial
  misc_feature: MA Experiment 108573 PARAMETER Experiment Name: At_Drought_cDNA_P Parameter: Treatment Value: Drought vs. No Drought
  misc_feature: MA Experiment ID: 108576 Result: Down-regulated in Transcription
  misc_feature: MA Experiment 108576 PARAMETER Experiment Name: At_42deg_Heat_cDNA_P Parameter: Temperature (deg C) Value: 42 vs. 22
  misc_feature: MA Experiment 108576 PARAMETER Experiment Name: At_42deg_Heat_cDNA_P Parameter: Timepoint (hr) Value: 1
  misc_feature: MA Experiment 108576 PARAMETER Experiment Name: At_42deg_Heat_cDNA_P Parameter: Tissue Value: Aerial
  misc_feature: MA Experiment ID: 108577 Result: Down-regulated in Transcription
  misc_feature: MA Experiment 108577 PARAMETER Experiment Name: At_42deg_Heat_cDNA_P Parameter: Temperature (deg C) Value: 42 vs. 22
  misc_feature: MA Experiment 108577 PARAMETER Experiment Name: At_42deg_Heat_cDNA_P Parameter: Timepoint (hr) Value: 6
  misc_feature: MA Experiment 108577 PARAMETER Experiment Name: At_42deg_Heat_cDNA_P Parameter: Tissue Value: Aerial
  misc_feature: MA Experiment ID: 20000179 Result: Down-regulated in Transcription
  misc_feature: MA Experiment 20000179 PARAMETER Experiment Name: At_Germinating_Seeds_P Parameter: Age (hr) Value: 6 vs. 0
  misc_feature: MA Experiment 20000179 PARAMETER Experiment Name: At_Germinating_Seeds_P Parameter: Tissue Value: Germinating Seeds
  misc_feature: MA Experiment ID: 20000180 Result: Down-regulated in Transcription
  misc_feature: MA Experiment 20000180 PARAMETER Experiment Name: At_Germinating_Seeds_P Parameter: Age (hr) Value: 24 vs. 0
  misc_feature: MA Experiment 20000180 PARAMETER Experiment Name: At_Germinating_Seeds_P Parameter: Tissue Value: Germinating Seeds
  misc_feature: MA Experiment ID: 20001451 Result: Down-regulated in Transcription
  misc_feature: MA Experiment 20001451 PARAMETER Experiment Name: At_Far-red-induction_P Parameter: Age (day) Value: 7
  misc_feature: MA Experiment 20001451 PARAMETER Experiment Name: At_Far-red-induction_P Parameter: Light Value: Far-red vs. White
  misc_feature: MA Experiment 20001451 PARAMETER Experiment Name: At_Far-red-induction_P Parameter: Organism Value: A. thaliana
  misc_feature: MA Experiment 20001451 PARAMETER Experiment Name: At_Far-red-induction_P Parameter: Plant Line Value: Columbia
  misc_feature: MA Experiment 20001451 PARAMETER Experiment Name: At_Far-red-induction_P Parameter: Timepoint (hr) Value: 24
  misc_feature: MA Experiment 20001451 PARAMETER Experiment Name: At_Far-red-induction_P Parameter: Tissue Value: Whole Plant
  misc_feature: MA Experiment ID: 20001557 Result: Up-regulated in Transcription
  misc_feature: MA Experiment 20001557 PARAMETER Experiment Name: At_Drought_Soil_Dry_P Parameter: Age (day) Value: 27
  misc_feature: MA Experiment 20001557 PARAMETER Experiment Name: At_Drought_Soil_Dry_P Parameter: Organism Value: A. thaliana
  misc_feature: MA Experiment 20001557 PARAMETER Experiment Name: At_Drought_Soil_Dry_P Parameter: Plant Line Value: WS
  misc_feature: MA Experiment 20001557 PARAMETER Experiment Name: At_Drought_Soil_Dry_P Parameter: Post Timepoint (hr) Value: 3
  misc_feature: MA Experiment 20001557 PARAMETER Experiment Name: At_Drought_Soil_Dry_P Parameter: Post-Treatment Value: Re-Water vs. No Drought
  misc_feature: MA Experiment 20001557 PARAMETER Experiment Name: At_Drought_Soil_Dry_P Parameter: Timepoint (day) Value: 13
  misc_feature: MA Experiment 20001557 PARAMETER Experiment Name: At_Drought_Soil_Dry_P Parameter: Treatment Value: Drought vs. No Drought
  misc_feature: MA Experiment ID: 20001558 Result: Up-regulated in Transcription
  misc_feature: MA Experiment 20001558 PARAMETER Experiment Name: At_Drought_Soil_Dry_P Parameter: Age (day) Value: 27
  misc_feature: MA Experiment 20001558 PARAMETER Experiment Name: At_Drought_Soil_Dry_P Parameter: Organism Value: A. thaliana
  misc_feature: MA Experiment 20001558 PARAMETER Experiment Name: At_Drought_Soil_Dry_P Parameter: Plant Line Value: WS
  misc_feature: MA Experiment 20001558 PARAMETER Experiment Name: At_Drought_Soil_Dry_P Parameter: Post Timepoint (hr) Value: 6
  misc_feature: MA Experiment 20001558 PARAMETER Experiment Name: At_Drought_Soil_Dry_P Parameter: Post-Treatment Value: Re-Water vs. No Drought
  misc_feature: MA Experiment 20001558 PARAMETER Experiment Name: At_Drought_Soil_Dry_P Parameter: Timepoint (day) Value: 13
  misc_feature: MA Experiment 20001558 PARAMETER Experiment Name: At_Drought_Soil_Dry_P Parameter: Treatment Value: Drought vs. No Drought
aaggaggggaaaatcagctttttggagaagaaaccaaagaaaacattcgaaaccctaaaatctccattagaattcgaaaatgacaaagaagagaaagctcgaaggagaagaatctaacgaagctgaagaaccgtcgcagaagctgaagcagacgccggaggaggagcagcagcttgtaattaaaaatcaggataatcaaggagacgttgaagaagttgaatacgaggaagtagaggaagagcaagaagaagaagtagaagatgatgacgatgaagatgatggtgatgagaatgaggatcagacggatgggaatcgtatagaggcggcggcgacgtctggatctggcaatcaagaagatgatgacgatgaaccaattcaggatctgttggaaccattttcaaaggagcaagttttgagtcttcttaaggaagcagcggagaagcatgttgatgtagccaatcgaattagggaagtagctgatgaggaccctgttcatcggaagatctttgtgcacggtcttggttgggatacgaaaacagagacgcttattgaagcttttaagcagtacggagagatcgaagattgcaaggctgtgtttgataagatctcagggaaatctaaaggttatggctttattctgtacaagtctcgttcaggtgctcgcaacgcactcaagcagcctcagaagaagattggtagtcgtatgacggcatgccaattggcttctaaaggacctgtctttggtggagctcctatcgctgctgcagctgtttcagcgcctgctcagcattcgaactcggagcatactcagaaaaagatttatgttagtaatgtcggagcagagcttgatccacagaagttgctgatgtttttctcaaagtttggagaaattgaagaaggtcctttgggtcttgataagtatactgggagacctaaaggtttctgtctctttgtttataagtcgtctgaaagcgccaagagggctttggaggagccacacaagacttttgaaggccatatcttgcattgccagaaagctatcgatggtcccaaaccgggcaagcagcagcagcatcaccataacccacacgcctataacaatcctcgttaccaaaggaatgataacaatggttatggtccgcctggaggtcatggacatctcatggctggtaacccagctgggatgggtggtccaacggcacaggtgataaacccggccattggacaggccttgacagctttattggcatctcagggagctggtttggcttttaatccggcaattggacaggctttgttgggttccttggggacagctgctggtgtaaacccagggaatggagttggaatgccaactggttacggtactcaagctatggcaccggggacaatgcctgggtacggtacacaacctgggttgcaaggcggttatcagactccgcaacctggtcaaggcggtacaagtagagggcaacatggtgtcgggccatacggtactccttacatgggtcactaaatgtatcatgtatccatccactcagatatcagaaatcagtgttttaatattggcctggtgattcttctcaagtttataaggagctgatgctaaatgaagtctttatgaaatgttactctttggtcactcctaaggccaaactcataaaaaaccttttaaggagttttagttttcatctacttgtttttcccaaactctctttatgaaattcctaaaaaaaactttgtactactattttcagtgtttatgtctctattttttcagttttctgaatatcccccttagactttcatttgtaaaactaaaaaagcgcaactacgctccatgtgggtctttgc

SEQ ID NO: 97684 - protein, 478 aa, Arabidopsis thaliana
  peptide (1)..(478): Ceres Seq. ID no. 13491357
  misc_feature (247)..(317): Pfam Name: RNA recognition motif. (a.k.a. RRM, RBD, or RNP domain) Pfam Description: RNA recognition motif. (a.k.a. RRM, RBD, or RNP
  misc_feature (1)..(478): Homolog of NCBI NO: 18410591 NR Description: RNA recognition motif (RRM)-containing protein
  misc_feature (1)..(478): Homolog of NCBI NO: 14596195 NR Description: putative protein [Arabidopsis thaliana]
  misc_feature (1)..(477): Homolog of NCBI NO: 15226817 NR Description: RNA recognition motif (RRM)-containing protein
  misc_feature (1)..(459): Homolog of NCBI NO: 21666573 NR Description: RNA-binding protein AKIP1 [Vicia faba]
  misc_feature (15)..(466): Homolog of NCBI NO: 34903096 NR Description: unnamed protein product [Oryza sativa (japonica group)] >gi|6815067|dbj|BAA90354.1| unnamed protein product
  misc_feature (47)..(478): Homolog of NCBI NO: 34903096 NR Description: unnamed protein product [Oryza sativa (japonica group)] >gi|6815067|dbj|BAA90354.1| unnamed protein product
  misc_feature (82)..(429): Homolog of NCBI NO: 34912640 NR Description: P0410E01.24 [Oryza sativa (japonica
  misc_feature (85)..(474): Homolog of NCBI NO: 15232459 NR Description: RNA recognition motif (RRM)-containing protein
  misc_feature (82)..(244): Homolog of NCBI NO: 21595502 NR Description: putative RNA-binding protein [Arabidopsis
  misc_feature (82)..(223): Homolog of NCBI NO: 18399877 NR Description: UBP1 interacting protein, putative [Arabidopsis
MTKKRKLEGEESNEAEEPSQKLKQTPEEEQQLVIKNQDNQGDVEEVEYEEVEEEQEEEVEDDDDEDDGDENEDQTDGNRIEAAATSGSGNQEDDDDEPIQDLLEPFSKEQVLSLLKEAAEKHVDVANRIREVADEDPVHRKIFVHGLGWDTKTETLIEAFKQYGEIEDCKAVFDKISGKSKGYGFILYKSRSGARNALKQPQKKIGSRMTACQLASKGPVFGGAPIAAAAVSAPAQHSNSEHTQKKIYVSNVGAELDPQKLLMFFSKFGEIEEGPLGLDKYTGRPKGFCLFVYKSSESAKRALEEPHKTFEGHILHCQKAIDGPKPGKQQQHHHNPHAYNNPRYQRNDNNGYGPPGGHGHLMAGNPAGMGGPTAQVINPAIGQALTALLASQGAGLAFNPAIGQALLGSLGTAAGVNPGNGVGMPTGYGTQAMAPGTMPGYGTQPGLQGGYQTPQPGQGGTSRGQHGVGPYGTPYMGH

SEQ ID NO: 97685 - protein, 270 aa, Arabidopsis thaliana; identical to SEQ ID NO: 38381
  peptide (1)..(270): Ceres Seq. ID no. 13491358
  misc_feature (39)..(109): Pfam Name: RNA recognition motif. (a.k.a. RRM, RBD, or RNP domain) Pfam Description: RNA recognition motif. (a.k.a. RRM, RBD, or RNP
  misc_feature (1)..(270): Homolog of NCBI NO: 18410591 NR Description: RNA recognition motif (RRM)-containing protein
  misc_feature (1)..(270): Homolog of NCBI NO: 14596195 NR Description: putative protein [Arabidopsis thaliana]
  misc_feature (1)..(269): Homolog of NCBI NO: 15226817 NR Description: RNA recognition motif (RRM)-containing protein
  misc_feature (1)..(251): Homolog of NCBI NO: 21666573 NR Description: RNA-binding protein AKIP1 [Vicia faba]
  misc_feature (1)..(258): Homolog of NCBI NO: 34903096 NR Description: unnamed protein product [Oryza sativa (japonica group)] >gi|6815067|dbj|BAA90354.1| unnamed protein product
  misc_feature (1)..(270): Homolog of NCBI NO: 34903096 NR Description: unnamed protein product [Oryza sativa (japonica group)] >gi|6815067|dbj|BAA90354.1| unnamed protein product
  misc_feature (1)..(221): Homolog of NCBI NO: 34912640 NR Description: P0410E01.24 [Oryza sativa (japonica
  misc_feature (1)..(266): Homolog of NCBI NO: 15232459 NR Description: RNA recognition motif (RRM)-containing protein
  misc_feature (1)..(36): Homolog of NCBI NO: 21595502 NR Description: putative RNA-binding protein [Arabidopsis
  misc_feature (1)..(15): Homolog of NCBI NO: 18399877 NR Description: UBP1 interacting protein, putative [Arabidopsis

SEQ ID NO: 97686 - DNA, 666 bp, Arabidopsis thaliana
  misc_feature (1)..(666): Ceres Seq. ID no. 13491394
  misc_feature: MA Experiment ID: 20000171 Result: Up-regulated in Transcription
  misc_feature: MA Experiment 20000171 PARAMETER Experiment Name: At_42deg_Heat_P Parameter: Age (day) Value: 14
  misc_feature: MA Experiment 20000171 PARAMETER Experiment Name: At_42deg_Heat_P Parameter: Organism Value: A. thaliana
  misc_feature: MA Experiment 20000171 PARAMETER Experiment Name: At_42deg_Heat_P Parameter: Plant Line Value: WS
  misc_feature: MA Experiment 20000171 PARAMETER Experiment Name: At_42deg_Heat_P Parameter: Temperature (deg C) Value: 42 vs. 22
  misc_feature: MA Experiment 20000171 PARAMETER Experiment Name: At_42deg_Heat_P Parameter: Timepoint (hr) Value: 1
  misc_feature: MA Experiment 20000171 PARAMETER Experiment Name: At_42deg_Heat_P Parameter: Tissue Value: Aerial
  misc_feature: MA Experiment ID: 20000173 Result: Up-regulated in Transcription
  misc_feature: MA Experiment 20000173 PARAMETER Experiment Name: At_42deg_Heat_P Parameter: Age (day) Value: 14
  misc_feature: MA Experiment 20000173 PARAMETER Experiment Name: At_42deg_Heat_P Parameter: Organism Value: A. thaliana
  misc_feature: MA Experiment 20000173 PARAMETER Experiment Name: At_42deg_Heat_P Parameter: Plant Line Value: WS
  misc_feature: MA Experiment 20000173 PARAMETER Experiment Name: At_42deg_Heat_P Parameter: Temperature (deg C) Value: 42 vs. 22
  misc_feature: MA Experiment 20000173 PARAMETER Experiment Name: At_42deg_Heat_P Parameter: Timepoint (hr) Value: 6
  misc_feature: MA Experiment 20000173 PARAMETER Experiment Name: At_42deg_Heat_P Parameter: Tissue Value: Aerial
  misc_feature: MA Experiment ID: 20000214 Result: Down-regulated in Transcription
  misc_feature: MA Experiment 20000214 PARAMETER Experiment Name: At_4deg_Cold_P Parameter: Timepoint (hr) Value: 6
  misc_feature: MA Experiment ID: 20000794 Result: Up-regulated in Transcription
  misc_feature: MA Experiment 20000794 PARAMETER Experiment Name: At_Petals_P Parameter: Age (day) Value: 23-25 days
  misc_feature: MA Experiment 20000794 PARAMETER Experiment Name: At_Petals_P Parameter: Plant Line Value: WS
  misc_feature: MA Experiment 20000794 PARAMETER Experiment Name: At_Petals_P Parameter: Tissue Value: Petals vs. Whole plant
  misc_feature: MA Experiment ID: 20001554 Result: Up-regulated in Transcription
  misc_feature: MA Experiment 20001554 PARAMETER Experiment Name: At_Drought_Soil_Dry_P Parameter: Age (day) Value: 21
  misc_feature: MA Experiment 20001554 PARAMETER Experiment Name: At_Drought_Soil_Dry_P Parameter: Organism Value: A. thaliana
  misc_feature: MA Experiment 20001554 PARAMETER Experiment Name: At_Drought_Soil_Dry_P Parameter: Plant Line Value: WS
  misc_feature: MA Experiment 20001554 PARAMETER Experiment Name: At_Drought_Soil_Dry_P Parameter: Post Timepoint (hr) Value: None
  misc_feature: MA Experiment 20001554 PARAMETER Experiment Name: At_Drought_Soil_Dry_P Parameter: Post-Treatment Value: None
  misc_feature: MA Experiment 20001554 PARAMETER Experiment Name: At_Drought_Soil_Dry_P Parameter: Timepoint (day) Value: 7
  misc_feature: MA Experiment 20001554 PARAMETER Experiment Name: At_Drought_Soil_Dry_P Parameter: Treatment Value: Drought vs. No Drought
  misc_feature: MA Experiment ID: 20001555 Result: Up-regulated in Transcription
  misc_feature: MA Experiment 20001555 PARAMETER Experiment Name: At_Drought_Soil_Dry_P Parameter: Age (day) Value: 24
  misc_feature: MA Experiment 20001555 PARAMETER Experiment Name: At_Drought_Soil_Dry_P Parameter: Organism Value: A. thaliana
  misc_feature: MA Experiment 20001555 PARAMETER Experiment Name: At_Drought_Soil_Dry_P Parameter: Plant Line Value: WS
  misc_feature: MA Experiment 20001555 PARAMETER Experiment Name: At_Drought_Soil_Dry_P Parameter: Post Timepoint (hr) Value: None
  misc_feature: MA Experiment 20001555 PARAMETER Experiment Name: At_Drought_Soil_Dry_P Parameter: Post-Treatment Value: None
  misc_feature: MA Experiment 20001555 PARAMETER Experiment Name: At_Drought_Soil_Dry_P Parameter: Timepoint (day) Value: 10
  misc_feature: MA Experiment 20001555 PARAMETER Experiment Name: At_Drought_Soil_Dry_P Parameter: Treatment Value: Drought vs. No Drought
gtctcgcattaagtccaaacactttcatttgtctcctttcgtcaactccacagagatctcctcatggctccaattgctgtcggcgatgtcgtaccagacggaactatctccttcttcgatgagaatgatcaacttcagaccgcctccgttcactctctcgccgccggtaaaaaagtcattctctttggtgttcctggtgctttcactcccacttgcagcatgaagcatgttcctgggttcattgagaaagcagaggagctgaagtcaaagggtgttgatgagatcatttgctttagcgtgaacgatccgtttgtgatgaaagcatggggaaaaacatacccagagaacaaacatgtgaagtttgtagctgatgggtctggagaatacacacaccttctcggacttgagcttgaccttaaagacaagggtcttggtgttaggtcaaggagatttgctctgttacttgatgatctcaaagtgactgtagccaatgtcgaatctggtggcgaattcacagtttccagcgccgatgatatcctcaaggctctctaagaaatgtaccacttgtgttgtctatgtaaaccgctgtatgtgtagtagaggattctatagcttgttctcagacattaaccaaggttgtaataaagcggtttcattgtggaaaag

SEQ ID NO: 97687 - protein, 162 aa, Arabidopsis thaliana; identical to SEQ ID NO: 81388
  peptide (1)..(162): Ceres Seq. ID no. 13491395
  misc_feature (6)..(160): Pfam Name: AhpC/TSA family Pfam Description: AhpC/TSA family
  misc_feature (1)..(162): Homolog of NCBI NO: 15218877 NR Description: type 2 peroxiredoxin -related [Arabidopsis
  misc_feature (1)..(162): Homolog of NCBI NO: 4928472 NR Description: type 2 peroxiredoxin [Brassica rapa subsp.
  misc_feature (1)..(162): Homolog of NCBI NO: 21593881 NR Description: type 2 peroxiredoxin, putative [Arabidopsis
  misc_feature (1)..(162): Homolog of NCBI NO: 15218876 NR Description: type 2 peroxiredoxin -related [Arabidopsis
  misc_feature (1)..(162): Homolog of NCBI NO: 18406870 NR Description: peroxiredoxin -related [Arabidopsis thaliana]
  misc_feature (1)..(162): Homolog of NCBI NO: 4704732 NR Description: peroxiredoxin TPx2 [Arabidopsis thaliana]
  misc_feature (1)..(162): Homolog of NCBI NO: 21553913 NR Description: peroxiredoxin, putative [Arabidopsis thaliana]
  misc_feature (1)..(162): Homolog of NCBI NO: 30841938 NR Description: thioredoxin peroxidase 1 [Lycopersicon esculentum]
  misc_feature (1)..(162): Homolog of NCBI NO: 18654477 NR Description: thioredoxin peroxidase [Capsicum annuum]
  misc_feature (1)..(162): Homolog of NCBI NO: 19548660 NR Description: peroxiredoxin [Populus tremula x Populus

SEQ ID NO: 97688 - protein, 110 aa, Arabidopsis thaliana; identical to SEQ ID NO: 81389
  peptide (1)..(110): Ceres Seq. ID no. 13491396
  misc_feature (1)..(108): Pfam Name: AhpC/TSA family Pfam Description: AhpC/TSA family
  misc_feature (1)..(110): Homolog of NCBI NO: 15218877 NR Description: type 2 peroxiredoxin -related [Arabidopsis
  misc_feature (1)..(110): Homolog of NCBI NO: 4928472 NR Description: type 2 peroxiredoxin [Brassica rapa subsp.
  misc_feature (1)..(110): Homolog of NCBI NO: 21593881 NR Description: type 2 peroxiredoxin, putative [Arabidopsis
  misc_feature (1)..(110): Homolog of NCBI NO: 15218876 NR Description: type 2 peroxiredoxin -related [Arabidopsis
  misc_feature (1)..(110): Homolog of NCBI NO: 18406870 NR Description: peroxiredoxin -related [Arabidopsis thaliana]
  misc_feature (1)..(110): Homolog of NCBI NO: 4704732 NR Description: peroxiredoxin TPx2 [Arabidopsis thaliana]
  misc_feature (1)..(110): Homolog of NCBI NO: 21553913 NR Description: peroxiredoxin, putative [Arabidopsis thaliana]
  misc_feature (1)..(110): Homolog of NCBI NO: 30841938 NR Description: thioredoxin peroxidase 1 [Lycopersicon esculentum]
  misc_feature (1)..(110): Homolog of NCBI NO: 18654477 NR Description: thioredoxin peroxidase [Capsicum annuum]
  misc_feature (1)..(110): Homolog of NCBI NO: 19548660 NR Description: peroxiredoxin [Populus tremula x Populus

SEQ ID NO: 97689 - DNA, 1209 bp, Arabidopsis thaliana
  misc_feature (1)..(1209): Ceres Seq. ID no. 13491420
  misc_feature: MA Experiment ID: 108433 Result: Down-regulated in Transcription
  misc_feature: MA Experiment 108433 PARAMETER Experiment Name: At_rhl_Mutant2_cDNA_P Parameter: Age (day) Value: 7
  misc_feature: MA Experiment 108433 PARAMETER Experiment Name: At_rhl_Mutant2_cDNA_P Parameter: Organism Value: A. thaliana
  misc_feature: MA Experiment 108433 PARAMETER Experiment Name: At_rhl_Mutant2_cDNA_P Parameter: Plant Line Value: rhl Mutant vs. wt landsburg
  misc_feature: MA Experiment 108433 PARAMETER Experiment Name: At_rhl_Mutant2_cDNA_P Parameter: Tissue Value: Roots
  misc_feature: MA Experiment ID: 108434 Result: Down-regulated in Transcription
  misc_feature: MA Experiment 108434 PARAMETER Experiment Name: At_Root_Tips_cDNA_P Parameter: Tissue Value: Root Tips
  misc_feature: MA Experiment ID: 108435 Result: Up-regulated in Transcription
  misc_feature: MA Experiment 108435 PARAMETER Experiment Name: At_stm_Mutants_cDNA_P Parameter: Plant Line Value: wt Landsburg vs stm
  misc_feature: MA Experiment 108435 PARAMETER Experiment Name: At_stm_Mutants_cDNA_P Parameter: Tissue Value: Shoot Apical Meristem Region
  misc_feature: MA Experiment ID: 108461 Result: Up-regulated in Transcription
  misc_feature: MA Experiment 108461 PARAMETER Experiment Name: At_Germinating_Seeds_cDNA_P Parameter: Age (day) Value: 1 vs. 0
  misc_feature: MA Experiment 108461 PARAMETER Experiment Name: At_Germinating_Seeds_cDNA_P Parameter: Tissue Value: Germinating Seeds
  misc_feature: MA Experiment ID: 108462 Result: Up-regulated in Transcription
  misc_feature: MA Experiment 108462 PARAMETER Experiment Name: At_Germinating_Seeds_cDNA_P Parameter: Age (day) Value: 2 vs. 0
  misc_feature: MA Experiment 108462 PARAMETER Experiment Name: At_Germinating_Seeds_cDNA_P Parameter: Tissue Value: Germinating Seeds
  misc_feature: MA Experiment ID: 108463 Result: Up-regulated in Transcription
  misc_feature: MA Experiment 108463 PARAMETER Experiment Name: At_Germinating_Seeds_cDNA_P Parameter: Age (day) Value: 3 vs. 0
  misc_feature: MA Experiment 108463 PARAMETER Experiment Name: At_Germinating_Seeds_cDNA_P Parameter: Tissue Value: Germinating Seeds
  misc_feature: MA Experiment ID: 108464 Result: Up-regulated in Transcription
  misc_feature: MA Experiment 108464 PARAMETER Experiment Name: At_Germinating_Seeds_cDNA_P Parameter: Age (day) Value: 4 vs. 0
  misc_feature: MA Experiment 108464 PARAMETER Experiment Name: At_Germinating_Seeds_cDNA_P Parameter: Tissue Value: Germinating Seeds
  misc_feature: MA Experiment ID: 108473 Result: Up-regulated in Transcription
  misc_feature: MA Experiment 108473 PARAMETER Experiment Name: At_Drought_Flowers_cDNA_P Parameter: Timepoint (hr) Value: 7 d
  misc_feature: MA Experiment 108473 PARAMETER Experiment Name: At_Drought_Flowers_cDNA_P Parameter: Tissue Value: Flower
  misc_feature: MA Experiment 108473 PARAMETER Experiment Name: At_Drought_Flowers_cDNA_P Parameter: Treatment Value: Drought vs. No Drought
  misc_feature: MA Experiment ID: 108474 Result: Up-regulated in Transcription
  misc_feature: MA Experiment 108474 PARAMETER Experiment Name: At_Drought_Flowers_cDNA_P Parameter: Timepoint (hr) Value: null
  misc_feature: MA Experiment 108474 PARAMETER Experiment Name: At_Drought_Flowers_cDNA_P Parameter: Treatment Value: Drought vs. No Drought
  misc_feature: MA Experiment ID: 108488 Result: Up-regulated in Transcription
  misc_feature: MA Experiment ID: 108489 Result: Up-regulated in Transcription
  misc_feature: MA Experiment ID: 108501 Result: Up-regulated in Transcription
  misc_feature: MA Experiment 108501 PARAMETER Experiment Name: At_ap2_floral_buds_cDNA_P Parameter: Plant Line Value: ap2 (Ler.)
  misc_feature: MA Experiment 108501 PARAMETER Experiment Name: At_ap2_floral_buds_cDNA_P Parameter: Tissue Value: Closed Flower
  misc_feature: MA Experiment ID: 108561 Result: Up-regulated in Transcription
  misc_feature: MA Experiment 108561 PARAMETER Experiment Name: At_100uM_ABA_cDNA_P Parameter: Timepoint (hr) Value: 6
  misc_feature: MA Experiment 108561 PARAMETER Experiment Name: At_100uM_ABA_cDNA_P Parameter: Tissue Value: Aerial
  misc_feature: MA Experiment 108561 PARAMETER Experiment Name: At_100uM_ABA_cDNA_P Parameter: Treatment Value: 100uM ABA vs. No Treatment
  misc_feature: MA Experiment ID: 108573 Result: Up-regulated in Transcription
  misc_feature: MA Experiment 108573 PARAMETER Experiment Name: At_Drought_cDNA_P Parameter: Timepoint (hr) Value: 6
  misc_feature: MA Experiment 108573 PARAMETER Experiment Name: At_Drought_cDNA_P Parameter: Tissue Value: Aerial
  misc_feature: MA Experiment 108573 PARAMETER Experiment Name: At_Drought_cDNA_P Parameter: Treatment Value: Drought vs. No Drought
  misc_feature: MA Experiment ID: 108594 Result: Down-regulated in Transcription
  misc_feature: MA Experiment 108594 PARAMETER Experiment Name: At_Ler-rhl_Root_cDNA_P Parameter: Plant Line Value: null
  misc_feature: MA Experiment ID: 108605 Result: Up-regulated in Transcription
  misc_feature: MA Experiment 108605 PARAMETER Experiment Name: At_100uM_ABA_cDNA_P Parameter: Timepoint (hr) Value: 6
  misc_feature: MA Experiment 108605 PARAMETER Experiment Name: At_100uM_ABA_cDNA_P Parameter: Tissue Value: Aerial
  misc_feature: MA Experiment 108605 PARAMETER Experiment Name: At_100uM_ABA_cDNA_P Parameter: Treatment Value: 100uM ABA vs. No Treatment
  misc_feature: MA Experiment ID: 108607 Result: Up-regulated in Transcription
  misc_feature: MA Experiment 108607 PARAMETER Experiment Name: At_100uM_ABA_cDNA_P Parameter: Timepoint (hr) Value: 4
  misc_feature: MA Experiment 108607 PARAMETER Experiment Name: At_100uM_ABA_cDNA_P Parameter: Tissue Value: Aerial
  misc_feature: MA Experiment 108607 PARAMETER Experiment Name: At_100uM_ABA_cDNA_P Parameter: Treatment Value: 100uM ABA vs. No Treatment
  misc_feature: MA Experiment ID: 108609 Result: Up-regulated in Transcription
  misc_feature: MA Experiment 108609 PARAMETER Experiment Name: At_100uM_ABA_cDNA_P Parameter: Timepoint (hr) Value: 24
  misc_feature: MA Experiment 108609 PARAMETER Experiment Name: At_100uM_ABA_cDNA_P Parameter: Tissue Value: Aerial
  misc_feature: MA Experiment 108609 PARAMETER Experiment Name: At_100uM_ABA_cDNA_P Parameter: Treatment Value: 100uM ABA vs. No Treatment
  misc_feature: MA Experiment ID: 20000069 Result: Up-regulated in Transcription
  misc_feature: MA Experiment 20000069 PARAMETER Experiment Name: At_100uM_ABA_Mutants_cDNA_P Parameter: Plant Line Value: CS23
  misc_feature: MA Experiment 20000069 PARAMETER Experiment Name: At_100uM_ABA_Mutants_cDNA_P Parameter: Timepoint (hr) Value: 6
  misc_feature: MA Experiment 20000069 PARAMETER Experiment Name: At_100uM_ABA_Mutants_cDNA_P Parameter: Tissue Value: Aerial
  misc_feature: MA Experiment 20000069 PARAMETER Experiment Name: At_100uM_ABA_Mutants_cDNA_P Parameter: Treatment Value: 100uM ABA vs. No Treatment
  misc_feature: MA Experiment ID: 20000070 Result: Up-regulated in Transcription
  misc_feature: MA Experiment 20000070 PARAMETER Experiment Name: At_100uM_ABA_Mutants_cDNA_P Parameter: Plant Line Value: CS24
  misc_feature: MA Experiment 20000070 PARAMETER Experiment Name: At_100uM_ABA_Mutants_cDNA_P Parameter: Timepoint (hr) Value: 6
  misc_feature: MA Experiment 20000070 PARAMETER Experiment Name: At_100uM_ABA_Mutants_cDNA_P Parameter: Tissue Value: Aerial
  misc_feature: MA Experiment 20000070 PARAMETER Experiment Name: At_100uM_ABA_Mutants_cDNA_P Parameter: Treatment Value: 100uM ABA vs. No Treatment
  misc_feature: MA Experiment ID: 20000071 Result: Up-regulated in Transcription
  misc_feature: MA Experiment 20000071 PARAMETER Experiment Name: At_100uM_ABA_Mutants_cDNA_P Parameter: Plant Line Value: CS8104
  misc_feature: MA Experiment 20000071 PARAMETER Experiment Name: At_100uM_ABA_Mutants_cDNA_P Parameter: Timepoint (hr) Value: 6
  misc_feature: MA Experiment 20000071 PARAMETER Experiment Name: At_100uM_ABA_Mutants_cDNA_P Parameter: Tissue Value: Aerial
  misc_feature: MA Experiment 20000071 PARAMETER Experiment Name: At_100uM_ABA_Mutants_cDNA_P Parameter: Treatment Value: 100uM ABA vs. No Treatment
  misc_feature: MA Experiment ID: 20000072 Result: Up-regulated in Transcription
  misc_feature: MA Experiment 20000072 PARAMETER Experiment Name: At_100uM_ABA_Mutants_cDNA_P Parameter: Plant Line Value: CS8105
  misc_feature: MA Experiment 20000072 PARAMETER Experiment Name: At_100uM_ABA_Mutants_cDNA_P Parameter: Timepoint (hr) Value: 6
  misc_feature: MA Experiment 20000072 PARAMETER Experiment Name: At_100uM_ABA_Mutants_cDNA_P Parameter: Tissue Value: Aerial
  misc_feature: MA Experiment 20000072 PARAMETER Experiment Name: At_100uM_ABA_Mutants_cDNA_P Parameter: Treatment Value: 100uM ABA vs. No Treatment
  misc_feature: MA Experiment ID: 20000086 Result: Up-regulated in Transcription
  misc_feature: MA Experiment 20000086 PARAMETER Experiment Name: At_100uM_ABA_Mutants_cDNA_P Parameter: Plant Line Value: CS22
  misc_feature: MA Experiment 20000086 PARAMETER Experiment Name: At_100uM_ABA_Mutants_cDNA_P Parameter: Timepoint (hr) Value: 6
  misc_feature: MA Experiment 20000086 PARAMETER Experiment Name: At_100uM_ABA_Mutants_cDNA_P Parameter: Tissue Value: Aerial
  misc_feature: MA Experiment 20000086 PARAMETER Experiment Name: At_100uM_ABA_Mutants_cDNA_P Parameter: Treatment Value: 100uM ABA vs. No Treatment
  misc_feature: MA Experiment ID: 20000087 Result: Up-regulated in Transcription
  misc_feature: MA Experiment 20000087 PARAMETER Experiment Name: At_100uM_ABA_Mutants_cDNA_P Parameter: Plant Line Value: WS
  misc_feature: MA Experiment 20000087 PARAMETER Experiment Name: At_100uM_ABA_Mutants_cDNA_P Parameter: Timepoint (hr) Value: 6
  misc_feature: MA Experiment 20000087 PARAMETER Experiment Name: At_100uM_ABA_Mutants_cDNA_P Parameter: Tissue Value: Aerial
  misc_feature: MA Experiment 20000087 PARAMETER Experiment Name: At_100uM_ABA_Mutants_cDNA_P Parameter: Treatment Value: 100uM ABA vs. No Treatment
  misc_feature: MA Experiment ID: 20000088 Result: Up-regulated in Transcription
  misc_feature: MA Experiment 20000088 PARAMETER Experiment Name: At_100uM_ABA_Mutants_cDNA_P Parameter: Plant Line Value: Landsberg
  misc_feature: MA Experiment 20000088 PARAMETER Experiment Name: At_100uM_ABA_Mutants_cDNA_P Parameter: Timepoint (hr) Value: 6
  misc_feature: MA Experiment 20000088 PARAMETER Experiment Name: At_100uM_ABA_Mutants_cDNA_P Parameter: Tissue Value: Aerial
  misc_feature: MA Experiment 20000088 PARAMETER Experiment Name: At_100uM_ABA_Mutants_cDNA_P Parameter: Treatment Value: 100uM ABA vs. No Treatment
  misc_feature: MA Experiment ID: 20000090 Result: Up-regulated in Transcription
  misc_feature: MA Experiment ID: 20000117 Result: Up-regulated in Transcription
  misc_feature: MA Experiment 20000117 PARAMETER Experiment Name: At_100uM_ABA_Mutants_cDNA_P Parameter: Plant Line Value: Columbia
  misc_feature: MA Experiment 20000117 PARAMETER Experiment Name: At_100uM_ABA_Mutants_cDNA_P Parameter: Timepoint (hr) Value: 6
  misc_feature: MA Experiment 20000117 PARAMETER Experiment Name: At_100uM_ABA_Mutants_cDNA_P Parameter: Tissue Value: Aerial
  misc_feature: MA Experiment 20000117 PARAMETER Experiment Name: At_100uM_ABA_Mutants_cDNA_P Parameter: Treatment Value: 100uM ABA vs. No Treatment
  misc_feature: MA Experiment ID: 20000169 Result: Up-regulated in Transcription
  misc_feature: MA Experiment 20000169 PARAMETER Experiment Name: At_100uM_ABA_P Parameter: Age (day) Value: 14
  misc_feature: MA Experiment 20000169 PARAMETER Experiment Name: At_100uM_ABA_P Parameter: Organism Value: A. thaliana
  misc_feature: MA Experiment 20000169 PARAMETER Experiment Name: At_100uM_ABA_P Parameter: Plant Line Value: WS
  misc_feature: MA Experiment 20000169 PARAMETER Experiment Name: At_100uM_ABA_P Parameter: Timepoint (hr) Value: 6
  misc_feature: MA Experiment 20000169 PARAMETER Experiment Name: At_100uM_ABA_P Parameter: Tissue Value: Aerial
  misc_feature: MA Experiment 20000169 PARAMETER Experiment Name: At_100uM_ABA_P Parameter: Treatment Value: 100uM ABA vs. No Treatment
  misc_feature: MA Experiment ID: 20000180 Result: Up-regulated in Transcription
  misc_feature: MA Experiment 20000180 PARAMETER Experiment Name: At_Germinating_Seeds_P Parameter: Age (hr) Value: 24 vs. 0
  misc_feature: MA Experiment 20000180 PARAMETER Experiment Name: At_Germinating_Seeds_P Parameter: Tissue Value: Germinating Seeds
  misc_feature: MA Experiment ID: 20000185 Result: Up-regulated in Transcription
  misc_feature: MA Experiment 20000185 PARAMETER Experiment Name: At_Roots__P Parameter: Age (day) Value: 7 vs. 21
  misc_feature: MA Experiment 20000185 PARAMETER Experiment Name: At_Roots__P Parameter: Organism Value: A. thaliana
  misc_feature: MA Experiment 20000185 PARAMETER Experiment Name: At_Roots__P Parameter: Tissue Value: Roots vs. Whole Plant
  misc_feature: MA Experiment ID: 20000234 Result: Down-regulated in Transcription
  misc_feature: MA Experiment 20000234 PARAMETER Experiment Name: At_Siliques_P Parameter: Age (day) Value: 21
  misc_feature: MA Experiment 20000234 PARAMETER Experiment Name: At_Siliques_P Parameter: Organism Value: A. thaliana
  misc_feature: MA Experiment 20000234 PARAMETER Experiment Name: At_Siliques_P Parameter: Plant Line Value: WS
  misc_feature: MA Experiment 20000234 PARAMETER Experiment Name: At_Siliques_P Parameter: Tissue Value: Less Than 5mm Siliques vs. Whole Plant
  misc_feature: MA Experiment ID: 20000264 Result: Down-regulated in Transcription
  misc_feature: MA Experiment 20000264 PARAMETER Experiment Name: At_Open_Flower_P Parameter: Age (day) Value: 21
  misc_feature: MA Experiment 20000264 PARAMETER Experiment Name: At_Open_Flower_P Parameter: Plant Line Value: WS
  misc_feature: MA Experiment 20000264 PARAMETER Experiment Name: At_Open_Flower_P Parameter: Tissue Value: Open Flower vs. Whole Plant
  misc_feature: MA Experiment ID: 20000265 Result: Down-regulated in Transcription
  misc_feature: MA Experiment 20000265 PARAMETER Experiment Name: At_Open_Flower_P Parameter: Age (day) Value: 21
  misc_feature: MA Experiment 20000265 PARAMETER Experiment Name: At_Open_Flower_P Parameter: Plant Line Value: WS
  misc_feature: MA Experiment 20000265 PARAMETER Experiment Name: At_Open_Flower_P Parameter: Tissue Value: Closed Flower vs. Whole Plant
  misc_feature: MA Experiment ID: 20000267 Result: Up-regulated in Transcription
  misc_feature: MA Experiment 20000267 PARAMETER Experiment Name: At_Drought_P Parameter: Age (day) Value: 7
  misc_feature: MA Experiment 20000267 PARAMETER Experiment Name: At_Drought_P Parameter: Organism Value: A. thaliana
  misc_feature: MA Experiment 20000267 PARAMETER Experiment Name: At_Drought_P Parameter: Plant Line Value: WS
  misc_feature: MA Experiment 20000267 PARAMETER Experiment Name: At_Drought_P Parameter: Timepoint (hr) Value: 6
  misc_feature: MA Experiment 20000267 PARAMETER Experiment Name: At_Drought_P Parameter: Tissue Value: Whole Plant
  misc_feature: MA Experiment 20000267 PARAMETER Experiment Name: At_Drought_P Parameter: Treatment Value: Drought vs. No Drought
  misc_feature: MA Experiment ID: 20000268 Result: Up-regulated in Transcription
  misc_feature: MA Experiment 20000268 PARAMETER Experiment Name: At_100mM_NaCl__P Parameter: Age (day) Value: 14
  misc_feature: MA Experiment 20000268 PARAMETER Experiment Name: At_100mM_NaCl__P Parameter: Organism Value: A. thaliana
  misc_feature: MA Experiment 20000268 PARAMETER Experiment Name: At_100mM_NaCl__P Parameter: Plant Line Value: WS
  misc_feature: MA Experiment 20000268 PARAMETER Experiment Name: At_100mM_NaCl__P Parameter: Timepoint (hr) Value: 6
  misc_feature: MA Experiment 20000268 PARAMETER Experiment Name: At_100mM_NaCl__P Parameter: Tissue Value: Whole Plant
  misc_feature: MA Experiment 20000268 PARAMETER Experiment Name: At_100mM_NaCl__P Parameter: Treatment Value: 100mM NaCl vs. No Treatment
  misc_feature: MA Experiment ID: 20000286 Result: Down-regulated in Transcription
  misc_feature: MA Experiment 20000286 PARAMETER Experiment Name: At_Open_Flower_P Parameter: Age (day) Value: 21
  misc_feature: MA Experiment 20000286 PARAMETER Experiment Name: At_Open_Flower_P Parameter: Plant Line Value: WS
  misc_feature: MA Experiment 20000286 PARAMETER Experiment Name: At_Open_Flower_P Parameter: Tissue Value: Half Open vs. Whole Plant
  misc_feature: MA Experiment ID: 20000308 Result: Up-regulated in Transcription
  misc_feature: MA Experiment 20000308 PARAMETER Experiment Name: At_100mM_NaCl__P Parameter: Age (day) Value: 17
  misc_feature: MA Experiment 20000308 PARAMETER Experiment Name: At_100mM_NaCl__P Parameter: Organism Value: A. thaliana
  misc_feature: MA Experiment 20000308 PARAMETER Experiment Name: At_100mM_NaCl__P Parameter: Plant Line Value: WS
  misc_feature: MA Experiment 20000308 PARAMETER Experiment Name: At_100mM_NaCl__P Parameter: Timepoint (hr) Value: 72
  misc_feature: MA Experiment 20000308 PARAMETER Experiment Name: At_100mM_NaCl__P Parameter: Tissue Value: Whole Plant
  misc_feature: MA Experiment 20000308 PARAMETER Experiment Name: At_100mM_NaCl__P Parameter: Treatment Value: 100mM NaCl vs. No Treatment
  misc_feature: MA Experiment ID: 20000437 Result: Up-regulated in Transcription
  misc_feature: MA Experiment 20000437 PARAMETER Experiment Name: At_Drought_P Parameter: Age (day) Value: 8
  misc_feature: MA Experiment 20000437 PARAMETER Experiment Name: At_Drought_P Parameter: Organism Value: A. thaliana
  misc_feature: MA Experiment 20000437 PARAMETER Experiment Name: At_Drought_P Parameter: Plant Line Value: WS
  misc_feature: MA Experiment 20000437 PARAMETER Experiment Name: At_Drought_P Parameter: Timepoint (hr) Value: 24
  misc_feature: MA Experiment 20000437 PARAMETER Experiment Name: At_Drought_P Parameter: Tissue Value: Whole Plant
  misc_feature: MA Experiment 20000437 PARAMETER Experiment Name: At_Drought_P Parameter: Treatment Value: Drought vs. No Drought
  misc_feature: MA Experiment ID: 20000441 Result: Down-regulated in Transcription
  misc_feature: MA Experiment 20000441 PARAMETER Experiment Name: At_1uM_BR-BRZ__P Parameter: Tissue Value: Shoot Apices
  misc_feature: MA Experiment 20000441 PARAMETER Experiment Name: At_1uM_BR-BRZ__P Parameter: Treatment Value: 1uM BR vs. No Treatment
  misc_feature: MA Experiment ID: 20000451 Result: Up-regulated in Transcription
  misc_feature: MA Experiment 20000451 PARAMETER Experiment Name: At_CS6879_Shoots-Roots_P Parameter: Age (day) Value: 14
  misc_feature: MA Experiment 20000451 PARAMETER Experiment Name: At_CS6879_Shoots-Roots_P Parameter: Organism Value: A. thaliana
  misc_feature: MA Experiment 20000451 PARAMETER Experiment Name: At_CS6879_Shoots-Roots_P Parameter: Plant Line Value: CS6879 vs. WS
  misc_feature: MA Experiment 20000451 PARAMETER Experiment Name: At_CS6879_Shoots-Roots_P Parameter: Tissue Value: Roots
  misc_feature: MA Experiment ID: 20000452 Result: Up-regulated in Transcription
  misc_feature: MA Experiment 20000452 PARAMETER Experiment Name: At_CS6879_Shoots-Roots_P Parameter: Age (day) Value: 14
  misc_feature: MA Experiment 20000452 PARAMETER Experiment Name: At_CS6879_Shoots-Roots_P Parameter: Organism Value: A. thaliana
  misc_feature: MA Experiment 20000452 PARAMETER Experiment Name: At_CS6879_Shoots-Roots_P Parameter: Plant Line Value: CS6879 vs. WS
  misc_feature: MA Experiment 20000452 PARAMETER Experiment Name: At_CS6879_Shoots-Roots_P Parameter: Tissue Value: Shoots
  misc_feature: MA Experiment ID: 20000453 Result: Up-regulated in Transcription
  misc_feature: MA Experiment 20000453 PARAMETER Experiment Name: At_100uM_ABA_P Parameter: Age (day) Value: 15
  misc_feature: MA Experiment 20000453 PARAMETER Experiment Name: At_100uM_ABA_P Parameter: Organism Value: A. thaliana
  misc_feature: MA Experiment 20000453 PARAMETER Experiment Name: At_100uM_ABA_P Parameter: Plant Line Value: WS
  misc_feature: MA Experiment 20000453 PARAMETER Experiment Name: At_100uM_ABA_P Parameter: Timepoint (hr) Value: 24
  misc_feature: MA Experiment 20000453 PARAMETER Experiment Name: At_100uM_ABA_P Parameter: Tissue Value: Aerial
  misc_feature: MA Experiment 20000453 PARAMETER Experiment Name: At_100uM_ABA_P Parameter: Treatment Value: 100uM ABA vs. No Treatment
  misc_feature: MA Experiment ID: 20000455 Result: Up-regulated in Transcription
  misc_feature: MA Experiment 20000455 PARAMETER Experiment Name: At_100uM_ABA_P Parameter: Age (day) Value: 16
  misc_feature: MA Experiment 20000455 PARAMETER Experiment Name: At_100uM_ABA_P Parameter: Organism Value: A. thaliana
  misc_feature: MA Experiment 20000455 PARAMETER Experiment Name: At_100uM_ABA_P Parameter: Plant Line Value: WS
  misc_feature: MA Experiment 20000455 PARAMETER Experiment Name: At_100uM_ABA_P Parameter: Timepoint (hr) Value: 48
  misc_feature: MA Experiment 20000455 PARAMETER Experiment Name: At_100uM_ABA_P Parameter: Tissue Value: Aerial
  misc_feature: MA Experiment 20000455 PARAMETER Experiment Name: At_100uM_ABA_P Parameter: Treatment Value: 100uM ABA vs. No Treatment
  misc_feature: MA Experiment ID: 20000794 Result: Down-regulated in Transcription
  misc_feature: MA Experiment 20000794 PARAMETER Experiment Name: At_Petals_P Parameter: Age (day) Value: 23-25 days
  misc_feature: MA Experiment 20000794 PARAMETER Experiment Name: At_Petals_P Parameter: Plant Line Value: WS
  misc_feature: MA Experiment 20000794 PARAMETER Experiment Name: At_Petals_P Parameter: Tissue Value: Petals vs. Whole plant
  misc_feature: MA Experiment ID: 20001554 Result: Up-regulated in Transcription
  misc_feature: MA Experiment 20001554 PARAMETER Experiment Name: At_Drought_Soil_Dry_P Parameter: Age (day) Value: 21
  misc_feature: MA Experiment 20001554 PARAMETER Experiment Name: At_Drought_Soil_Dry_P Parameter: Organism Value: A. thaliana
  misc_feature: MA Experiment 20001554 PARAMETER Experiment Name: At_Drought_Soil_Dry_P Parameter: Plant Line Value: WS
  misc_feature: MA Experiment 20001554 PARAMETER Experiment Name: At_Drought_Soil_Dry_P Parameter: Post Timepoint (hr) Value: None
  misc_feature: MA Experiment 20001554 PARAMETER Experiment Name: At_Drought_Soil_Dry_P Parameter: Post-Treatment Value: None
  misc_feature: MA Experiment 20001554 PARAMETER Experiment Name: At_Drought_Soil_Dry_P Parameter: Timepoint (day) Value: 7
  misc_feature: MA Experiment 20001554 PARAMETER Experiment Name: At_Drought_Soil_Dry_P Parameter: Treatment Value: Drought vs. No Drought
  misc_feature: MA Experiment ID: 20001555 Result: Up-regulated in Transcription
  misc_feature: MA Experiment 20001555 PARAMETER Experiment Name: At_Drought_Soil_Dry_P Parameter: Age (day) Value: 24
  misc_feature: MA Experiment 20001555 PARAMETER Experiment Name: At_Drought_Soil_Dry_P Parameter: Organism Value: A. thaliana
  misc_feature: MA Experiment 20001555 PARAMETER Experiment Name: At_Drought_Soil_Dry_P Parameter: Plant Line Value: WS
  misc_feature: MA Experiment 20001555 PARAMETER Experiment Name: At_Drought_Soil_Dry_P Parameter: Post Timepoint (hr) Value: None
  misc_feature: MA Experiment 20001555 PARAMETER Experiment Name: At_Drought_Soil_Dry_P Parameter: Post-Treatment Value: None
  misc_feature: MA Experiment 20001555 PARAMETER Experiment Name: At_Drought_Soil_Dry_P Parameter: Timepoint (day) Value: 10
  misc_feature: MA Experiment 20001555 PARAMETER Experiment Name: At_Drought_Soil_Dry_P Parameter: Treatment Value: Drought vs. No Drought
  misc_feature: MA Experiment ID: 20001556 Result: Up-regulated in Transcription
  misc_feature: MA Experiment 20001556 PARAMETER Experiment Name: At_Drought_Soil_Dry_P Parameter: Age (day) Value: 26
  misc_feature: MA Experiment 20001556 PARAMETER Experiment Name: At_Drought_Soil_Dry_P Parameter: Organism Value: A. thaliana
  misc_feature: MA Experiment 20001556 PARAMETER Experiment Name: At_Drought_Soil_Dry_P Parameter: Plant Line Value: WS
  misc_feature: MA Experiment 20001556 PARAMETER Experiment Name: At_Drought_Soil_Dry_P Parameter: Post Timepoint (hr) Value: None
  misc_feature: MA Experiment 20001556 PARAMETER Experiment Name: At_Drought_Soil_Dry_P Parameter: Post-Treatment Value: None
  misc_feature: MA Experiment 20001556 PARAMETER Experiment Name: At_Drought_Soil_Dry_P Parameter: Timepoint (day) Value: 12
  misc_feature: MA Experiment 20001556 PARAMETER Experiment Name: At_Drought_Soil_Dry_P Parameter: Treatment Value: Drought vs. No Drought
  misc_feature: MA Experiment ID: 20001559 Result: Up-regulated in Transcription
  misc_feature: MA Experiment 20001559 PARAMETER Experiment Name: At_Drought_Soil_Dry_P Parameter: Age (day) Value: 28
  misc_feature: MA Experiment 20001559 PARAMETER Experiment Name: At_Drought_Soil_Dry_P Parameter: Organism Value: A. thaliana
  misc_feature: MA Experiment 20001559 PARAMETER Experiment Name: At_Drought_Soil_Dry_P Parameter: Plant Line Value: WS
  misc_feature: MA Experiment 20001559 PARAMETER Experiment Name: At_Drought_Soil_Dry_P Parameter: Post Timepoint (hr) Value: 29
  misc_feature: MA Experiment 20001559 PARAMETER Experiment Name: At_Drought_Soil_Dry_P Parameter: Post-Treatment Value: Re-Water vs. No Drought
  misc_feature: MA Experiment 20001559 PARAMETER Experiment Name: At_Drought_Soil_Dry_P Parameter: Timepoint (day) Value: 14
  misc_feature: MA Experiment 20001559 PARAMETER Experiment Name: At_Drought_Soil_Dry_P Parameter: Treatment Value: Drought vs. No Drought
  misc_feature: MA Experiment ID: 20001904 Result: Up-regulated in Transcription
  misc_feature: MA Experiment 20001904 PARAMETER Experiment Name: At_Drought_Reproduction_P Parameter: Age (day) Value: 37
  misc_feature: MA Experiment 20001904 PARAMETER Experiment Name: At_Drought_Reproduction_P Parameter: Organism Value: A. thaliana
  misc_feature: MA Experiment 20001904 PARAMETER Experiment Name: At_Drought_Reproduction_P Parameter: Plant Line Value: WS
  misc_feature: MA Experiment 20001904 PARAMETER Experiment Name: At_Drought_Reproduction_P Parameter: Timepoint (day) Value: 7
  misc_feature: MA Experiment 20001904 PARAMETER Experiment Name: At_Drought_Reproduction_P Parameter: Tissue Value: Rosettes
  misc_feature: MA Experiment 20001904 PARAMETER Experiment Name: At_Drought_Reproduction_P Parameter: Treatment Value: Drought vs. No Drought
  misc_feature: MA Experiment ID: 20001905 Result: Up-regulated in Transcription
  misc_feature: MA Experiment 20001905 PARAMETER Experiment Name: At_Drought_Reproduction_P Parameter: Age (day) Value: 40
  misc_feature: MA Experiment 20001905 PARAMETER Experiment Name: At_Drought_Reproduction_P Parameter: Organism Value: A. thaliana
  misc_feature: MA Experiment 20001905 PARAMETER Experiment Name: At_Drought_Reproduction_P Parameter: Plant Line Value: WS
  misc_feature: MA Experiment 20001905 PARAMETER Experiment Name: At_Drought_Reproduction_P Parameter: Timepoint (day) Value: 10
  misc_feature: MA Experiment 20001905 PARAMETER Experiment Name: At_Drought_Reproduction_P Parameter: Tissue Value: Rosettes
  misc_feature: MA Experiment 20001905 PARAMETER Experiment Name: At_Drought_Reproduction_P Parameter: Treatment Value: Drought vs. No Drought
  misc_feature: MA Experiment ID: 20001906 Result: Up-regulated in Transcription
  misc_feature: MA Experiment 20001906 PARAMETER Experiment Name: At_Drought_Reproduction_P Parameter: Age (day) Value: 35
  misc_feature: MA Experiment 20001906 PARAMETER Experiment Name: At_Drought_Reproduction_P Parameter: Organism Value: A. thaliana
  misc_feature: MA Experiment 20001906 PARAMETER Experiment Name: At_Drought_Reproduction_P Parameter: Plant Line Value: WS
  misc_feature: MA Experiment 20001906 PARAMETER Experiment Name: At_Drought_Reproduction_P Parameter: Timepoint (day) Value: 5
  misc_feature: MA Experiment 20001906 PARAMETER Experiment Name: At_Drought_Reproduction_P Parameter: Tissue Value: Siliques
  misc_feature: MA Experiment 20001906 PARAMETER Experiment Name: At_Drought_Reproduction_P Parameter: Treatment Value: Drought vs. No Drought
  misc_feature: MA Experiment ID: 20001910 Result: Up-regulated in Transcription
  misc_feature: MA Experiment 20001910 PARAMETER Experiment Name: At_Drought_Reproduction_P Parameter: Age (day) Value: 37
  misc_feature: MA Experiment 20001910 PARAMETER Experiment Name: At_Drought_Reproduction_P Parameter: Organism Value: A. thaliana
  misc_feature: MA Experiment 20001910 PARAMETER Experiment Name: At_Drought_Reproduction_P Parameter: Plant Line Value: WS
  misc_feature: MA Experiment 20001910 PARAMETER Experiment Name: At_Drought_Reproduction_P Parameter: Timepoint (day) Value: 7
  misc_feature: MA Experiment 20001910 PARAMETER Experiment Name: At_Drought_Reproduction_P Parameter: Tissue Value: Flowers
  misc_feature: MA Experiment 20001910 PARAMETER Experiment Name: At_Drought_Reproduction_P Parameter: Treatment Value: Drought vs. No Drought
  misc_feature: MA Experiment ID: 20001911 Result: Up-regulated in Transcription
  misc_feature: MA Experiment 20001911 PARAMETER Experiment Name: At_Drought_Reproduction_P Parameter: Age (day) Value: 40
  misc_feature: MA Experiment 20001911 PARAMETER Experiment Name: At_Drought_Reproduction_P Parameter: Organism Value: A. thaliana
  misc_feature: MA Experiment 20001911 PARAMETER Experiment Name: At_Drought_Reproduction_P Parameter: Plant Line Value: WS
  misc_feature: MA Experiment 20001911 PARAMETER Experiment Name: At_Drought_Reproduction_P Parameter: Timepoint (day) Value: 10
  misc_feature: MA Experiment 20001911 PARAMETER Experiment Name: At_Drought_Reproduction_P Parameter: Tissue Value: Flowers
  misc_feature: MA Experiment 20001911 PARAMETER Experiment Name: At_Drought_Reproduction_P Parameter: Treatment Value: Drought vs. No Drought
caacatacacaaaacactaaaagtagaagaaaaatggcgactcttaaggtttctgattctgttcctgctccttctgatgatgctgagcaattgagaaccgcttttgaaggatggggtacgaacgaggacttgatcatatcaatcttggctcacagaagtgctgaacagaggaaagtcatcaggcaagcataccacgaaacctacggcgaagaccttctcaagactcttgacaaggagctctctaacgatttcgagagagctatcttgttgtggactcttgaacccggtgagcgtgatgctttattggctaatgaagctacaaaaagatggacttcaagcaaccaagttcttatggaagttgcttgcacaaggacatcaacgcagctgcttcacgctaggcaagcttaccatgctcgctacaagaagtctcttgaagaggacgttgctcaccacactaccggtgacttcagaaagcttttggtttctcttgttacctcatacaggtacgaaggagatgaagtgaacatgacattggctaagcaagaagctaagctggtccatgagaaaatcaaggacaagcactacaatgatgaggatgttattagaatcttgtccacaagaagcaaagctcagatcaatgctacttttaaccgttaccaagatgatcatggcgaggaaattctcaagagtcttgaggaaggagatgatgatgacaagttccttgcacttttgaggtcaaccattcagtgcttgacaagaccagagctttactttgtcgatgttcttcgttcagcaatcaacaaaactggaactgatgaaggagcactcactagaattgtgaccacaagagctgagattgacttgaaggtcattggagaggagtaccagcgcaggaacagcattcctttggagaaagctattaccaaagacactcgtggagattacgagaagatgctcgtcgcacttctcggtgaagatgatgcttaatcaatcaatcctccacagagaaacataagctgctctacagcttctgttatctcttatctccctctctctctctttgatgagtttcaaatcgtttgattttgtttctacaaaaaccttgtttgtttctgttgtgtgttttgagttcctaaataatgcaaaagagagagacagagagaaccagtgtggtctcttaagttatatatatatgaagagcattggcct

SEQ ID NO: 97690 - protein, 328 aa, Arabidopsis thaliana; identical to SEQ ID NO: 36034
  peptide (1)..(328): Ceres Seq. ID no. 13491421
  misc_feature (24)..(91): Pfam Name: Annexin Pfam Description: Annexin
  misc_feature (12)..(328): Homolog of NCBI NO: 15220216 NR Description: Ca2+-dependent membrane-binding protein annexin
  misc_feature (12)..(328): Homolog of NCBI NO: 1621539 NR Description: annexin-like protein
  misc_feature (14)..(328): Homolog of NCBI NO: 1429207 NR Description: annexin [Arabidopsis thaliana]
  misc_feature (12)..(324): Homolog of NCBI NO: 7484723 NR Description: fiber annexin - upland cotton
  misc_feature (13)..(324): Homolog of NCBI NO: 15214410 NR Description: annexin [Gossypium hirsutum]
  misc_feature (13)..(324): Homolog of NCBI NO: 33357398 NR Description: Chain A, Annexin Gh1 From Cotton
  misc_feature (12)..(328): Homolog of NCBI NO: 2459926 NR Description: annexin [Lavatera thuringiaca]
  misc_feature (13)..(324): Homolog of NCBI NO: 7441510 NR Description: annexin - upland cotton (fragment)
  misc_feature (12)..(327): Homolog of NCBI NO: 2129923 NR Description: annexin - pepper >gi|1071660|emb|CAA63710.1|
  misc_feature (12)..(327): Homolog of NCBI NO: 12084607 NR Description: Chain A, Crystal Structure Of Annexin 24(Ca32) Capsicum Annuum >gi|12084608|pdb|1DK5|B Chain B, Crystal

SEQ ID NO: 97691 - protein, 317 aa, Arabidopsis thaliana; identical to SEQ ID NO: 35542
  peptide (1)..(317): Ceres Seq. ID no. 13491422
  misc_feature (13)..(80): Pfam Name: Annexin Pfam Description: Annexin
  misc_feature (1)..(317): Homolog of NCBI NO: 15220216 NR Description: Ca2+-dependent membrane-binding protein annexin
  misc_feature (1)..(317): Homolog of NCBI NO: 1621539 NR Description: annexin-like protein
  misc_feature (3)..(317): Homolog of NCBI NO: 1429207 NR Description: annexin [Arabidopsis thaliana]
  misc_feature (1)..(313): Homolog of NCBI NO: 7484723 NR Description: fiber annexin - upland cotton
  misc_feature (2)..(313): Homolog of NCBI NO: 15214410 NR Description: annexin [Gossypium hirsutum]
  misc_feature (2)..(313): Homolog of NCBI NO: 33357398 NR Description: Chain A, Annexin Gh1 From Cotton
  misc_feature (1)..(317): Homolog of NCBI NO: 2459926 NR Description: annexin [Lavatera thuringiaca]
  misc_feature (2)..(313): Homolog of NCBI NO: 7441510 NR Description: annexin - upland cotton (fragment)
  misc_feature (1)..(316): Homolog of NCBI NO: 2129923 NR Description: annexin - pepper >gi|1071660|emb|CAA63710.1|
  misc_feature (1)..(316): Homolog of NCBI NO: 12084607 NR Description: Chain A, Crystal Structure Of Annexin 24(Ca32) Capsicum Annuum >gi|12084608|pdb|1DK5|B Chain B, Crystal

SEQ ID NO: 97692 - protein, 211 aa, Arabidopsis thaliana; identical to SEQ ID NO: 24550
  peptide (1)..(211): Ceres Seq. ID no. 13491423
  misc_feature (1)..(211): Homolog of NCBI NO: 15220216 NR Description: Ca2+-dependent membrane-binding protein annexin
  misc_feature (1)..(211): Homolog of NCBI NO: 1621539 NR Description: annexin-like protein
  misc_feature (1)..(211): Homolog of NCBI NO: 1429207 NR Description: annexin [Arabidopsis thaliana]
  misc_feature (1)..(207): Homolog of NCBI NO: 7484723 NR Description: fiber annexin - upland cotton
  misc_feature (1)..(207): Homolog of NCBI NO: 15214410 NR Description: annexin [Gossypium hirsutum]
  misc_feature (1)..(207): Homolog of NCBI NO: 33357398 NR Description: Chain A, Annexin Gh1 From Cotton
  misc_feature (1)..(211): Homolog of NCBI NO: 2459926 NR Description: annexin [Lavatera thuringiaca]
  misc_feature (1)..(207): Homolog of NCBI NO: 7441510 NR Description: annexin - upland cotton (fragment)
  misc_feature (1)..(210): Homolog of NCBI NO: 2129923 NR Description: annexin - pepper >gi|1071660|emb|CAA63710.1|
  misc_feature (1)..(210): Homolog of NCBI NO: 12084607 NR Description: Chain A, Crystal Structure Of Annexin 24(Ca32) Capsicum Annuum >gi|12084608|pdb|1DK5|B Chain B, Crystal

SEQ ID NO: 97693 - DNA, 1105 bp, Arabidopsis thaliana
  misc_feature (1)..(1105): Ceres Seq. ID no. 13492456
  misc_feature: MA Experiment ID: 108572 Result: Up-regulated in Transcription
  misc_feature: MA Experiment 108572 PARAMETER Experiment Name: At_Drought_cDNA_P Parameter: Timepoint (hr) Value: 1
  misc_feature: MA Experiment 108572 PARAMETER Experiment Name: At_Drought_cDNA_P Parameter: Tissue Value: Aerial
  misc_feature: MA Experiment 108572 PARAMETER Experiment Name: At_Drought_cDNA_P Parameter: Treatment Value: Drought vs. No Drought
  misc_feature: MA Experiment ID: 108573 Result: Up-regulated in Transcription
  misc_feature: MA Experiment 108573 PARAMETER Experiment Name: At_Drought_cDNA_P Parameter: Timepoint (hr) Value: 6
  misc_feature: MA Experiment 108573 PARAMETER Experiment Name: At_Drought_cDNA_P Parameter: Tissue Value: Aerial
  misc_feature: MA Experiment 108573 PARAMETER Experiment Name: At_Drought_cDNA_P Parameter: Treatment Value: Drought vs. No Drought
  misc_feature: MA Experiment ID: 108579 Result: Down-regulated in Transcription
  misc_feature: MA Experiment 108579 PARAMETER Experiment Name: At_4deg_Cold_cDNA_P Parameter: Temperature (deg C) Value: 4 vs. 22
  misc_feature: MA Experiment 108579 PARAMETER Experiment Name: At_4deg_Cold_cDNA_P Parameter: Timepoint (hr) Value: 6
  misc_feature: MA Experiment 108579 PARAMETER Experiment Name: At_4deg_Cold_cDNA_P Parameter: Tissue Value: Aerial
  misc_feature: MA Experiment ID: 20000072 Result: Down-regulated in Transcription
  misc_feature: MA Experiment 20000072 PARAMETER Experiment Name: At_100uM_ABA_Mutants_cDNA_P Parameter: Plant Line Value: CS8105
  misc_feature: MA Experiment 20000072 PARAMETER Experiment Name: At_100uM_ABA_Mutants_cDNA_P Parameter: Timepoint (hr) Value: 6
  misc_feature: MA Experiment 20000072 PARAMETER Experiment Name: At_100uM_ABA_Mutants_cDNA_P Parameter: Tissue Value: Aerial
  misc_feature: MA Experiment 20000072 PARAMETER Experiment Name: At_100uM_ABA_Mutants_cDNA_P Parameter: Treatment Value: 100uM ABA vs. No Treatment
  misc_feature: MA Experiment ID: 20000087 Result: Down-regulated in Transcription
  misc_feature: MA Experiment 20000087 PARAMETER Experiment Name: At_100uM_ABA_Mutants_cDNA_P Parameter: Plant Line Value: WS
  misc_feature: MA Experiment 20000087 PARAMETER Experiment Name: At_100uM_ABA_Mutants_cDNA_P Parameter: Timepoint (hr) Value: 6
  misc_feature: MA Experiment 20000087 PARAMETER Experiment Name: At_100uM_ABA_Mutants_cDNA_P Parameter: Tissue Value: Aerial
  misc_feature: MA Experiment 20000087 PARAMETER Experiment Name: At_100uM_ABA_Mutants_cDNA_P Parameter: Treatment Value: 100uM ABA vs. No Treatment
  misc_feature: MA Experiment ID: 20000090 Result: Down-regulated in Transcription
  misc_feature: MA Experiment ID: 20000093 Result: Up-regulated in Transcription
  misc_feature: MA Experiment 20000093 PARAMETER Experiment Name: At_42deg_Heat_cDNA_P Parameter: Temperature (deg C) Value: 42 vs. 22
  misc_feature: MA Experiment 20000093 PARAMETER Experiment Name: At_42deg_Heat_cDNA_P Parameter: Timepoint (hr) Value: 0.5
  misc_feature: MA Experiment 20000093 PARAMETER Experiment Name: At_42deg_Heat_cDNA_P Parameter: Tissue Value: Aerial
  misc_feature: MA Experiment ID: 20000180 Result: Up-regulated in Transcription
  misc_feature: MA Experiment 20000180 PARAMETER Experiment Name: At_Germinating_Seeds_P Parameter: Age (hr) Value: 24 vs. 0
  misc_feature: MA Experiment 20000180 PARAMETER Experiment Name: At_Germinating_Seeds_P Parameter: Tissue Value: Germinating Seeds
  misc_feature: MA Experiment ID: 20000213 Result: Down-regulated in Transcription
  misc_feature: MA Experiment 20000213 PARAMETER Experiment Name: At_4deg_Cold_P Parameter: Timepoint (hr) Value: 2
  misc_feature: MA Experiment ID: 20000224 Result: Down-regulated in Transcription
  misc_feature: MA Experiment ID: 20000234 Result: Down-regulated in Transcription
  misc_feature: MA Experiment 20000234 PARAMETER Experiment Name: At_Siliques_P Parameter: Age (day) Value: 21
  misc_feature: MA Experiment 20000234 PARAMETER Experiment Name: At_Siliques_P Parameter: Organism Value: A. thaliana
  misc_feature: MA Experiment 20000234 PARAMETER Experiment Name: At_Siliques_P Parameter: Plant Line Value: WS
  misc_feature: MA Experiment 20000234 PARAMETER Experiment Name: At_Siliques_P Parameter: Tissue Value: Less Than 5mm Siliques vs. Whole Plant
  misc_feature: MA Experiment ID: 20000264 Result: Down-regulated in Transcription
  misc_feature: MA Experiment 20000264 PARAMETER Experiment Name: At_Open_Flower_P Parameter: Age (day) Value: 21
  misc_feature: MA Experiment 20000264 PARAMETER Experiment Name: At_Open_Flower_P Parameter: Plant Line Value: WS
  misc_feature: MA Experiment 20000264 PARAMETER Experiment Name: At_Open_Flower_P Parameter: Tissue Value: Open Flower vs. Whole Plant
  misc_feature: MA Experiment ID: 20000265 Result: Down-regulated in Transcription
  misc_feature: MA Experiment 20000265 PARAMETER Experiment Name: At_Open_Flower_P Parameter: Age (day) Value: 21
  misc_feature: MA Experiment 20000265 PARAMETER Experiment Name: At_Open_Flower_P Parameter: Plant Line Value: WS
  misc_feature: MA Experiment 20000265 PARAMETER Experiment Name: At_Open_Flower_P Parameter: Tissue Value: Closed Flower vs. Whole Plant
  misc_feature: MA Experiment ID: 20000286 Result: Down-regulated in Transcription
  misc_feature: MA Experiment 20000286 PARAMETER Experiment Name: At_Open_Flower_P Parameter: Age (day) Value: 21
  misc_feature: MA Experiment 20000286 PARAMETER Experiment Name: At_Open_Flower_P Parameter: Plant Line Value: WS
  misc_feature: MA Experiment 20000286 PARAMETER Experiment Name: At_Open_Flower_P Parameter: Tissue Value: Half Open vs. Whole Plant
  misc_feature: MA Experiment ID: 20000307 Result: Up-regulated in Transcription
  misc_feature: MA Experiment 20000307 PARAMETER Experiment Name: At_Germinating_Seeds_Sub_P Parameter: Age (hr) Value: 24 vs. 0
  misc_feature: MA Experiment 20000307 PARAMETER Experiment Name: At_Germinating_Seeds_Sub_P Parameter: Organism Value: A. thaliana
  misc_feature: MA Experiment 20000307 PARAMETER Experiment Name: At_Germinating_Seeds_Sub_P Parameter: Plant Line Value: WS
  misc_feature: MA Experiment 20000307 PARAMETER Experiment Name: At_Germinating_Seeds_Sub_P Parameter: Tissue Value: Germinating Seeds
  misc_feature: MA Experiment ID: 20000332 Result: Down-regulated in Transcription
  misc_feature: MA Experiment 20000332 PARAMETER Experiment Name: At_4deg_Cold_Sub_P Parameter: Age (day) Value: 14
  misc_feature: MA Experiment 20000332 PARAMETER Experiment Name: At_4deg_Cold_Sub_P Parameter: Organism Value: A. thaliana
  misc_feature: MA Experiment 20000332 PARAMETER Experiment Name: At_4deg_Cold_Sub_P Parameter: Plant Line Value: WS
  misc_feature: MA Experiment 20000332 PARAMETER Experiment Name: At_4deg_Cold_Sub_P Parameter: Temperature (deg C) Value: 4 vs. 22
  misc_feature: MA Experiment 20000332 PARAMETER Experiment Name: At_4deg_Cold_Sub_P Parameter: Timepoint (hr) Value: 2
  misc_feature: MA Experiment 20000332 PARAMETER Experiment Name: At_4deg_Cold_Sub_P Parameter: Tissue Value: Aerial
  misc_feature: MA Experiment ID: 20000347 Result: Down-regulated in Transcription
  misc_feature: MA Experiment 20000347 PARAMETER Experiment Name: At_2mM_SA_Sub_P Parameter: Age (day) Value: 14
  misc_feature: MA Experiment 20000347 PARAMETER Experiment Name: At_2mM_SA_Sub_P Parameter: Organism Value: A. thaliana
  misc_feature: MA Experiment 20000347 PARAMETER Experiment Name: At_2mM_SA_Sub_P Parameter: Plant Line Value: WS
  misc_feature: MA Experiment 20000347 PARAMETER Experiment Name: At_2mM_SA_Sub_P Parameter: Timepoint (hr) Value: 6
  misc_feature: MA Experiment 20000347 PARAMETER Experiment Name: At_2mM_SA_Sub_P Parameter: Tissue Value: Aerial
  misc_feature: MA Experiment 20000347 PARAMETER Experiment Name: At_2mM_SA_Sub_P Parameter: Treatment Value: 2mM SA vs. No Treatment
  misc_feature: MA Experiment ID: 20000355 Result: Down-regulated in Transcription
  misc_feature: MA Experiment 20000355 PARAMETER Experiment Name: At_Siliques_Sub_P Parameter: Age (day) Value: 21
  misc_feature: MA Experiment 20000355 PARAMETER Experiment Name: At_Siliques_Sub_P Parameter: Organism Value: A. thaliana
  misc_feature: MA Experiment 20000355 PARAMETER Experiment Name: At_Siliques_Sub_P Parameter: Plant Line Value: WS
  misc_feature: MA Experiment 20000355 PARAMETER Experiment Name: At_Siliques_Sub_P Parameter: Tissue Value: Less Than 5mm Siliques vs. Whole Plant
  misc_feature: MA Experiment ID: 20000437 Result: Down-regulated in Transcription
  misc_feature: MA Experiment 20000437 PARAMETER Experiment Name: At_Drought_P Parameter: Age (day) Value: 8
  misc_feature: MA Experiment 20000437 PARAMETER Experiment Name: At_Drought_P Parameter: Organism Value: A. thaliana
  misc_feature: MA Experiment 20000437 PARAMETER Experiment Name: At_Drought_P Parameter: Plant Line Value: WS
  misc_feature: MA Experiment 20000437 PARAMETER Experiment Name: At_Drought_P Parameter: Timepoint (hr) Value: 24
  misc_feature: MA Experiment 20000437 PARAMETER Experiment Name: At_Drought_P Parameter: Tissue Value: Whole Plant
  misc_feature: MA Experiment 20000437 PARAMETER Experiment Name: At_Drought_P Parameter: Treatment Value: Drought vs. No Drought
  misc_feature: MA Experiment ID: 20000440 Result: Down-regulated in Transcription
  misc_feature: MA Experiment 20000440 PARAMETER Experiment Name: At_Closed-Flower__Sub_P Parameter: Tissue Value: Closed Flower vs. Whole Plant
  misc_feature: MA Experiment ID: 20000451 Result: Down-regulated in Transcription
  misc_feature: MA Experiment 20000451 PARAMETER Experiment Name: At_CS6879_Shoots-Roots_P Parameter: Age (day) Value: 14
  misc_feature: MA Experiment 20000451 PARAMETER Experiment Name: At_CS6879_Shoots-Roots_P Parameter: Organism Value: A. thaliana
  misc_feature: MA Experiment 20000451 PARAMETER Experiment Name: At_CS6879_Shoots-Roots_P Parameter: Plant Line Value: CS6879 vs. WS
  misc_feature: MA Experiment 20000451 PARAMETER Experiment Name: At_CS6879_Shoots-Roots_P Parameter: Tissue Value: Roots
  misc_feature: MA Experiment ID: 20000794 Result: Down-regulated in Transcription
  misc_feature: MA Experiment 20000794 PARAMETER Experiment Name: At_Petals_P Parameter: Age (day) Value: 23-25 days
  misc_feature: MA Experiment 20000794 PARAMETER Experiment Name: At_Petals_P Parameter: Plant Line Value: WS
  misc_feature: MA Experiment 20000794 PARAMETER Experiment Name: At_Petals_P Parameter: Tissue Value: Petals vs. Whole plant
  misc_feature: MA Experiment ID: 20001450 Result: Up-regulated in Transcription
  misc_feature: MA Experiment 20001450 PARAMETER Experiment Name: At_Far-red-induction_P Parameter: Age (day) Value: 7
  misc_feature: MA Experiment 20001450 PARAMETER Experiment Name: At_Far-red-induction_P Parameter: Light Value: Far-red vs. White
  misc_feature: MA Experiment 20001450 PARAMETER Experiment Name: At_Far-red-induction_P Parameter: Organism Value: A. thaliana
  misc_feature: MA Experiment 20001450 PARAMETER Experiment Name: At_Far-red-induction_P Parameter: Plant Line Value: Columbia
  misc_feature: MA Experiment 20001450 PARAMETER Experiment Name: At_Far-red-induction_P Parameter: Timepoint (hr) Value: 8
  misc_feature: MA Experiment 20001450 PARAMETER Experiment Name: At_Far-red-induction_P Parameter: Tissue Value: Whole Plant
  misc_feature: MA Experiment ID: 20001451 Result: Up-regulated in Transcription
  misc_feature: MA Experiment 20001451 PARAMETER Experiment Name: At_Far-red-induction_P Parameter: Age (day) Value: 7
  misc_feature: MA Experiment 20001451 PARAMETER Experiment Name: At_Far-red-induction_P Parameter: Light Value: Far-red vs. White
  misc_feature: MA Experiment 20001451 PARAMETER Experiment Name: At_Far-red-induction_P Parameter: Organism Value: A. thaliana
  misc_feature: MA Experiment 20001451 PARAMETER Experiment Name: At_Far-red-induction_P Parameter: Plant Line Value: Columbia
  misc_feature: MA Experiment 20001451 PARAMETER Experiment Name: At_Far-red-induction_P Parameter: Timepoint (hr) Value: 24
  misc_feature: MA Experiment 20001451 PARAMETER Experiment Name: At_Far-red-induction_P Parameter: Tissue Value: Whole Plant
  misc_feature: MA Experiment ID: 20001554 Result: Down-regulated in Transcription
  misc_feature: MA Experiment 20001554 PARAMETER Experiment Name: At_Drought_Soil_Dry_P Parameter: Age (day) Value: 21
  misc_feature: MA Experiment 20001554 PARAMETER Experiment Name: At_Drought_Soil_Dry_P Parameter: Organism Value: A. thaliana
  misc_feature: MA Experiment 20001554 PARAMETER Experiment Name: At_Drought_Soil_Dry_P Parameter: Plant Line Value: WS
  misc_feature: MA Experiment 20001554 PARAMETER Experiment Name: At_Drought_Soil_Dry_P Parameter: Post Timepoint (hr) Value: None
  misc_feature: MA Experiment 20001554 PARAMETER Experiment Name: At_Drought_Soil_Dry_P Parameter: Post-Treatment Value: None
  misc_feature: MA Experiment 20001554 PARAMETER Experiment Name: At_Drought_Soil_Dry_P Parameter: Timepoint (day) Value: 7
  misc_feature: MA Experiment 20001554 PARAMETER Experiment Name: At_Drought_Soil_Dry_P Parameter: Treatment Value: Drought vs. No Drought
  misc_feature: MA Experiment ID: 20001555 Result: Down-regulated in Transcription
  misc_feature: MA Experiment 20001555 PARAMETER Experiment Name: At_Drought_Soil_Dry_P Parameter: Age (day) Value: 24
  misc_feature: MA Experiment 20001555 PARAMETER Experiment Name: At_Drought_Soil_Dry_P Parameter: Organism Value: A. thaliana
  misc_feature: MA Experiment 20001555 PARAMETER Experiment Name: At_Drought_Soil_Dry_P Parameter: Plant Line Value: WS
  misc_feature: MA Experiment 20001555 PARAMETER Experiment Name: At_Drought_Soil_Dry_P Parameter: Post Timepoint (hr) Value: None
  misc_feature: MA Experiment 20001555 PARAMETER Experiment Name: At_Drought_Soil_Dry_P Parameter: Post-Treatment Value: None
  misc_feature: MA Experiment 20001555 PARAMETER Experiment Name: At_Drought_Soil_Dry_P Parameter: Timepoint (day) Value: 10
  misc_feature: MA Experiment 20001555 PARAMETER Experiment Name: At_Drought_Soil_Dry_P Parameter: Treatment Value: Drought vs. No Drought
  misc_feature: MA Experiment ID: 20001556 Result: Down-regulated in Transcription
  misc_feature: MA Experiment 20001556 PARAMETER Experiment Name: At_Drought_Soil_Dry_P Parameter: Age (day) Value: 26
  misc_feature: MA Experiment 20001556 PARAMETER Experiment Name: At_Drought_Soil_Dry_P Parameter: Organism Value: A. thaliana
  misc_feature: MA Experiment 20001556 PARAMETER Experiment Name: At_Drought_Soil_Dry_P Parameter: Plant Line Value: WS
  misc_feature: MA Experiment 20001556 PARAMETER Experiment Name: At_Drought_Soil_Dry_P Parameter: Post Timepoint (hr) Value: None
  misc_feature: MA Experiment 20001556 PARAMETER Experiment Name: At_Drought_Soil_Dry_P Parameter: Post-Treatment Value: None
  misc_feature: MA Experiment 20001556 PARAMETER Experiment Name: At_Drought_Soil_Dry_P Parameter: Timepoint (day) Value: 12
  misc_feature: MA Experiment 20001556 PARAMETER Experiment Name: At_Drought_Soil_Dry_P Parameter: Treatment Value: Drought vs. No Drought
  misc_feature: MA Experiment ID: 20001557 Result: Down-regulated in Transcription
  misc_feature: MA Experiment 20001557 PARAMETER Experiment Name: At_Drought_Soil_Dry_P Parameter: Age (day) Value: 27
  misc_feature: MA Experiment 20001557 PARAMETER Experiment Name: At_Drought_Soil_Dry_P Parameter: Organism Value: A. thaliana
  misc_feature: MA Experiment 20001557 PARAMETER Experiment Name: At_Drought_Soil_Dry_P Parameter: Plant Line Value: WS
  misc_feature: MA Experiment 20001557 PARAMETER Experiment Name: At_Drought_Soil_Dry_P Parameter: Post Timepoint (hr) Value: 3
  misc_feature: MA Experiment 20001557 PARAMETER Experiment Name: At_Drought_Soil_Dry_P Parameter: Post-Treatment Value: Re-Water vs. No Drought
  misc_feature: MA Experiment 20001557 PARAMETER Experiment Name: At_Drought_Soil_Dry_P Parameter: Timepoint (day) Value: 13
  misc_feature: MA Experiment 20001557 PARAMETER Experiment Name: At_Drought_Soil_Dry_P Parameter: Treatment Value: Drought vs. No Drought
  misc_feature: MA Experiment ID: 20001559 Result: Down-regulated in Transcription
  misc_feature: MA Experiment 20001559 PARAMETER Experiment Name: At_Drought_Soil_Dry_P Parameter: Age (day) Value: 28
  misc_feature: MA Experiment 20001559 PARAMETER Experiment Name: At_Drought_Soil_Dry_P Parameter: Organism Value: A. thaliana
  misc_feature: MA Experiment 20001559 PARAMETER Experiment Name: At_Drought_Soil_Dry_P Parameter: Plant Line Value: WS
  misc_feature: MA Experiment 20001559 PARAMETER Experiment Name: At_Drought_Soil_Dry_P Parameter: Post Timepoint (hr) Value: 29
  misc_feature: MA Experiment 20001559 PARAMETER Experiment Name: At_Drought_Soil_Dry_P Parameter: Post-Treatment Value: Re-Water vs. No Drought
  misc_feature: MA Experiment 20001559 PARAMETER Experiment Name: At_Drought_Soil_Dry_P Parameter: Timepoint (day) Value: 14
  misc_feature: MA Experiment 20001559 PARAMETER Experiment Name: At_Drought_Soil_Dry_P Parameter: Treatment Value: Drought vs. No Drought
  misc_feature: MA Experiment ID: 20001757 Result: Up-regulated in Transcription
  misc_feature: MA Experiment 20001757 PARAMETER Experiment Name: At_50mM_NH4NO3_L-to-H_P Parameter: Timepoint (hr) Value: 6
  misc_feature: MA Experiment 20001757 PARAMETER Experiment Name: At_50mM_NH4NO3_L-to-H_P Parameter: Tissue Value: Leaf
  misc_feature: MA Experiment 20001757 PARAMETER Experiment Name: At_50mM_NH4NO3_L-to-H_P Parameter: Treatment Value: 50mM NH4NO3 vs 100mM Mannitol
  misc_feature: MA Experiment ID: 20001904 Result: Down-regulated in Transcription
  misc_feature: MA Experiment 20001904 PARAMETER Experiment Name: At_Drought_Reproduction_P Parameter: Age (day) Value: 37
  misc_feature: MA Experiment 20001904 PARAMETER Experiment Name: At_Drought_Reproduction_P Parameter: Organism Value: A. thaliana
  misc_feature: MA Experiment 20001904 PARAMETER Experiment Name: At_Drought_Reproduction_P Parameter: Plant Line Value: WS
  misc_feature: MA Experiment 20001904 PARAMETER Experiment Name: At_Drought_Reproduction_P Parameter: Timepoint (day) Value: 7
  misc_feature: MA Experiment 20001904 PARAMETER Experiment Name: At_Drought_Reproduction_P Parameter: Tissue Value: Rosettes
  misc_feature: MA Experiment 20001904 PARAMETER Experiment Name: At_Drought_Reproduction_P Parameter: Treatment Value: Drought vs. No Drought
attacccattgtagaaaagaagaaaaaaagcaaagaacacttgaacgttttctagatagagatggaagggaaagaagaggatgttcgagtgggagctaacaagttcccggagaggcaaccgataggtacatcggctcagacggacaaagactacaaggagccaccaccagctccatttttcgagccaggcgagctgagttcgtggtccttctacagagccggaatcgccgagttcatagccaccttcctgtttctatacataacagtattgacagtgatgggagtgaagagagcaccaaacatgtgtgcctctgttggaatccaaggcattgcttgggctttcggtggcatgatctttgcccttgtctactgtactgctggaatctctggtgggcacataaacccagcggtgacatttggtctgttcttggctcgtaagctgtcattgacgagagctgtcttttacatcgtgatgcaatgtctcggagccatctgcggcgccggagttgtcaaaggcttccagccaaatccttaccaaactctcggcggaggagccaacacagtcgctcacggctacactaagggctctggtttgggtgctgagataatcggaaccttcgtccttgtctacacggtcttctccgccactgacgccaagagaagcgctcgtgactcccacgttccgattttggcaccactcccaatcggattcgctgtgttcttggttcacttggcgacgattccaatcaccggaacaggaattaacccagctaggagtcttggagctgcaatcatctacaacaaggaccacgcttgggacgaccactggatattctgggtcggaccattcattggagcagctcttgcggctctttaccaccaacttgtcatcagagccattccattcaagtccagatcctgatttgatttctttctttataaaacttcattgttgcatcttggtttgtaattgagcttgaaaatatttgagagatctggatcatgtgtttattttaattaatggacttgtctttttcttatttgctgtggatgatctggttttatcgttaaatggagtttgatattatgattgatttggtacgat

SEQ ID NO: 97694 - protein, 286 aa, Arabidopsis thaliana
  peptide (1)..(286): Ceres Seq. ID no. 13492457
  misc_feature (44)..(273): Pfam Name: Major intrinsic protein Pfam Description: Major intrinsic protein
  misc_feature (1)..(286): Homolog of NCBI NO: 15223438 NR Description: plasma membrane intrinsic protein 1c [Arabidopsis >gi|1175012|sp|Q08733|WC1C_ARATH Plasma membrane intrinsic
  misc_feature (1)..(286): Homolog of NCBI NO: 17065068 NR Description: plasma membrane intrinsic protein 1C protein B) [Arabidopsis thaliana] >gi|25083740|gb|AAN72112.1| membrane intrinsic protein 1C (transmembrane protein B)
  misc_feature (1)..(286): Homolog of NCBI NO: 472875 NR Description: plasma membrane intrinsic protein 1c [Arabidopsis
  misc_feature (1)..(286): Homolog of NCBI NO: 18411332 NR Description: transmembrane protein (MIP family) [Arabidopsis >gi|535780|dbj|BAA05654.1| transmembrane protein [Arabidopsis >gi|20466718|gb|AAM20676.1| probable plasma membrane intrinsic
  misc_feature (1)..(286): Homolog of NCBI NO: 15233109 NR Description: plasma membrane intrinsic protein 1A [Arabidopsis >gi|21431895|sp|P43285|WC1A_ARATH Plasma membrane intrinsic
  misc_feature (1)..(286): Homolog of NCBI NO: 7441247 NR Description: probable plasma membrane intrinsic protein 1c - thaliana >gi|2252825|gb|AAB62824.1| Similar to transmembrane coded for by A. thaliana cDNA H37637; coded for by A. for by A.
  misc_feature (1)..(286): Homolog of NCBI NO: 472873 NR Description: plasma membrane intrinsic protein 1a [Arabidopsis
  misc_feature (1)..(286): Homolog of NCBI NO: 3551131 NR Description: plasma membrane aquaporin (PAQ1) [Raphanus
  misc_feature (1)..(286): Homolog of NCBI NO: 2373401 NR Description: transmembrane protein [Arabidopsis thaliana]
  misc_feature (1)..(286): Homolog of NCBI NO: 10799095 NR Description: aquaporin PIP1b2 [Brassica oleracea]
MEGKEEDVRVGANKFPERQPIGTSAQTDKDYKEPPPAPFFEPGELSSWSFYRAGIAEFIATFLFLYITVLTVMGVKRAPNMCASVGIQGIAWAFGGMIFALVYCTAGISGGHINPAVTFGLFLARKLSLTRAVFYIVMQCLGAICGAGVVKGFQPNPYQTLGGGANTVAHGYTKGSGLGAEIIGTFVLVYTVFSATDAKRSARDSHVPILAPLPIGFAVFLVHLATIPITGTGINPARSLGAAIIYNKDHAWDDHWIFWVGPFIGAALAALYHQLVIRAIPFKSRS

SEQ ID NO: 97695 - protein, 214 aa, Arabidopsis thaliana
  peptide (1)..(214): Ceres Seq. ID no. 13492458
  misc_feature (1)..(201): Pfam Name: Major intrinsic protein Pfam Description: Major intrinsic protein
  misc_feature (1)..(214): Homolog of NCBI NO: 15223438 NR Description: plasma membrane intrinsic protein 1c [Arabidopsis >gi|1175012|sp|Q08733|WC1C_ARATH Plasma membrane intrinsic
  misc_feature (1)..(214): Homolog of NCBI NO: 17065068 NR Description: plasma membrane intrinsic protein 1C protein B) [Arabidopsis thaliana] >gi|25083740|gb|AAN72112.1| membrane intrinsic protein 1C (transmembrane protein B)
  misc_feature (1)..(214): Homolog of NCBI NO: 472875 NR Description: plasma membrane intrinsic protein 1c [Arabidopsis
  misc_feature (1)..(214): Homolog of NCBI NO: 18411332 NR Description: transmembrane protein (MIP family) [Arabidopsis >gi|535780|dbj|BAA05654.1| transmembrane protein [Arabidopsis >gi|20466718|gb|AAM20676.1| probable plasma membrane intrinsic
  misc_feature (1)..(214): Homolog of NCBI NO: 15233109 NR Description: plasma membrane intrinsic protein 1A [Arabidopsis >gi|21431895|sp|P43285|WC1A_ARATH Plasma membrane intrinsic
  misc_feature (1)..(214): Homolog of NCBI NO: 7441247 NR Description: probable plasma membrane intrinsic protein 1c - thaliana >gi|2252825|gb|AAB62824.1| Similar to transmembrane coded for by A. thaliana cDNA H37637; coded for by A. for by A.
  misc_feature (1)..(214): Homolog of NCBI NO: 472873 NR Description: plasma membrane intrinsic protein 1a [Arabidopsis
  misc_feature (1)..(214): Homolog of NCBI NO: 3551131 NR Description: plasma membrane aquaporin (PAQ1) [Raphanus
  misc_feature (1)..(214): Homolog of NCBI NO: 2373401 NR Description: transmembrane protein [Arabidopsis thaliana]
  misc_feature (1)..(214): Homolog of NCBI NO: 10799095 NR Description: aquaporin PIP1b2 [Brassica oleracea]
MGVKRAPNMCASVGIQGIAWAFGGMIFALVYCTAGISGGHINPAVTFGLFLARKLSLTRAVFYIVMQCLGAICGAGVVKGFQPNPYQTLGGGANTVAHGYTKGSGLGAEIIGTFVLVYTVFSATDAKRSARDSHVPILAPLPIGFAVFLVHLATIPITGTGINPARSLGAAIIYNKDHAWDDHWIFWVGPFIGAALAALYHQLVIRAIPFKSRS

SEQ ID NO: 97696 - protein, 206 aa, Arabidopsis thaliana
  peptide (1)..(206): Ceres Seq. ID no. 13492459
  misc_feature (1)..(193): Pfam Name: Major intrinsic protein Pfam Description: Major intrinsic protein
  misc_feature (1)..(206): Homolog of NCBI NO: 15223438 NR Description: plasma membrane intrinsic protein 1c [Arabidopsis >gi|1175012|sp|Q08733|WC1C_ARATH Plasma membrane intrinsic
  misc_feature (1)..(206): Homolog of NCBI NO: 17065068 NR Description: plasma membrane intrinsic protein 1C protein B) [Arabidopsis thaliana] >gi|25083740|gb|AAN72112.1| membrane intrinsic protein 1C (transmembrane protein B)
  misc_feature (1)..(206): Homolog of NCBI NO: 472875 NR Description: plasma membrane intrinsic protein 1c [Arabidopsis
  misc_feature (1)..(206): Homolog of NCBI NO: 18411332 NR Description: transmembrane protein (MIP family) [Arabidopsis >gi|535780|dbj|BAA05654.1| transmembrane protein [Arabidopsis >gi|20466718|gb|AAM20676.1| probable plasma membrane intrinsic
  misc_feature (1)..(206): Homolog of NCBI NO: 15233109 NR Description: plasma membrane intrinsic protein 1A [Arabidopsis >gi|21431895|sp|P43285|WC1A_ARATH Plasma membrane intrinsic
  misc_feature (1)..(206): Homolog of NCBI NO: 7441247 NR Description: probable plasma membrane intrinsic protein 1c - thaliana >gi|2252825|gb|AAB62824.1| Similar to transmembrane coded for by A. thaliana cDNA H37637; coded for by A. for by A.
  misc_feature (1)..(206): Homolog of NCBI NO: 472873 NR Description: plasma membrane intrinsic protein 1a [Arabidopsis
  misc_feature (1)..(206): Homolog of NCBI NO: 3551131 NR Description: plasma membrane aquaporin (PAQ1) [Raphanus
  misc_feature (1)..(206): Homolog of NCBI NO: 2373401 NR Description: transmembrane protein [Arabidopsis thaliana]
  misc_feature (1)..(206): Homolog of NCBI NO: 10799095 NR Description: aquaporin PIP1b2 [Brassica oleracea]
MCASVGIQGIAWAFGGMIFALVYCTAGISGGHINPAVTFGLFLARKLSLTRAVFYIVMQCLGAICGAGVVKGFQPNPYQTLGGGANTVAHGYTKGSGLGAEIIGTFVLVYTVFSATDAKRSARDSHVPILAPLPIGFAVFLVHLATIPITGTGINPARSLGAAIIYNKDHAWDDHWIFWVGPFIGAALAALYHQLVIRAIPFKSRS

SEQ ID NO: 97697 - DNA, 817 bp, Arabidopsis thaliana
  misc_feature (1)..(817): Ceres Seq. ID no. 13492627
  misc_feature: MA Experiment ID: 108577 Result: Up-regulated in Transcription
  misc_feature: MA Experiment 108577 PARAMETER Experiment Name: At_42deg_Heat_cDNA_P Parameter: Temperature (deg C) Value: 42 vs. 22
  misc_feature: MA Experiment 108577 PARAMETER Experiment Name: At_42deg_Heat_cDNA_P Parameter: Timepoint (hr) Value: 6
  misc_feature: MA Experiment 108577 PARAMETER Experiment Name: At_42deg_Heat_cDNA_P Parameter: Tissue Value: Aerial
  misc_feature: MA Experiment ID: 20000112 Result: Up-regulated in Transcription
  misc_feature: MA Experiment 20000112 PARAMETER Experiment Name: At_42deg_Heat_cDNA_P Parameter: Temperature (deg C) Value: 42 vs. 22
  misc_feature: MA Experiment 20000112 PARAMETER Experiment Name: At_42deg_Heat_cDNA_P Parameter: Timepoint (hr) Value: 2
  misc_feature: MA Experiment 20000112 PARAMETER Experiment Name: At_42deg_Heat_cDNA_P Parameter: Tissue Value: Aerial
  misc_feature: MA Experiment ID: 20000113 Result: Up-regulated in Transcription
  misc_feature: MA Experiment 20000113 PARAMETER Experiment Name: At_42deg_Heat_cDNA_P Parameter: Temperature (deg C) Value: 42 vs. 22
  misc_feature: MA Experiment 20000113 PARAMETER Experiment Name: At_42deg_Heat_cDNA_P Parameter: Timepoint (hr) Value: 8
  misc_feature: MA Experiment 20000113 PARAMETER Experiment Name: At_42deg_Heat_cDNA_P Parameter: Tissue Value: Aerial
  misc_feature: MA Experiment ID: 20000224 Result: Down-regulated in Transcription
  misc_feature: MA Experiment ID: 20001560 Result: Down-regulated in Transcription
  misc_feature: MA Experiment 20001560 PARAMETER Experiment Name: At_Drought_Soil_Dry_P Parameter: Age (day) Value: 28
  misc_feature: MA Experiment 20001560 PARAMETER Experiment Name: At_Drought_Soil_Dry_P Parameter: Organism Value: A. thaliana
  misc_feature: MA Experiment 20001560 PARAMETER Experiment Name: At_Drought_Soil_Dry_P Parameter: Plant Line Value: WS
  misc_feature: MA Experiment 20001560 PARAMETER Experiment Name: At_Drought_Soil_Dry_P Parameter: Post Timepoint (hr) Value: None
  misc_feature: MA Experiment 20001560 PARAMETER Experiment Name: At_Drought_Soil_Dry_P Parameter: Post-Treatment Value: None
  misc_feature: MA Experiment 20001560 PARAMETER Experiment Name: At_Drought_Soil_Dry_P Parameter: Timepoint (day) Value: 14
  misc_feature: MA Experiment 20001560 PARAMETER Experiment Name: At_Drought_Soil_Dry_P Parameter: Treatment Value: Drought vs. No Drought
atcccctcgtcgctgcgtctctctcccgcaaccttcgattttcgtttattcgcatccatcggagagagaaaacaatcaataagcgaccatgttggtgtaccaagatcttctcaccggtgatgagcttctgtctgactctttcccttacaaggagattgagaatggaatcctctgggaagtagaaggaaagtgggttactgtgggagctgtagatgttaacattggtgccaatccatctgctgaagaaggtggtgaggatgaaggtgttgatgactctactcaaaaggttgttgacattgtcgacaccttcagacttcaggagcaaccaacttatgacaagaagggattcatcgcttacattaagaaatacattaagcttttgacacccaagctcagcgaagaagatcaagctgtcttcaagaagggtattgagggagctaccaagtttttgctccccaggctcagtgacttccaattctttgttggggagggtatgcatgatgacagcactttggtctttgcttactacaaggagggttcaactaacccaacatttttgtacttcgctcatggtttgaaggaggtcaagtgctgagagagaagctctcgttgggttactgtggtcggtcgcagcgactctctaagtttatgtttctttatattgtcctgtgtttcgtcgtcgtcccctattaaaattacctgccagtttacttttctctcttcttgttttctgtgttggaagattctcaagttatttattccgcaaaaaacggtttatcatttacaattagttgaattttggtcgttactttttgtg

SEQ ID NO: 97698 - protein, 168 aa, Arabidopsis thaliana; identical to SEQ ID NO: 28030
  peptide (1)..(168): Ceres Seq. ID no. 13492628
  misc_feature (1)..(165): Pfam Name: Translationally controlled tumour protein Pfam Description: Translationally controlled tumour protein
  misc_feature (1)..(168): Homolog of NCBI NO: 15228276 NR Description: translationally controlled tumor protein -related thaliana] >gi|19883937|sp|P31265|TCTP_ARATH Translationally tumor protein homolog (TCTP) >gi|11994618|dbj|BAB02755.1|
  misc_feature (1)..(168): Homolog of NCBI NO: 21595816 NR Description: translationally controlled tumor protein-like
  misc_feature (1)..(168): Homolog of NCBI NO: 20140684 NR Description: Translationally controlled tumor protein homolog >gi|16033628|gb|AAL13303.1|AF418663_1 translationally controlled
  misc_feature (1)..(168): Homolog of NCBI NO: 1174626 NR Description: TRANSLATIONALLY CONTROLLED TUMOR PROTEIN HOMOLOG
  misc_feature (1)..(168): Homolog of NCBI NO: 9979196 NR Description: Translationally controlled tumor protein homolog >gi|4193388|gb|AAD10032.1| translationally controlled tumor
  misc_feature (1)..(168): Homolog of NCBI NO: 2507443 NR Description: Translationally controlled tumor protein homolog
  misc_feature (1)..(168): Homolog of NCBI NO: 549063 NR Description: Translationally controlled tumor protein homolog

SEQ ID NO: 97699 - DNA, 1084 bp, Arabidopsis thaliana
  misc_feature (1)..(1084): Ceres Seq. ID no. 13492779
  misc_feature: MA Experiment ID: 108434 Result: Down-regulated in Transcription
  misc_feature: MA Experiment 108434 PARAMETER Experiment Name: At_Root_Tips_cDNA_P Parameter: Tissue Value: Root Tips
  misc_feature: MA Experiment ID: 108435 Result: Down-regulated in Transcription
  misc_feature: MA Experiment 108435 PARAMETER Experiment Name: At_stm_Mutants_cDNA_P Parameter: Plant Line Value: wt Landsburg vs stm
  misc_feature: MA Experiment 108435 PARAMETER Experiment Name: At_stm_Mutants_cDNA_P Parameter: Tissue Value: Shoot Apical Meristem Region
  misc_feature: MA Experiment ID: 108461 Result: Up-regulated in Transcription
  misc_feature: MA Experiment 108461 PARAMETER Experiment Name: At_Germinating_Seeds_cDNA_P Parameter: Age (day) Value: 1 vs. 0
  misc_feature: MA Experiment 108461 PARAMETER Experiment Name: At_Germinating_Seeds_cDNA_P Parameter: Tissue Value: Germinating Seeds
  misc_feature: MA Experiment ID: 108462 Result: Up-regulated in Transcription
  misc_feature: MA Experiment 108462 PARAMETER Experiment Name: At_Germinating_Seeds_cDNA_P Parameter: Age (day) Value: 2 vs. 0
  misc_feature: MA Experiment 108462 PARAMETER Experiment Name: At_Germinating_Seeds_cDNA_P Parameter: Tissue Value: Germinating Seeds
  misc_feature: MA Experiment ID: 108463 Result: Up-regulated in Transcription
  misc_feature: MA Experiment 108463 PARAMETER Experiment Name: At_Germinating_Seeds_cDNA_P Parameter: Age (day) Value: 3 vs. 0
  misc_feature: MA Experiment 108463 PARAMETER Experiment Name: At_Germinating_Seeds_cDNA_P Parameter: Tissue Value: Germinating Seeds
  misc_feature: MA Experiment ID: 108464 Result: Up-regulated in Transcription
  misc_feature: MA Experiment 108464 PARAMETER Experiment Name: At_Germinating_Seeds_cDNA_P Parameter: Age (day) Value: 4 vs. 0
  misc_feature: MA Experiment 108464 PARAMETER Experiment Name: At_Germinating_Seeds_cDNA_P Parameter: Tissue Value: Germinating Seeds
  misc_feature: MA Experiment ID: 108488 Result: Up-regulated in Transcription
  misc_feature: MA Experiment ID: 108595 Result: Down-regulated in Transcription
  misc_feature: MA Experiment 108595 PARAMETER Experiment Name: At_Ler-pi_Ovule_cDNA_P Parameter: Plant Line Value: null
  misc_feature: MA Experiment ID: 20000179 Result: Up-regulated in Transcription
  misc_feature: MA Experiment 20000179 PARAMETER Experiment Name: At_Germinating_Seeds_P Parameter: Age (hr) Value: 6 vs. 0
  misc_feature: MA Experiment 20000179 PARAMETER Experiment Name: At_Germinating_Seeds_P Parameter: Tissue Value: Germinating Seeds
  misc_feature: MA Experiment ID: 20000180 Result: Up-regulated in Transcription
  misc_feature: MA Experiment 20000180 PARAMETER Experiment Name: At_Germinating_Seeds_P Parameter: Age (hr) Value: 24 vs. 0
  misc_feature: MA Experiment 20000180 PARAMETER Experiment Name: At_Germinating_Seeds_P Parameter: Tissue Value: Germinating Seeds
  misc_feature: MA Experiment ID: 20000185 Result: Down-regulated in Transcription
  misc_feature: MA Experiment 20000185 PARAMETER Experiment Name: At_Roots__P Parameter: Age (day) Value: 7 vs. 21
  misc_feature: MA Experiment 20000185 PARAMETER Experiment Name: At_Roots__P Parameter: Organism Value: A. thaliana
  misc_feature: MA Experiment 20000185 PARAMETER Experiment Name: At_Roots__P Parameter: Tissue Value: Roots vs. Whole Plant
  misc_feature: MA Experiment ID: 20000234 Result: Down-regulated in Transcription
  misc_feature: MA Experiment 20000234 PARAMETER Experiment Name: At_Siliques_P Parameter: Age (day) Value: 21
  misc_feature: MA Experiment 20000234 PARAMETER Experiment Name: At_Siliques_P Parameter: Organism Value: A. thaliana
  misc_feature: MA Experiment 20000234 PARAMETER Experiment Name: At_Siliques_P Parameter: Plant Line Value: WS
  misc_feature: MA Experiment 20000234 PARAMETER Experiment Name: At_Siliques_P Parameter: Tissue Value: Less Than 5mm Siliques vs. Whole Plant
  misc_feature: MA Experiment ID: 20000235 Result: Down-regulated in Transcription
  misc_feature: MA Experiment 20000235 PARAMETER Experiment Name: At_Siliques_P Parameter: Age (day) Value: 21
  misc_feature: MA Experiment 20000235 PARAMETER Experiment Name: At_Siliques_P Parameter: Organism Value: A. thaliana
  misc_feature: MA Experiment 20000235 PARAMETER Experiment Name: At_Siliques_P Parameter: Plant Line Value: WS
  misc_feature: MA Experiment 20000235 PARAMETER Experiment Name: At_Siliques_P Parameter: Tissue Value: 5-10mm Siliques vs. Whole Plant
  misc_feature: MA Experiment ID: 20000264 Result: Down-regulated in Transcription
  misc_feature: MA Experiment 20000264 PARAMETER Experiment Name: At_Open_Flower_P Parameter: Age (day) Value: 21
  misc_feature: MA Experiment 20000264 PARAMETER Experiment Name: At_Open_Flower_P Parameter: Plant Line Value: WS
  misc_feature: MA Experiment 20000264 PARAMETER Experiment Name: At_Open_Flower_P Parameter: Tissue Value: Open Flower vs. Whole Plant
  misc_feature: MA Experiment ID: 20000265 Result: Down-regulated in Transcription
  misc_feature: MA Experiment 20000265 PARAMETER Experiment Name: At_Open_Flower_P Parameter: Age (day) Value: 21
  misc_feature: MA Experiment 20000265 PARAMETER Experiment Name: At_Open_Flower_P Parameter: Plant Line Value: WS
  misc_feature: MA Experiment 20000265 PARAMETER Experiment Name: At_Open_Flower_P Parameter: Tissue Value: Closed Flower vs. Whole Plant
  misc_feature: MA Experiment ID: 20000286 Result: Down-regulated in Transcription
  misc_feature: MA Experiment 20000286 PARAMETER Experiment Name: At_Open_Flower_P Parameter: Age (day) Value: 21
  misc_feature: MA Experiment 20000286 PARAMETER Experiment Name: At_Open_Flower_P Parameter: Plant Line Value: WS
  misc_feature: MA Experiment 20000286 PARAMETER Experiment Name: At_Open_Flower_P Parameter: Tissue Value: Half Open vs. Whole Plant
  misc_feature: MA Experiment ID: 20000437 Result: Down-regulated in Transcription
  misc_feature: MA Experiment 20000437 PARAMETER Experiment Name: At_Drought_P Parameter: Age (day) Value: 8
  misc_feature: MA Experiment 20000437 PARAMETER Experiment Name: At_Drought_P Parameter: Organism Value: A. thaliana
  misc_feature: MA Experiment 20000437 PARAMETER Experiment Name: At_Drought_P Parameter: Plant Line Value: WS
  misc_feature: MA Experiment 20000437 PARAMETER Experiment Name: At_Drought_P Parameter: Timepoint (hr) Value: 24
  misc_feature: MA Experiment 20000437 PARAMETER Experiment Name: At_Drought_P Parameter: Tissue Value: Whole Plant
  misc_feature: MA Experiment 20000437 PARAMETER Experiment Name: At_Drought_P Parameter: Treatment Value: Drought vs. No Drought
  misc_feature: MA Experiment ID: 20000438 Result: Up-regulated in Transcription
  misc_feature: MA Experiment 20000438 PARAMETER Experiment Name: At_Shoots__P Parameter: Age (day) Value: 14
  misc_feature: MA Experiment 20000438 PARAMETER Experiment Name: At_Shoots__P Parameter: Tissue Value: Shoots vs. Whole Plant
  misc_feature: MA Experiment ID: 20000439 Result: Down-regulated in Transcription
  misc_feature: MA Experiment 20000439 PARAMETER Experiment Name: At_Roots__P Parameter: Age (day) Value: 14 vs. 21
  misc_feature: MA Experiment 20000439 PARAMETER Experiment Name: At_Roots__P Parameter: Organism Value: A. thaliana
  misc_feature: MA Experiment 20000439 PARAMETER Experiment Name: At_Roots__P Parameter: Tissue Value: Roots vs. Whole Plant
  misc_feature: MA Experiment ID: 20000573 Result: Down-regulated in Transcription
  misc_feature: MA Experiment 20000573 PARAMETER Experiment Name: At_100uM_ABA_Mutants__P Parameter: Organism Value: A. thaliana
  misc_feature: MA Experiment 20000573 PARAMETER Experiment Name: At_100uM_ABA_Mutants__P Parameter: Plant Line Value: CS22 vs. Ler wt
  misc_feature: MA Experiment 20000573 PARAMETER Experiment Name: At_100uM_ABA_Mutants__P Parameter: Timepoint (hr) Value: N/A
  misc_feature: MA Experiment 20000573 PARAMETER Experiment Name: At_100uM_ABA_Mutants__P Parameter: Tissue Value: Whole Plant
  misc_feature: MA Experiment 20000573 PARAMETER Experiment Name: At_100uM_ABA_Mutants__P Parameter: Treatment Value: None
  misc_feature: MA Experiment ID: 20000574 Result: Down-regulated in Transcription
  misc_feature: MA Experiment 20000574 PARAMETER Experiment Name: At_100uM_ABA_Mutants__P Parameter: Organism Value: A. thaliana
  misc_feature: MA Experiment 20000574 PARAMETER Experiment Name: At_100uM_ABA_Mutants__P Parameter: Plant Line Value: CS23 vs. Ler wt
  misc_feature: MA Experiment 20000574 PARAMETER Experiment Name: At_100uM_ABA_Mutants__P Parameter: Timepoint (hr) Value: N/A
  misc_feature: MA Experiment 20000574 PARAMETER Experiment Name: At_100uM_ABA_Mutants__P Parameter: Tissue Value: Whole Plant
  misc_feature: MA Experiment 20000574 PARAMETER Experiment Name: At_100uM_ABA_Mutants__P Parameter: Treatment Value: None
  misc_feature: MA Experiment ID: 20000794 Result: Down-regulated in Transcription
  misc_feature: MA Experiment 20000794 PARAMETER Experiment Name: At_Petals_P Parameter: Age (day) Value: 23-25 days
  misc_feature: MA Experiment 20000794 PARAMETER Experiment Name: At_Petals_P Parameter: Plant Line Value: WS
  misc_feature: MA Experiment 20000794 PARAMETER Experiment Name: At_Petals_P Parameter: Tissue Value: Petals vs. Whole plant
  misc_feature: MA Experiment ID: 20001557 Result: Down-regulated in Transcription
  misc_feature: MA Experiment 20001557 PARAMETER Experiment Name: At_Drought_Soil_Dry_P Parameter: Age (day) Value: 27
  misc_feature: MA Experiment 20001557 PARAMETER Experiment Name: At_Drought_Soil_Dry_P Parameter: Organism Value: A. thaliana
  misc_feature: MA Experiment 20001557 PARAMETER Experiment Name: At_Drought_Soil_Dry_P Parameter: Plant Line Value: WS
  misc_feature: MA Experiment 20001557 PARAMETER Experiment Name: At_Drought_Soil_Dry_P Parameter: Post Timepoint (hr) Value: 3
  misc_feature: MA Experiment 20001557 PARAMETER Experiment Name: At_Drought_Soil_Dry_P Parameter: Post-Treatment Value: Re-Water vs. No Drought
  misc_feature: MA Experiment 20001557 PARAMETER Experiment Name: At_Drought_Soil_Dry_P Parameter: Timepoint (day) Value: 13
  misc_feature: MA Experiment 20001557 PARAMETER Experiment Name: At_Drought_Soil_Dry_P Parameter: Treatment Value: Drought vs. No Drought
  misc_feature: MA Experiment ID: 20001757 Result: Up-regulated in Transcription
  misc_feature: MA Experiment 20001757 PARAMETER Experiment Name: At_50mM_NH4NO3_L-to-H_P Parameter: Timepoint (hr) Value: 6
  misc_feature: MA Experiment 20001757 PARAMETER Experiment Name: At_50mM_NH4NO3_L-to-H_P Parameter: Tissue Value: Leaf
  misc_feature: MA Experiment 20001757 PARAMETER Experiment Name: At_50mM_NH4NO3_L-to-H_P Parameter: Treatment Value: 50mM NH4NO3 vs 100mM Mannitol
  misc_feature: MA Experiment ID: 20001904 Result: Down-regulated in Transcription
  misc_feature: MA Experiment 20001904 PARAMETER Experiment Name: At_Drought_Reproduction_P Parameter: Age (day) Value: 37
  misc_feature: MA Experiment 20001904 PARAMETER Experiment Name: At_Drought_Reproduction_P Parameter: Organism Value: A. thaliana
  misc_feature: MA Experiment 20001904 PARAMETER Experiment Name: At_Drought_Reproduction_P Parameter: Plant Line Value: WS
  misc_feature: MA Experiment 20001904 PARAMETER Experiment Name: At_Drought_Reproduction_P Parameter: Timepoint (day) Value: 7
  misc_feature: MA Experiment 20001904 PARAMETER Experiment Name: At_Drought_Reproduction_P Parameter: Tissue Value: Rosettes
  misc_feature: MA Experiment 20001904 PARAMETER Experiment Name: At_Drought_Reproduction_P Parameter: Treatment Value: Drought vs. No Drought
  misc_feature: MA Experiment ID: 20001905 Result: Down-regulated in Transcription
  misc_feature: MA Experiment 20001905 PARAMETER Experiment Name: At_Drought_Reproduction_P Parameter: Age (day) Value: 40
  misc_feature: MA Experiment 20001905 PARAMETER Experiment Name: At_Drought_Reproduction_P Parameter: Organism Value: A. thaliana
  misc_feature: MA Experiment 20001905 PARAMETER Experiment Name: At_Drought_Reproduction_P Parameter: Plant Line Value: WS
  misc_feature: MA Experiment 20001905 PARAMETER Experiment Name: At_Drought_Reproduction_P Parameter: Timepoint (day) Value: 10
  misc_feature: MA Experiment 20001905 PARAMETER Experiment Name: At_Drought_Reproduction_P Parameter: Tissue Value: Rosettes
  misc_feature: MA Experiment 20001905 PARAMETER Experiment Name: At_Drought_Reproduction_P Parameter: Treatment Value: Drought vs. No Drought
  misc_feature: MA Experiment ID: 20001906 Result: Down-regulated in Transcription
  misc_feature: MA Experiment 20001906 PARAMETER Experiment Name: At_Drought_Reproduction_P Parameter: Age (day) Value: 35
  misc_feature: MA Experiment 20001906 PARAMETER Experiment Name: At_Drought_Reproduction_P Parameter: Organism Value: A. thaliana
  misc_feature: MA Experiment 20001906 PARAMETER Experiment Name: At_Drought_Reproduction_P Parameter: Plant Line Value: WS
  misc_feature: MA Experiment 20001906 PARAMETER Experiment Name: At_Drought_Reproduction_P Parameter: Timepoint (day) Value: 5
  misc_feature: MA Experiment 20001906 PARAMETER Experiment Name: At_Drought_Reproduction_P Parameter: Tissue Value: Siliques
  misc_feature: MA Experiment 20001906 PARAMETER Experiment Name: At_Drought_Reproduction_P Parameter: Treatment Value: Drought vs. No Drought
aatatccgtattccctctctctctccctttctatctgagcttctctctcttactctctccagagcaacaatggctgcgactgcttcttctcttacaatcgcgtcgtcattctccgaaccacggactcagatccattcctcgagacgtttgaatctccctcttcaatattcaatcccgtacaaggtgttacggagtaggagtagaagattaggactcgtcgtcagttctgtttcagctcccaacgttgagctccgtactggacctgatgatctcatttctaccctcctctctaaggttgcgaatagtgatggaggtgtgacgctaagccctgagcagcacaaggaggtggcacaagtggccggagagcttcaaaagtactgtgtcaaggagcctgtcaaaaatcctctcatttttggagattgggaagtggtgtactgttctagaccaacctctcctggtggaggctacagaagcgtgataggccgtctcttcttcaaaacgaaagagatgatacaagccatcgatgctcctgatatcgttaggaacaaagtttccattaatgcttttggttttctagacggagacgtctccttgacagggaagctgaaagcgttggacagtgagtgggtgcaggtgatatttgagcctccggaaatcaaggttggatctttggagttcaaatacgggttcgaaagcgaagtgaagcttcggatcacatacgttgatgagaaacttaggttgggattgggatctaaaggatcattgttcgtctttagaaggcgtcaataatatatacgtttctccctcgtgcatcaaccaatgcaaatcactacagaaaaaaaggaaacaacatatggggtcctgcgagagtatgatggtcaatatccacaatgctgtgtacacaaatggtgttttagatataactttgttgtaatgtaaacttcattttaagagtgtctcacttcagatgagttgttgaggaagctactggtgaacttcaacatcttttcgcaaagaattactatagcaacaaagaaagataaatgacttagcagcctttatgttcaaattcaaaacctctcac

SEQ ID NO: 97700 - protein, 262 aa, Arabidopsis thaliana; identical to SEQ ID NO: 21933
  peptide (1)..(262): Ceres Seq. ID no. 13492780
  misc_feature (89)..(259): Pfam Name: PAP_fibrillin Pfam Description: PAP_fibrillin
  misc_feature (24)..(262): Homolog of NCBI NO: 15241221 NR Description: expressed protein [Arabidopsis thaliana] AT5g19940/F28I16_90 [Arabidopsis thaliana] AT5g19940/F28I16_90 [Arabidopsis thaliana]
  misc_feature (63)..(261): Homolog of NCBI NO: 38346556 NR Description: OSJNBa0035M09.17 [Oryza sativa (japonica
  misc_feature (56)..(259): Homolog of NCBI NO: 17065226 NR Description: Unknown protein [Arabidopsis thaliana]
  misc_feature (56)..(259): Homolog of NCBI NO: 30688146 NR Description: plastid-lipid associated protein PAP/fibrillin [Arabidopsis thaliana] >gi|9279612|dbj|BAB01070.1| protein [Arabidopsis thaliana] >gi|17473675|gb|AAL38294.1|

SEQ ID NO: 97701 - protein, 239 aa, Arabidopsis thaliana; identical to SEQ ID NO: 21934
  peptide (1)..(239): Ceres Seq. ID no. 13492781
  misc_feature (66)..(236): Pfam Name: PAP_fibrillin Pfam Description: PAP_fibrillin
  misc_feature (1)..(239): Homolog of NCBI NO: 15241221 NR Description: expressed protein [Arabidopsis thaliana] AT5g19940/F28I16_90 [Arabidopsis thaliana] AT5g19940/F28I16_90 [Arabidopsis thaliana]
  misc_feature (40)..(238): Homolog of NCBI NO: 38346556 NR Description: OSJNBa0035M09.17 [Oryza sativa (japonica
  misc_feature (33)..(236): Homolog of NCBI NO: 17065226 NR Description: Unknown protein [Arabidopsis thaliana]
  misc_feature (33)..(236): Homolog of NCBI NO: 30688146 NR Description: plastid-lipid associated protein PAP/fibrillin [Arabidopsis thaliana] >gi|9279612|dbj|BAB01070.1| protein [Arabidopsis thaliana] >gi|17473675|gb|AAL38294.1|

SEQ ID NO: 97702 - DNA, 836 bp, Arabidopsis thaliana
  misc_feature (1)..(836): Ceres Seq. ID no. 13493726
  misc_feature: MA Experiment ID: 108434 Result: Up-regulated in Transcription
  misc_feature: MA Experiment 108434 PARAMETER Experiment Name: At_Root_Tips_cDNA_P Parameter: Tissue Value: Root Tips
  misc_feature: MA Experiment ID: 108595 Result: Down-regulated in Transcription
  misc_feature: MA Experiment 108595 PARAMETER Experiment Name: At_Ler-pi_Ovule_cDNA_P Parameter: Plant Line Value: null
  misc_feature: MA Experiment ID: 20000179 Result: Up-regulated in Transcription
  misc_feature: MA Experiment 20000179 PARAMETER Experiment Name: At_Germinating_Seeds_P Parameter: Age (hr) Value: 6 vs. 0
  misc_feature: MA Experiment 20000179 PARAMETER Experiment Name: At_Germinating_Seeds_P Parameter: Tissue Value: Germinating Seeds
  misc_feature: MA Experiment ID: 20000180 Result: Up-regulated in Transcription
  misc_feature: MA Experiment 20000180 PARAMETER Experiment Name: At_Germinating_Seeds_P Parameter: Age (hr) Value: 24 vs. 0
  misc_feature: MA Experiment 20000180 PARAMETER Experiment Name: At_Germinating_Seeds_P Parameter: Tissue Value: Germinating Seeds
aagctctcatcttcttcagctcaaaaagccatctcaaaggtatattttgaatcaaaaacaatggcagggactaatgattcttgtcctttggtaaagaacattcttcttctagactctgaaggaaagcgtgtggctgtcaagtattactccgatgattgggcaactaatgcttccaagttagcttttgaaaaatatgtcttctcgaaaacctccaagaccaatgctcgcacagaagctgagatcacactgttggagagtaatattgttgtctataagtttgcccaggacctgcatttctttgttactggaggtgaaaatgaaaacgagctcgtcttatcatctgttcttcaaggcttttttgatgctgttgcgttacttctgaggaacaatgttgaaaagatggaagcccttgaaaacttggatctcatctttttgtgccttgatgagatggttgatcaagggatggtacttgaaacagacgcgaatgttattgcggggaaagtagcaatgcaaagcgcagaagcaagtggttcactctctgaacagacattaactcaagcattggcaacagctcgggagcaccttgcgagaagtcttcttacataaattttcatcgtgggagcgaaatgatatattcataagcccttgtaaccaaccatatctgaaatggttacccgttcactagaaatcaacccctattgacttaactatctcatgactttgttttcttatggttttttggtggaacttagatcttttattcgcctgttcttgcggaaccatctttttaaatgtgaggatcaacattgcactagtgattgattgctttacatatc

SEQ ID NO: 97703 - protein, 201 aa, Arabidopsis thaliana
  peptide (1)..(201): Ceres Seq. ID no. 13493727
  misc_feature (30)..(174): Pfam Name: Clathrin adaptor complex small chain Pfam Description: Clathrin adaptor complex small chain
  misc_feature (21)..(201): Homolog of NCBI NO: 18413126 NR Description: coatomer protein -related [Arabidopsis thaliana]
  misc_feature (21)..(201): Homolog of NCBI NO: 18491175 NR Description: putative coatomer protein [Arabidopsis thaliana]
  misc_feature (21)..(201): Homolog of NCBI NO: 21553419 NR Description: putative coatomer protein [Arabidopsis thaliana]
  misc_feature (23)..(201): Homolog of NCBI NO: 7259346 NR Description: nonclathrin coat protein zeta1-COP [Brassica rapa]
  misc_feature (26)..(201): Homolog of NCBI NO: 30681014 NR Description: coatomer zeta subunit (zeta-coat protein) [Arabidopsis thaliana] >gi|27754542|gb|AAO22718.1| putative
  misc_feature (26)..(185): Homolog of NCBI NO: 6681338 NR Description: putative coatomer zeta subunit (zeta-coat [Arabidopsis thaliana] >gi|6682256|gb|AAF23308.1|AC016661_33
  misc_feature (26)..(200): Homolog of NCBI NO: 7259352 NR Description: nonclathrin coat protein zeta1-COP [Lycopersicon
KLSSSSAQKAISKVYFESKTMAGTNDSCPLVKNILLLDSEGKRVAVKYYSDDWATNASKLAFEKYVFSKTSKTNARTEAEITLLESNIVVYKFAQDLHFFVTGGENENELVLSSVLQGFFDAVALLLRNNVEKMEALENLDLIFLCLDEMVDQGMVLETDANVIAGKVAMQSAEASGSLSEQTLTQALATAREHLARSLLT

SEQ ID NO: 97704 - protein, 181 aa, Arabidopsis thaliana
  peptide (1)..(181): Ceres Seq. ID no. 13493728
  misc_feature (10)..(154): Pfam Name: Clathrin adaptor complex small chain Pfam Description: Clathrin adaptor complex small chain
  misc_feature (1)..(181): Homolog of NCBI NO: 18413126 NR Description: coatomer protein -related [Arabidopsis thaliana]
  misc_feature (1)..(181): Homolog of NCBI NO: 18491175 NR Description: putative coatomer protein [Arabidopsis thaliana]
  misc_feature (1)..(181): Homolog of NCBI NO: 21553419 NR Description: putative coatomer protein [Arabidopsis thaliana]
  misc_feature (3)..(181): Homolog of NCBI NO: 7259346 NR Description: nonclathrin coat protein zeta1-COP [Brassica rapa]
  misc_feature (6)..(181): Homolog of NCBI NO: 30681014 NR Description: coatomer zeta subunit (zeta-coat protein) [Arabidopsis thaliana] >gi|27754542|gb|AAO22718.1| putative
  misc_feature (6)..(165): Homolog of NCBI NO: 6681338 NR Description: putative coatomer zeta subunit (zeta-coat [Arabidopsis thaliana] >gi|6682256|gb|AAF23308.1|AC016661_33
  misc_feature (6)..(180): Homolog of NCBI NO: 7259352 NR Description: nonclathrin coat protein zeta1-COP [Lycopersicon
MAGTNDSCPLVKNILLLDSEGKRVAVKYYSDDWATNASKLAFEKYVFSKTSKTNARTEAEITLLESNIVVYKFAQDLHFFVTGGENENELVLSSVLQGFFDAVALLLRNNVEKMEALENLDLIFLCLDEMVDQGMVLETDANVIAGKVAMQSAEASGSLSEQTLTQALATAREHLARSLLT

SEQ ID NO: 97705 - DNA, 1130 bp, Arabidopsis thaliana
  misc_feature (1)..(1130): Ceres Seq. ID no. 13494035
  misc_feature: MA Experiment ID: 108461 Result: Down-regulated in Transcription
  misc_feature: MA Experiment 108461 PARAMETER Experiment Name: At_Germinating_Seeds_cDNA_P Parameter: Age (day) Value: 1 vs. 0
  misc_feature: MA Experiment 108461 PARAMETER Experiment Name: At_Germinating_Seeds_cDNA_P Parameter: Tissue Value: Germinating Seeds
  misc_feature: MA Experiment ID: 108462 Result: Down-regulated in Transcription
  misc_feature: MA Experiment 108462 PARAMETER Experiment Name: At_Germinating_Seeds_cDNA_P Parameter: Age (day) Value: 2 vs. 0
  misc_feature: MA Experiment 108462 PARAMETER Experiment Name: At_Germinating_Seeds_cDNA_P Parameter: Tissue Value: Germinating Seeds
  misc_feature: MA Experiment ID: 108463 Result: Down-regulated in Transcription
  misc_feature: MA Experiment 108463 PARAMETER Experiment Name: At_Germinating_Seeds_cDNA_P Parameter: Age (day) Value: 3 vs. 0
  misc_feature: MA Experiment 108463 PARAMETER Experiment Name: At_Germinating_Seeds_cDNA_P Parameter: Tissue Value: Germinating Seeds
  misc_feature: MA Experiment ID: 108464 Result: Down-regulated in Transcription
  misc_feature: MA Experiment 108464 PARAMETER Experiment Name: At_Germinating_Seeds_cDNA_P Parameter: Age (day) Value: 4 vs. 0
  misc_feature: MA Experiment 108464 PARAMETER Experiment Name: At_Germinating_Seeds_cDNA_P Parameter: Tissue Value: Germinating Seeds
  misc_feature: MA Experiment ID: 108572 Result: Down-regulated in Transcription
  misc_feature: MA Experiment 108572 PARAMETER Experiment Name: At_Drought_cDNA_P Parameter: Timepoint (hr) Value: 1
  misc_feature: MA Experiment 108572 PARAMETER Experiment Name: At_Drought_cDNA_P Parameter: Tissue Value: Aerial
  misc_feature: MA Experiment 108572 PARAMETER Experiment Name: At_Drought_cDNA_P Parameter: Treatment Value: Drought vs. No Drought
  misc_feature: MA Experiment ID: 20000113 Result: Down-regulated in Transcription
  misc_feature: MA Experiment 20000113 PARAMETER Experiment Name: At_42deg_Heat_cDNA_P Parameter: Temperature (deg C) Value: 42 vs. 22
  misc_feature: MA Experiment 20000113 PARAMETER Experiment Name: At_42deg_Heat_cDNA_P Parameter: Timepoint (hr) Value: 8
  misc_feature: MA Experiment 20000113 PARAMETER Experiment Name: At_42deg_Heat_cDNA_P Parameter: Tissue Value: Aerial
  misc_feature: MA Experiment ID: 20000180 Result: Down-regulated in Transcription
  misc_feature: MA Experiment 20000180 PARAMETER Experiment Name: At_Germinating_Seeds_P Parameter: Age (hr) Value: 24 vs. 0
  misc_feature: MA Experiment 20000180 PARAMETER Experiment Name: At_Germinating_Seeds_P Parameter: Tissue Value: Germinating Seeds
  misc_feature: MA Experiment ID: 20000184 Result: Down-regulated in Transcription
  misc_feature: MA Experiment 20000184 PARAMETER Experiment Name: At_Shoots__P Parameter: Age (day) Value: 7
  misc_feature: MA Experiment 20000184 PARAMETER Experiment Name: At_Shoots__P Parameter: Tissue Value: Shoots vs. Whole Plant
  misc_feature: MA Experiment ID: 20000185 Result: Down-regulated in Transcription
  misc_feature: MA Experiment 20000185 PARAMETER Experiment Name: At_Roots__P Parameter: Age (day) Value: 7 vs. 21
  misc_feature: MA Experiment 20000185 PARAMETER Experiment Name: At_Roots__P Parameter: Organism Value: A. thaliana
  misc_feature: MA Experiment 20000185 PARAMETER Experiment Name: At_Roots__P Parameter: Tissue Value: Roots vs. Whole Plant
  misc_feature: MA Experiment ID: 20000439 Result: Down-regulated in Transcription
  misc_feature: MA Experiment 20000439 PARAMETER Experiment Name: At_Roots__P Parameter: Age (day) Value: 14 vs. 21
  misc_feature: MA Experiment 20000439 PARAMETER Experiment Name: At_Roots__P Parameter: Organism Value: A. thaliana
  misc_feature: MA Experiment 20000439 PARAMETER Experiment Name: At_Roots__P Parameter: Tissue Value: Roots vs. Whole Plant
  misc_feature: MA Experiment ID: 20001248 Result: Up-regulated in Transcription
  misc_feature: MA Experiment 20001248 PARAMETER Experiment Name: At_Far-red-induction_P Parameter: Age (day) Value: 7
  misc_feature: MA Experiment 20001248 PARAMETER Experiment Name: At_Far-red-induction_P Parameter: Light Value: Far-red vs. White
  misc_feature: MA Experiment 20001248 PARAMETER Experiment Name: At_Far-red-induction_P Parameter: Organism Value: A. thaliana
  misc_feature: MA Experiment 20001248 PARAMETER Experiment Name: At_Far-red-induction_P Parameter: Plant Line Value: Columbia
  misc_feature: MA Experiment 20001248 PARAMETER Experiment Name: At_Far-red-induction_P Parameter: Timepoint (hr) Value: 4
  misc_feature: MA Experiment 20001248 PARAMETER Experiment Name: At_Far-red-induction_P Parameter: Tissue Value: Whole Plant
  misc_feature: MA Experiment ID: 20001557 Result: Up-regulated in Transcription
  misc_feature: MA Experiment 20001557 PARAMETER Experiment Name: At_Drought_Soil_Dry_P Parameter: Age (day) Value: 27
  misc_feature: MA Experiment 20001557 PARAMETER Experiment Name: At_Drought_Soil_Dry_P Parameter: Organism Value: A. thaliana
  misc_feature: MA Experiment 20001557 PARAMETER Experiment Name: At_Drought_Soil_Dry_P Parameter: Plant Line Value: WS
  misc_feature: MA Experiment 20001557 PARAMETER Experiment Name: At_Drought_Soil_Dry_P Parameter: Post Timepoint (hr) Value: 3
  misc_feature: MA Experiment 20001557 PARAMETER Experiment Name: At_Drought_Soil_Dry_P Parameter: Post-Treatment Value: Re-Water vs. No Drought
  misc_feature: MA Experiment 20001557 PARAMETER Experiment Name: At_Drought_Soil_Dry_P Parameter: Timepoint (day) Value: 13
  misc_feature: MA Experiment 20001557 PARAMETER Experiment Name: At_Drought_Soil_Dry_P Parameter: Treatment Value: Drought vs. No Drought
gcgaagccgcaaagaaagcggcggtggaagctgagacatgcaacaatggcgttcgtgtcattctcttcttctccttctctctctcttacactcgcgattcaacattaatttcgttcttcttcatacacatatatagatagtgtcttcattttccaaccatgaccggtagagaaatcctccacaagatgaaggaatccgtcaaggagaaagttgggcttggtgcatctgcttcatctgcagattcagggaaaggtaagagcaagatgttgaagcagatcacacatggttttcatttggtgaaagggaaagcttttcacgagatggaagattatgtggttgccaaattcaaggaagttgatgataatgagcttggtctgtttgctatcttcgatggccatcttagccacgagattccggactacttgtgctcccatttgtttgagaacatcttgaaagagccgaatttctggcaagaacctgagaaagcgataaagaaagcttactatataacggatacaacgattctagacaaggcagatgatttgggaaaaggaggttctactgctgtgactgcgatattgatcaattgccagaagctggtggttgctaatgttggtgactctcgagctgttatttgccaaaatggtgttgcgaagccactctcagttgatcatgagccgaacatggagaaggatgaaatcgagaacagaggaggattcgtttctaactttcctggggatgttcctcgagttgatggtcaactggctgtggcaagggcatttggtgataagagtttaaagatgcatttgagttcagaaccatatgttacggtggagataattgatgatgatgcagaatttcttatcctagcaagtgatggactatggaaggtcatgtcaaaccaagaagccgttgactcaatcaagggaataaaagatgcgaaggctgcagcaaagcaccttgcagaggaggctgttgcaaggaaaagctcagacgatatctcagtcgtcgtcgtgaaatttcagtgacattagctttcggttagtcttttcttcttcttttgagcgactctaacactttacttgaatctgtattataagccttttcaattaagacgttacgcaaataag

SEQ ID NO: 97706 - protein, 289 aa, Arabidopsis thaliana; identical to SEQ ID NO: 40326
  peptide (1)..(289): Ceres Seq. ID no. 13494036
  misc_feature (40)..(281): Pfam Name: Protein phosphatase 2C Pfam Description: Protein phosphatase 2C
  misc_feature (1)..(289): Homolog of NCBI NO: 15232538 NR Description: protein phosphatase 2C (PP2C), putative thaliana] >gi|9294253|dbj|BAB02155.1| protein phosphatase type 2C thaliana] >gi|26450048|dbj|BAC42144.1| putative protein
  misc_feature (1)..(289): Homolog of NCBI NO: 21539551 NR Description: putative protein phosphatase type 2C [Arabidopsis
  misc_feature (1)..(289): Homolog of NCBI NO: 4336436 NR Description: protein phosphatase type 2C [Lotus japonicus]
  misc_feature (1)..(288): Homolog of NCBI NO: 18417190 NR Description: protein phosphatase 2C (PP2C), putative thaliana] >gi|16604585|gb|AAL24149.1| putative protein
  misc_feature (1)..(288): Homolog of NCBI NO: 23307574 NR Description: putative protein phosphatase 2C homolog [Oryza
  misc_feature (1)..(289): Homolog of NCBI NO: 18399423 NR Description: protein phosphatase 2C (PP2C), putative thaliana] >gi|15724170|gb|AAL06477.1|AF411787_1 [Arabidopsis thaliana] >gi|18652945|dbj|BAB84701.1| protein
  misc_feature (1)..(289): Homolog of NCBI NO: 25411985 NR Description: probable protein phosphatase 2C [imported] -
  misc_feature (36)..(288): Homolog of NCBI NO: 7488280 NR Description: protein phosphatase 2C homolog F20O9.80 -
  misc_feature (13)..(289): Homolog of NCBI NO: 18395099 NR Description: protein phosphatase 2C (PP2C), putative
  misc_feature (13)..(289): Homolog of NCBI NO: 21537096 NR Description: protein phosphatase type 2C, putative

SEQ ID NO: 97707 - protein, 280 aa, Arabidopsis thaliana; identical to SEQ ID NO: 40327
  peptide (1)..(280): Ceres Seq. ID no. 13494037
  misc_feature (31)..(272): Pfam Name: Protein phosphatase 2C Pfam Description: Protein phosphatase 2C
  misc_feature (1)..(280): Homolog of NCBI NO: 15232538 NR Description: protein phosphatase 2C (PP2C), putative thaliana] >gi|9294253|dbj|BAB02155.1| protein phosphatase type 2C thaliana] >gi|26450048|dbj|BAC42144.1| putative protein
  misc_feature (1)..(280): Homolog of NCBI NO: 21539551 NR Description: putative protein phosphatase type 2C [Arabidopsis
  misc_feature (1)..(280): Homolog of NCBI NO: 4336436 NR Description: protein phosphatase type 2C [Lotus japonicus]
  misc_feature (1)..(279): Homolog of NCBI NO: 18417190 NR Description: protein phosphatase 2C (PP2C), putative thaliana] >gi|16604585|gb|AAL24149.1| putative protein
  misc_feature (1)..(279): Homolog of NCBI NO: 23307574 NR Description: putative protein phosphatase 2C homolog [Oryza
  misc_feature (1)..(280): Homolog of NCBI NO: 18399423 NR Description: protein phosphatase 2C (PP2C), putative thaliana] >gi|15724170|gb|AAL06477.1|AF411787_1 [Arabidopsis thaliana] >gi|18652945|dbj|BAB84701.1| protein
  misc_feature (1)..(280): Homolog of NCBI NO: 25411985 NR Description: probable protein phosphatase 2C [imported] -
  misc_feature (27)..(279): Homolog of NCBI NO: 7488280 NR Description: protein phosphatase 2C homolog F20O9.80 -
  misc_feature (4)..(280): Homolog of NCBI NO: 18395099 NR Description: protein phosphatase 2C (PP2C), putative
  misc_feature (4)..(280): Homolog of NCBI NO: 21537096 NR Description: protein phosphatase type 2C, putative

SEQ ID NO: 97708 - protein, 254 aa, Arabidopsis thaliana; identical to SEQ ID NO: 40328
  peptide (1)..(254): Ceres Seq. ID no. 13494038
  misc_feature (5)..(246): Pfam Name: Protein phosphatase 2C Pfam Description: Protein phosphatase 2C
  misc_feature (1)..(254): Homolog of NCBI NO: 15232538 NR Description: protein phosphatase 2C (PP2C), putative thaliana] >gi|9294253|dbj|BAB02155.1| protein phosphatase type 2C thaliana] >gi|26450048|dbj|BAC42144.1| putative protein
  misc_feature (1)..(254): Homolog of NCBI NO: 21539551 NR Description: putative protein phosphatase type 2C [Arabidopsis
  misc_feature (1)..(254): Homolog of NCBI NO: 4336436 NR Description: protein phosphatase type 2C [Lotus japonicus]
  misc_feature (1)..(253): Homolog of NCBI NO: 18417190 NR Description: protein phosphatase 2C (PP2C), putative thaliana] >gi|16604585|gb|AAL24149.1| putative protein
  misc_feature (1)..(253): Homolog of NCBI NO: 23307574 NR Description: putative protein phosphatase 2C homolog [Oryza
  misc_feature (1)..(254): Homolog of NCBI NO: 18399423 NR Description: protein phosphatase 2C (PP2C), putative thaliana] >gi|15724170|gb|AAL06477.1|AF411787_1 [Arabidopsis thaliana] >gi|18652945|dbj|BAB84701.1| protein
  misc_feature (1)..(254): Homolog of NCBI NO: 25411985 NR Description: probable protein phosphatase 2C [imported] -
  misc_feature (1)..(253): Homolog of NCBI NO: 7488280 NR Description: protein phosphatase 2C homolog F20O9.80 -
  misc_feature (1)..(254): Homolog of NCBI NO: 18395099 NR Description: protein phosphatase 2C (PP2C), putative
  misc_feature (1)..(254): Homolog of NCBI NO: 21537096 NR Description: protein phosphatase type 2C, putative

SEQ ID NO: 97709 - DNA, 1423 bp, Arabidopsis thaliana
  misc_feature (1)..(1423): Ceres Seq. ID no. 13494233
  misc_feature: MA Experiment ID: 108434 Result: Down-regulated in Transcription
  misc_feature: MA Experiment 108434 PARAMETER Experiment Name: At_Root_Tips_cDNA_P Parameter: Tissue Value: Root Tips
  misc_feature: MA Experiment ID: 108463 Result: Up-regulated in Transcription
  misc_feature: MA Experiment 108463 PARAMETER Experiment Name: At_Germinating_Seeds_cDNA_P Parameter: Age (day) Value: 3 vs. 0
  misc_feature: MA Experiment 108463 PARAMETER Experiment Name: At_Germinating_Seeds_cDNA_P Parameter: Tissue Value: Germinating Seeds
  misc_feature: MA Experiment ID: 108464 Result: Up-regulated in Transcription
  misc_feature: MA Experiment 108464 PARAMETER Experiment Name: At_Germinating_Seeds_cDNA_P Parameter: Age (day) Value: 4 vs. 0
  misc_feature: MA Experiment 108464 PARAMETER Experiment Name: At_Germinating_Seeds_cDNA_P Parameter: Tissue Value: Germinating Seeds
  misc_feature: MA Experiment ID: 108573 Result: Up-regulated in Transcription
  misc_feature: MA Experiment 108573 PARAMETER Experiment Name: At_Drought_cDNA_P Parameter: Timepoint (hr) Value: 6
  misc_feature: MA Experiment 108573 PARAMETER Experiment Name: At_Drought_cDNA_P Parameter: Tissue Value: Aerial
  misc_feature: MA Experiment 108573 PARAMETER Experiment Name: At_Drought_cDNA_P Parameter: Treatment Value: Drought vs. No Drought
  misc_feature: MA Experiment ID: 20000071 Result: Up-regulated in Transcription
  misc_feature: MA Experiment 20000071 PARAMETER Experiment Name: At_100uM_ABA_Mutants_cDNA_P Parameter: Plant Line Value: CS8104
  misc_feature: MA Experiment 20000071 PARAMETER Experiment Name: At_100uM_ABA_Mutants_cDNA_P Parameter: Timepoint (hr) Value: 6
  misc_feature: MA Experiment 20000071 PARAMETER Experiment Name: At_100uM_ABA_Mutants_cDNA_P Parameter: Tissue Value: Aerial
  misc_feature: MA Experiment 20000071 PARAMETER Experiment Name: At_100uM_ABA_Mutants_cDNA_P Parameter: Treatment Value: 100uM ABA vs. No Treatment
  misc_feature: MA Experiment ID: 20000111 Result: Down-regulated in Transcription
  misc_feature: MA Experiment 20000111 PARAMETER Experiment Name: At_42deg_Heat_cDNA_P Parameter: Temperature (deg C) Value: 42 vs. 22
  misc_feature: MA Experiment 20000111 PARAMETER Experiment Name: At_42deg_Heat_cDNA_P Parameter: Timepoint (hr) Value: 6
  misc_feature: MA Experiment 20000111 PARAMETER Experiment Name: At_42deg_Heat_cDNA_P Parameter: Tissue Value: Aerial
  misc_feature: MA Experiment ID: 20000180 Result: Up-regulated in Transcription
  misc_feature: MA Experiment 20000180 PARAMETER Experiment Name: At_Germinating_Seeds_P Parameter: Age (hr) Value: 24 vs. 0
  misc_feature: MA Experiment 20000180 PARAMETER Experiment Name: At_Germinating_Seeds_P Parameter: Tissue Value: Germinating Seeds
  misc_feature: MA Experiment ID: 20000495 Result: Up-regulated in Transcription
  misc_feature: MA Experiment 20000495 PARAMETER Experiment Name: At_Guard_Cells_P Parameter: Harvest Date Value: 8/2/2002
  misc_feature: MA Experiment 20000495 PARAMETER Experiment Name: At_Guard_Cells_P Parameter: Organism Value: A. thaliana
  misc_feature: MA Experiment 20000495 PARAMETER Experiment Name: At_Guard_Cells_P Parameter: Tissue Value: Guard Cells vs. Leaves
  misc_feature: MA Experiment ID: 20001247 Result: Down-regulated in Transcription
  misc_feature: MA Experiment 20001247 PARAMETER Experiment Name: At_Far-red-induction_P Parameter: Age (day) Value: 7
  misc_feature: MA Experiment 20001247 PARAMETER Experiment Name: At_Far-red-induction_P Parameter: Light Value: Far-red vs. White
  misc_feature: MA Experiment 20001247 PARAMETER Experiment Name: At_Far-red-induction_P Parameter: Organism Value: A. thaliana
  misc_feature: MA Experiment 20001247 PARAMETER Experiment Name: At_Far-red-induction_P Parameter: Plant Line Value: Columbia
  misc_feature: MA Experiment 20001247 PARAMETER Experiment Name: At_Far-red-induction_P Parameter: Timepoint (hr) Value: 1
  misc_feature: MA Experiment 20001247 PARAMETER Experiment Name: At_Far-red-induction_P Parameter: Tissue Value: Whole Plant
  misc_feature: MA Experiment ID: 20001451 Result: Down-regulated in Transcription
  misc_feature: MA Experiment 20001451 PARAMETER Experiment Name: At_Far-red-induction_P Parameter: Age (day) Value: 7
  misc_feature: MA Experiment 20001451 PARAMETER Experiment Name: At_Far-red-induction_P Parameter: Light Value: Far-red vs. White
  misc_feature: MA Experiment 20001451 PARAMETER Experiment Name: At_Far-red-induction_P Parameter: Organism Value: A. thaliana
  misc_feature: MA Experiment 20001451 PARAMETER Experiment Name: At_Far-red-induction_P Parameter: Plant Line Value: Columbia
  misc_feature: MA Experiment 20001451 PARAMETER Experiment Name: At_Far-red-induction_P Parameter: Timepoint (hr) Value: 24
  misc_feature: MA Experiment 20001451 PARAMETER Experiment Name: At_Far-red-induction_P Parameter: Tissue Value: Whole Plant
  misc_feature: MA Experiment ID: 20001560 Result: Down-regulated in Transcription
  misc_feature: MA Experiment 20001560 PARAMETER Experiment Name: At_Drought_Soil_Dry_P Parameter: Age (day) Value: 28
  misc_feature: MA Experiment 20001560 PARAMETER Experiment Name: At_Drought_Soil_Dry_P Parameter: Organism Value: A. thaliana
  misc_feature: MA Experiment 20001560 PARAMETER Experiment Name: At_Drought_Soil_Dry_P Parameter: Plant Line Value: WS
  misc_feature: MA Experiment 20001560 PARAMETER Experiment Name: At_Drought_Soil_Dry_P Parameter: Post Timepoint (hr) Value: None
  misc_feature: MA Experiment 20001560 PARAMETER Experiment Name: At_Drought_Soil_Dry_P Parameter: Post-Treatment Value: None
  misc_feature: MA Experiment 20001560 PARAMETER Experiment Name: At_Drought_Soil_Dry_P Parameter: Timepoint (day) Value: 14
  misc_feature: MA Experiment 20001560 PARAMETER Experiment Name: At_Drought_Soil_Dry_P Parameter: Treatment Value: Drought vs. No Drought
attgataatttgttacactagttgtgaattgagtttcttggttctttcattaattttgatttggttttgtagcctacgaattcgaatcatcagcatcatcttcaacaccagcttaacgaaaatggaagtataataagtggccacggactagtactctctcaccaacttccacctctccaagcaaaccctaaccctaaccaccaccatgtcgctacctctgctggtcttccgtcaaggatgggtggatcgatggcggagagagcaaggcaggccaacattcctccactagcgggacccctaaagtgtcctcgatgcgactccagcaacactaagttctgttactacaacaactataacctcactcagcctcgtcacttctgcaaaggttgccgtcgctactggacacaagggggcgccctgagaaacgtccctgtaggtggaggctgccggaggaataacaagaagggcaaaaatggaaatttaaaatcttcttcttcttcgtccaaacagtcttcctcggtcaacgctcaaagtcctagctcaggacagctaaggacaaatcatcagttccctttttcaccaactctttacaatctcactcaactcggaggtattggtttgaacttagccgctactaatggcaacaaccaagctcaccagatcggttccagtttgatgatgagcgatctagggtttctccatggacgaaatacttcaactccgatgacgggaaacattcatgaaaacaacaacaataataacaatgaaaacaacctaatggcatccgttggatctttgagcccctttgctctcttcgatccaacgacggggctatacgctttccagaacgacggtaatatcgggaacaacgttgggatatctggttcttctacttccatggttgattctagggtttatcagacgcctccggtgaagatggaagaacaacctaatttggctaacttgtctagaccggtctccggtttgacgtctcctgggaatcaaacaaatcagtacttttggcctggttcggatttctcgggtccttctaatgatctcttgtgagatttttgtgtgttttgtcggatcattaacgtatgttacgacttacgacgtggagattgattaaaaggactaccaacggtcaggattaactgcatgcatagtctgtgctcaagacgatgatcgtggagaagtacaaggacaaactaaaaggtatcttaattagagattgtggttttacaacttaaattcgatacttatttatataatcaggtgtgtcatataatttgtttgtattgcgtgatttcatggttgatctgatttctcaagttgctatatatgcctcaatacatgtgtgtaacagtccaatttgtatactctttagactgaattttatcgaatatataatatttttcagttt

SEQ ID NO: 97710 - protein, 275 aa, Arabidopsis thaliana; identical to SEQ ID NO: 20921
  peptide (1)..(275): Ceres Seq. ID no. 13494234
  misc_feature (16)..(78): Pfam Name: Dof domain, zinc finger Pfam Description: Dof domain, zinc finger
  misc_feature (1)..(275): Homolog of NCBI NO: 25406987 NR Description: hypothetical protein [imported] - Arabidopsis >gi|8439908|gb|AAF75094.1|AC007583_30 Strong similarity to zinc protein OBP2 from Arabidopsis thaliana gb|AF155816. EST gb|N65215
  misc_feature (1)..(275): Homolog of NCBI NO: 30680246 NR Description: Dof zinc finger protein [Arabidopsis thaliana]
  misc_feature (1)..(275): Homolog of NCBI NO: 21593773 NR Description: zinc finger protein OBP2 [Arabidopsis thaliana]
  misc_feature (1)..(275): Homolog of NCBI NO: 30680237 NR Description: Dof zinc finger protein [Arabidopsis thaliana] Strong similarity to zinc finger protein OBP2 [Arabidopsis >gi|20260006|gb|AAM13350.1| strong similarity to zinc finger
  misc_feature (5)..(229): Homolog of NCBI NO: 5059394 NR Description: zinc finger protein OBP2 [Arabidopsis thaliana]
  misc_feature (1)..(273): Homolog of NCBI NO: 30684022 NR Description: Dof zinc finger protein [Arabidopsis thaliana]
  misc_feature (1)..(137): Homolog of NCBI NO: 25352305 NR Description: probable DOF zinc finger protein [imported] - thaliana >gi|3927829|gb|AAC79586.1| putative DOF zinc finger
  misc_feature (1)..(233): Homolog of NCBI NO: 15224320 NR Description: Dof zinc finger protein [Arabidopsis thaliana]
  misc_feature (1)..(146): Homolog of NCBI NO: 15241827 NR Description: Dof zinc finger protein [Arabidopsis thaliana]
  misc_feature (1)..(269): Homolog of NCBI NO: 7688355 NR Description: Dof zinc finger protein [Solanum tuberosum]

SEQ ID NO: 97711 - protein, 271 aa, Arabidopsis thaliana; identical to SEQ ID NO: 20922
  peptide (1)..(271): Ceres Seq. ID no. 13494235
  misc_feature (12)..(74): Pfam Name: Dof domain, zinc finger Pfam Description: Dof domain, zinc finger
  misc_feature (1)..(271): Homolog of NCBI NO: 25406987 NR Description: hypothetical protein [imported] - Arabidopsis >gi|8439908|gb|AAF75094.1|AC007583_30 Strong similarity to zinc protein OBP2 from Arabidopsis thaliana gb|AF155816. EST gb|N65215
  misc_feature (1)..(271): Homolog of NCBI NO: 30680246 NR Description: Dof zinc finger protein [Arabidopsis thaliana]
  misc_feature (1)..(271): Homolog of NCBI NO: 21593773 NR Description: zinc finger protein OBP2 [Arabidopsis thaliana]
  misc_feature (1)..(271): Homolog of NCBI NO: 30680237 NR Description: Dof zinc finger protein [Arabidopsis thaliana] Strong similarity to zinc finger protein OBP2 [Arabidopsis >gi|20260006|gb|AAM13350.1| strong similarity to zinc finger
  misc_feature (1)..(225): Homolog of NCBI NO: 5059394 NR Description: zinc finger protein OBP2 [Arabidopsis thaliana]
  misc_feature (1)..(269): Homolog of NCBI NO: 30684022 NR Description: Dof zinc finger protein [Arabidopsis thaliana]
  misc_feature (1)..(133): Homolog of NCBI NO: 25352305 NR Description: probable DOF zinc finger protein [imported] - thaliana >gi|3927829|gb|AAC79586.1| putative DOF zinc finger
  misc_feature (1)..(229): Homolog of NCBI NO: 15224320 NR Description: Dof zinc finger protein [Arabidopsis thaliana]
  misc_feature (1)..(142): Homolog of NCBI NO: 15241827 NR Description: Dof zinc finger protein [Arabidopsis thaliana]
  misc_feature (1)..(265): Homolog of NCBI NO: 7688355 NR Description: Dof zinc finger protein [Solanum tuberosum]

SEQ ID NO: 97712 - DNA, 1423 bp, Arabidopsis thaliana
  misc_feature (1)..(1423): Ceres Seq. ID no. 13494365
  misc_feature: MA Experiment ID: 108434 Result: Up-regulated in Transcription
  misc_feature: MA Experiment 108434 PARAMETER Experiment Name: At_Root_Tips_cDNA_P Parameter: Tissue Value: Root Tips
  misc_feature: MA Experiment ID: 108462 Result: Down-regulated in Transcription
  misc_feature: MA Experiment 108462 PARAMETER Experiment Name: At_Germinating_Seeds_cDNA_P Parameter: Age (day) Value: 2 vs. 0
  misc_feature: MA Experiment 108462 PARAMETER Experiment Name: At_Germinating_Seeds_cDNA_P Parameter: Tissue Value: Germinating Seeds
  misc_feature: MA Experiment ID: 108463 Result: Down-regulated in Transcription
  misc_feature: MA Experiment 108463 PARAMETER Experiment Name: At_Germinating_Seeds_cDNA_P Parameter: Age (day) Value: 3 vs. 0
  misc_feature: MA Experiment 108463 PARAMETER Experiment Name: At_Germinating_Seeds_cDNA_P Parameter: Tissue Value: Germinating Seeds
  misc_feature: MA Experiment ID: 108595 Result: Down-regulated in Transcription
  misc_feature: MA Experiment 108595 PARAMETER Experiment Name: At_Ler-pi_Ovule_cDNA_P Parameter: Plant Line Value: null
  misc_feature: MA Experiment ID: 20000087 Result: Down-regulated in Transcription
  misc_feature: MA Experiment 20000087 PARAMETER Experiment Name: At_100uM_ABA_Mutants_cDNA_P Parameter: Plant Line Value: WS
  misc_feature: MA Experiment 20000087 PARAMETER Experiment Name: At_100uM_ABA_Mutants_cDNA_P Parameter: Timepoint (hr) Value: 6
  misc_feature: MA Experiment 20000087 PARAMETER Experiment Name: At_100uM_ABA_Mutants_cDNA_P Parameter: Tissue Value: Aerial
  misc_feature: MA Experiment 20000087 PARAMETER Experiment Name: At_100uM_ABA_Mutants_cDNA_P Parameter: Treatment Value: 100uM ABA vs. No Treatment
  misc_feature: MA Experiment ID: 20000117 Result: Down-regulated in Transcription
  misc_feature: MA Experiment 20000117 PARAMETER Experiment Name: At_100uM_ABA_Mutants_cDNA_P Parameter: Plant Line Value: Columbia
  misc_feature: MA Experiment 20000117 PARAMETER Experiment Name: At_100uM_ABA_Mutants_cDNA_P Parameter: Timepoint (hr) Value: 6
  misc_feature: MA Experiment 20000117 PARAMETER Experiment Name: At_100uM_ABA_Mutants_cDNA_P Parameter: Tissue Value: Aerial
  misc_feature: MA Experiment 20000117 PARAMETER Experiment Name: At_100uM_ABA_Mutants_cDNA_P Parameter: Treatment Value: 100uM ABA vs. No Treatment
  misc_feature: MA Experiment ID: 20000185 Result: Up-regulated in Transcription
  misc_feature: MA Experiment 20000185 PARAMETER Experiment Name: At_Roots__P Parameter: Age (day) Value: 7 vs. 21
  misc_feature: MA Experiment 20000185 PARAMETER Experiment Name: At_Roots__P Parameter: Organism Value: A. thaliana
  misc_feature: MA Experiment 20000185 PARAMETER Experiment Name: At_Roots__P Parameter: Tissue Value: Roots vs. Whole Plant
  misc_feature: MA Experiment ID: 20000227 Result: Up-regulated in Transcription
  misc_feature: MA Experiment 20000227 PARAMETER Experiment Name: At_Root-Tips-vs-Tops_P Parameter: Tissue Value: Root Tips vs. Root Tops
  misc_feature: MA Experiment ID: 20000234 Result: Up-regulated in Transcription
  misc_feature: MA Experiment 20000234 PARAMETER Experiment Name: At_Siliques_P Parameter: Age (day) Value: 21
  misc_feature: MA Experiment 20000234 PARAMETER Experiment Name: At_Siliques_P Parameter: Organism Value: A. thaliana
  misc_feature: MA Experiment 20000234 PARAMETER Experiment Name: At_Siliques_P Parameter: Plant Line Value: WS
  misc_feature: MA Experiment 20000234 PARAMETER Experiment Name: At_Siliques_P Parameter: Tissue Value: Less Than 5mm Siliques vs. Whole Plant
  misc_feature: MA Experiment ID: 20000235 Result: Up-regulated in Transcription
  misc_feature: MA Experiment 20000235 PARAMETER Experiment Name: At_Siliques_P Parameter: Age (day) Value: 21
  misc_feature: MA Experiment 20000235 PARAMETER Experiment Name: At_Siliques_P Parameter: Organism Value: A. thaliana
  misc_feature: MA Experiment 20000235 PARAMETER Experiment Name: At_Siliques_P Parameter: Plant Line Value: WS
  misc_feature: MA Experiment 20000235 PARAMETER Experiment Name: At_Siliques_P Parameter: Tissue Value: 5-10mm Siliques vs. Whole Plant
  misc_feature: MA Experiment ID: 20000264 Result: Up-regulated in Transcription
  misc_feature: MA Experiment 20000264 PARAMETER Experiment Name: At_Open_Flower_P Parameter: Age (day) Value: 21
  misc_feature: MA Experiment 20000264 PARAMETER Experiment Name: At_Open_Flower_P Parameter: Plant Line Value: WS
  misc_feature: MA Experiment 20000264 PARAMETER Experiment Name: At_Open_Flower_P Parameter: Tissue Value: Open Flower vs. Whole Plant
  misc_feature: MA Experiment ID: 20000437 Result: Down-regulated in Transcription
  misc_feature: MA Experiment 20000437 PARAMETER Experiment Name: At_Drought_P Parameter: Age (day) Value: 8
  misc_feature: MA Experiment 20000437 PARAMETER Experiment Name: At_Drought_P Parameter: Organism Value: A. thaliana
  misc_feature: MA Experiment 20000437 PARAMETER Experiment Name: At_Drought_P Parameter: Plant Line Value: WS
  misc_feature: MA Experiment 20000437 PARAMETER Experiment Name: At_Drought_P Parameter: Timepoint (hr) Value: 24
  misc_feature: MA Experiment 20000437 PARAMETER Experiment Name: At_Drought_P Parameter: Tissue Value: Whole Plant
  misc_feature: MA Experiment 20000437 PARAMETER Experiment Name: At_Drought_P Parameter: Treatment Value: Drought vs. No Drought
  misc_feature: MA Experiment ID: 20001451 Result: Down-regulated in Transcription
  misc_feature: MA Experiment 20001451 PARAMETER Experiment Name: At_Far-red-induction_P Parameter: Age (day) Value: 7
  misc_feature: MA Experiment 20001451 PARAMETER Experiment Name: At_Far-red-induction_P Parameter: Light Value: Far-red vs. White
  misc_feature: MA Experiment 20001451 PARAMETER Experiment Name: At_Far-red-induction_P Parameter: Organism Value: A. thaliana
  misc_feature: MA Experiment 20001451 PARAMETER Experiment Name: At_Far-red-induction_P Parameter: Plant Line Value: Columbia
  misc_feature: MA Experiment 20001451 PARAMETER Experiment Name: At_Far-red-induction_P Parameter: Timepoint (hr) Value: 24
  misc_feature: MA Experiment 20001451 PARAMETER Experiment Name: At_Far-red-induction_P Parameter: Tissue Value: Whole Plant
  misc_feature: MA Experiment ID: 20001557 Result: Up-regulated in Transcription
  misc_feature: MA Experiment 20001557 PARAMETER Experiment Name: At_Drought_Soil_Dry_P Parameter: Age (day) Value: 27
  misc_feature: MA Experiment 20001557 PARAMETER Experiment Name: At_Drought_Soil_Dry_P Parameter: Organism Value: A. thaliana
  misc_feature: MA Experiment 20001557 PARAMETER Experiment Name: At_Drought_Soil_Dry_P Parameter: Plant Line Value: WS
  misc_feature: MA Experiment 20001557 PARAMETER Experiment Name: At_Drought_Soil_Dry_P Parameter: Post Timepoint (hr) Value: 3
  misc_feature: MA Experiment 20001557 PARAMETER Experiment Name: At_Drought_Soil_Dry_P Parameter: Post-Treatment Value: Re-Water vs. No Drought
  misc_feature: MA Experiment 20001557 PARAMETER Experiment Name: At_Drought_Soil_Dry_P Parameter: Timepoint (day) Value: 13
  misc_feature: MA Experiment 20001557 PARAMETER Experiment Name: At_Drought_Soil_Dry_P Parameter: Treatment Value: Drought vs. No Drought
  misc_feature: MA Experiment ID: 20001558 Result: Up-regulated in Transcription
  misc_feature: MA Experiment 20001558 PARAMETER Experiment Name: At_Drought_Soil_Dry_P Parameter: Age (day) Value: 27
  misc_feature: MA Experiment 20001558 PARAMETER Experiment Name: At_Drought_Soil_Dry_P Parameter: Organism Value: A. thaliana
  misc_feature: MA Experiment 20001558 PARAMETER Experiment Name: At_Drought_Soil_Dry_P Parameter: Plant Line Value: WS
  misc_feature: MA Experiment 20001558 PARAMETER Experiment Name: At_Drought_Soil_Dry_P Parameter: Post Timepoint (hr) Value: 6
  misc_feature: MA Experiment 20001558 PARAMETER Experiment Name: At_Drought_Soil_Dry_P Parameter: Post-Treatment Value: Re-Water vs. No Drought
  misc_feature: MA Experiment 20001558 PARAMETER Experiment Name: At_Drought_Soil_Dry_P Parameter: Timepoint (day) Value: 13
  misc_feature: MA Experiment 20001558 PARAMETER Experiment Name: At_Drought_Soil_Dry_P Parameter: Treatment Value: Drought vs. No Drought
  misc_feature: MA Experiment ID: 20001560 Result: Up-regulated in Transcription
  misc_feature: MA Experiment 20001560 PARAMETER Experiment Name: At_Drought_Soil_Dry_P Parameter: Age (day) Value: 28
  misc_feature: MA Experiment 20001560 PARAMETER Experiment Name: At_Drought_Soil_Dry_P Parameter: Organism Value: A. thaliana
  misc_feature: MA Experiment 20001560 PARAMETER Experiment Name: At_Drought_Soil_Dry_P Parameter: Plant Line Value: WS
  misc_feature: MA Experiment 20001560 PARAMETER Experiment Name: At_Drought_Soil_Dry_P Parameter: Post Timepoint (hr) Value: None
  misc_feature: MA Experiment 20001560 PARAMETER Experiment Name: At_Drought_Soil_Dry_P Parameter: Post-Treatment Value: None
  misc_feature: MA Experiment 20001560 PARAMETER Experiment Name: At_Drought_Soil_Dry_P Parameter: Timepoint (day) Value: 14
  misc_feature: MA Experiment 20001560 PARAMETER Experiment Name: At_Drought_Soil_Dry_P Parameter: Treatment Value: Drought vs. No Drought
  misc_feature: MA Experiment ID: 20001757 Result: Up-regulated in Transcription
  misc_feature: MA Experiment 20001757 PARAMETER Experiment Name: At_50mM_NH4NO3_L-to-H_P Parameter: Timepoint (hr) Value: 6
  misc_feature: MA Experiment 20001757 PARAMETER Experiment Name: At_50mM_NH4NO3_L-to-H_P Parameter: Tissue Value: Leaf
  misc_feature: MA Experiment 20001757 PARAMETER Experiment Name: At_50mM_NH4NO3_L-to-H_P Parameter: Treatment Value: 50mM NH4NO3 vs 100mM Mannitol
acagcctcacttccaaacccttcgtttacagcaaaaaatcgaaaatggttgcctcagccgccgcacgacctcttgtcaccgtccaaggacttgacggtgacatgagcaccgatcaatccaccaccgtcactttaccagacgtcatgactgctccagttcgacctgacattgtcaacttcgtccacgcccaaatctccaacaacagccgtcagccttacgcagtctccaaaaaggccggtcaccaaacctccgccgagtcctggggaaccggaagagccgtgtcacgtatccctcgtgttcctggtggtggaactcaccgtgccggtcaagcagcgttcggaaacatgtgtcgtggtggtcgtatgtttgctccgactaagatctggagacgctggcaccgtcgtgtcaatgtcaacatgaagaggcacgcgattgtttctgcaatcgctgctactgctgttccagctcttgtgatggctcgtggtcacaagatcgagaatgttcctgagatgcctcttgttgttagcgactcagctgaagctgtggagaagacatcagctgcgatcaaggtattgaagcagatcggtgcttacgacgatgcggagaaagctaagaacagtattggaattcgtcctggtaaaggtaaaatgaggaatcgtcgttacatttctaggaaaggtcctcttgttgtgtttggaactgaaggagccaagattgtgaaagcttttaggaatcttcctggtgttgagctttgtcacgttgagaggcttaacttgttgaaattagcccctggtggtcaccttggtaggtttgtgatttggactaagtctgcttttgagaagcttgaatctatctatggctcgtttgagaaaccatcagagaagaagaagggttacgtcttgcctcgtgcgaagatggtgaatgctgatcttgctaggattattaactccgatgaggtacagagtgtggtgaacccgattaaggatggttccaagagagcggttctgaagaagaatccattgaagaaccttaatgtgatgttcaagttgaatccttatgctaagaccgcaaagagaatgtctctgttggctgaagcttcaagggttaaggctaagaaggagaagctcgagaagaagaggaaagtcgtcactaaggaggaggcccaagcgatcaaagcagcaggcaaggcttggtatcagactatgatttcagacagtgactacaccgagttcgataacttcaccaagtggcttggcgctagtcagtaatgatgctctcgtcatcgcaaagtctcttatatctaggcaaagattttggttttctgatttatgttcttcgtttgtattggatttatctgggattttatgttgttgagttggtaagacgatttttaagaactatgatggtgtttttcaaactcttt

SEQ ID NO: 97713 - protein, 421 aa, Arabidopsis thaliana; identical to SEQ ID NO: 36165
  peptide (1)..(421): Ceres Seq. ID no. 13494366
  misc_feature (40)..(284): Pfam Name: Ribosomal protein L4/L1 family Pfam Description: Ribosomal protein L4/L1 family
  misc_feature (15)..(421): Homolog of NCBI NO: 15242558 NR Description: 60S ribosomal protein L4/L1 (RPL4D) [Arabidopsis
  misc_feature (15)..(421): Homolog of NCBI NO: 26450328 NR Description: putative 60S ribosomal protein [Arabidopsis
  misc_feature (16)..(421): Homolog of NCBI NO: 15232723 NR Description: 60S ribosomal protein L4/L1 (RPL4A) [Arabidopsis
  misc_feature (16)..(421): Homolog of NCBI NO: 21593543 NR Description: 60S ribosomal protein L4-B (L1) [Arabidopsis
  misc_feature (17)..(421): Homolog of NCBI NO: 17367847 NR Description: 60S ribosomal protein L4 (L1)
  misc_feature (22)..(421): Homolog of NCBI NO: 34393487 NR Description: putative 60S ribosomal protein L4/L1 [Oryza
  misc_feature (115)..(421): Homolog of NCBI NO: 13605831 NR Description: AT5g02870/F9G14_180 [Arabidopsis thaliana]
  misc_feature (18)..(421): Homolog of NCBI NO: 34897236 NR Description: putative 60S ribosomal protein L1 [Oryza sativa
  misc_feature (64)..(421): Homolog of NCBI NO: 6441068 NR Description: 60S ribosomal protein L4 [Chlamydomonas sp. HS-5]
  misc_feature (20)..(386): Homolog of NCBI NO: 1350686 NR Description: 60S RIBOSOMAL PROTEIN L4 (L1)

SEQ ID NO: 97714 - protein, 407 aa, Arabidopsis thaliana; identical to SEQ ID NO: 36166
  peptide (1)..(407): Ceres Seq. ID no. 13494367
  misc_feature (26)..(270): Pfam Name: Ribosomal protein L4/L1 family Pfam Description: Ribosomal protein L4/L1 family
  misc_feature (1)..(407): Homolog of NCBI NO: 15242558 NR Description: 60S ribosomal protein L4/L1 (RPL4D) [Arabidopsis
  misc_feature (1)..(407): Homolog of NCBI NO: 26450328 NR Description: putative 60S ribosomal protein [Arabidopsis
  misc_feature (2)..(407): Homolog of NCBI NO: 15232723 NR Description: 60S ribosomal protein L4/L1 (RPL4A) [Arabidopsis
  misc_feature (2)..(407): Homolog of NCBI NO: 21593543 NR Description: 60S ribosomal protein L4-B (L1) [Arabidopsis
  misc_feature (3)..(407): Homolog of NCBI NO: 17367847 NR Description: 60S ribosomal protein L4 (L1)
  misc_feature (8)..(407): Homolog of NCBI NO: 34393487 NR Description: putative 60S ribosomal protein L4/L1 [Oryza
  misc_feature (101)..(407): Homolog of NCBI NO: 13605831 NR Description: AT5g02870/F9G14_180 [Arabidopsis thaliana]
  misc_feature (4)..(407): Homolog of NCBI NO: 34897236 NR Description: putative 60S ribosomal protein L1 [Oryza sativa
  misc_feature (50)..(407): Homolog of NCBI NO: 6441068 NR Description: 60S ribosomal protein L4 [Chlamydomonas sp. HS-5]
  misc_feature (6)..(372): Homolog of NCBI NO: 1350686 NR Description: 60S RIBOSOMAL PROTEIN L4 (L1)

SEQ ID NO: 97715 - protein, 388 aa, Arabidopsis thaliana; identical to SEQ ID NO: 36167
  peptide (1)..(388): Ceres Seq. ID no. 13494368
  misc_feature (7)..(251): Pfam Name: Ribosomal protein L4/L1 family Pfam Description: Ribosomal protein L4/L1 family
  misc_feature (1)..(388): Homolog of NCBI NO: 15242558 NR Description: 60S ribosomal protein L4/L1 (RPL4D) [Arabidopsis
  misc_feature (1)..(388): Homolog of NCBI NO: 26450328 NR Description: putative 60S ribosomal protein [Arabidopsis
  misc_feature (1)..(388): Homolog of NCBI NO: 15232723 NR Description: 60S ribosomal protein L4/L1 (RPL4A) [Arabidopsis
  misc_feature (1)..(388): Homolog of NCBI NO: 21593543 NR Description: 60S ribosomal protein L4-B (L1) [Arabidopsis
  misc_feature (1)..(388): Homolog of NCBI NO: 17367847 NR Description: 60S ribosomal protein L4 (L1)
  misc_feature (1)..(388): Homolog of NCBI NO: 34393487 NR Description: putative 60S ribosomal protein L4/L1 [Oryza
  misc_feature (82)..(388): Homolog of NCBI NO: 13605831 NR Description: AT5g02870/F9G14_180 [Arabidopsis thaliana]
  misc_feature (1)..(388): Homolog of NCBI NO: 34897236 NR Description: putative 60S ribosomal protein L1 [Oryza sativa
  misc_feature (31)..(388): Homolog of NCBI NO: 6441068 NR Description: 60S ribosomal protein L4 [Chlamydomonas sp. HS-5]
  misc_feature (1)..(353): Homolog of NCBI NO: 1350686 NR Description: 60S RIBOSOMAL PROTEIN L4 (L1)

SEQ ID NO: 97716 - DNA, 584 bp, Arabidopsis thaliana
  misc_feature (1)..(584): Ceres Seq. ID no. 13496727
  misc_feature: MA Experiment ID: 108434 Result: Up-regulated in Transcription
  misc_feature: MA Experiment 108434 PARAMETER Experiment Name: At_Root_Tips_cDNA_P Parameter: Tissue Value: Root Tips
  misc_feature: MA Experiment ID: 108462 Result: Down-regulated in Transcription
  misc_feature: MA Experiment 108462 PARAMETER Experiment Name: At_Germinating_Seeds_cDNA_P Parameter: Age (day) Value: 2 vs. 0
  misc_feature: MA Experiment 108462 PARAMETER Experiment Name: At_Germinating_Seeds_cDNA_P Parameter: Tissue Value: Germinating Seeds
  misc_feature: MA Experiment ID: 108463 Result: Down-regulated in Transcription
  misc_feature: MA Experiment 108463 PARAMETER Experiment Name: At_Germinating_Seeds_cDNA_P Parameter: Age (day) Value: 3 vs. 0
  misc_feature: MA Experiment 108463 PARAMETER Experiment Name: At_Germinating_Seeds_cDNA_P Parameter: Tissue Value: Germinating Seeds
  misc_feature: MA Experiment ID: 108573 Result: Down-regulated in Transcription
  misc_feature: MA Experiment 108573 PARAMETER Experiment Name: At_Drought_cDNA_P Parameter: Timepoint (hr) Value: 6
  misc_feature: MA Experiment 108573 PARAMETER Experiment Name: At_Drought_cDNA_P Parameter: Tissue Value: Aerial
  misc_feature: MA Experiment 108573 PARAMETER Experiment Name: At_Drought_cDNA_P Parameter: Treatment Value: Drought vs. No Drought
  misc_feature: MA Experiment ID: 20000264 Result: Up-regulated in Transcription
  misc_feature: MA Experiment 20000264 PARAMETER Experiment Name: At_Open_Flower_P Parameter: Age (day) Value: 21
  misc_feature: MA Experiment 20000264 PARAMETER Experiment Name: At_Open_Flower_P Parameter: Plant Line Value: WS
  misc_feature: MA Experiment 20000264 PARAMETER Experiment Name: At_Open_Flower_P Parameter: Tissue Value: Open Flower vs. Whole Plant
  misc_feature: MA Experiment ID: 20000573 Result: Up-regulated in Transcription
  misc_feature: MA Experiment 20000573 PARAMETER Experiment Name: At_100uM_ABA_Mutants__P Parameter: Organism Value: A. thaliana
  misc_feature: MA Experiment 20000573 PARAMETER Experiment Name: At_100uM_ABA_Mutants__P Parameter: Plant Line Value: CS22 vs. Ler wt
  misc_feature: MA Experiment 20000573 PARAMETER Experiment Name: At_100uM_ABA_Mutants__P Parameter: Timepoint (hr) Value: N/A
  misc_feature: MA Experiment 20000573 PARAMETER Experiment Name: At_100uM_ABA_Mutants__P Parameter: Tissue Value: Whole Plant
  misc_feature: MA Experiment 20000573 PARAMETER Experiment Name: At_100uM_ABA_Mutants__P Parameter: Treatment Value: None
  misc_feature: MA Experiment ID: 20001558 Result: Up-regulated in Transcription
  misc_feature: MA Experiment 20001558 PARAMETER Experiment Name: At_Drought_Soil_Dry_P Parameter: Age (day) Value: 27
  misc_feature: MA Experiment 20001558 PARAMETER Experiment Name: At_Drought_Soil_Dry_P Parameter: Organism Value: A. thaliana
  misc_feature: MA Experiment 20001558 PARAMETER Experiment Name: At_Drought_Soil_Dry_P Parameter: Plant Line Value: WS
  misc_feature: MA Experiment 20001558 PARAMETER Experiment Name: At_Drought_Soil_Dry_P Parameter: Post Timepoint (hr) Value: 6
  misc_feature: MA Experiment 20001558 PARAMETER Experiment Name: At_Drought_Soil_Dry_P Parameter: Post-Treatment Value: Re-Water vs. No Drought
  misc_feature: MA Experiment 20001558 PARAMETER Experiment Name: At_Drought_Soil_Dry_P Parameter: Timepoint (day) Value: 13
  misc_feature: MA Experiment 20001558 PARAMETER Experiment Name: At_Drought_Soil_Dry_P Parameter: Treatment Value: Drought vs. No Drought
  misc_feature: MA Experiment ID: 20001560 Result: Up-regulated in Transcription
  misc_feature: MA Experiment 20001560 PARAMETER Experiment Name: At_Drought_Soil_Dry_P Parameter: Age (day) Value: 28
  misc_feature: MA Experiment 20001560 PARAMETER Experiment Name: At_Drought_Soil_Dry_P Parameter: Organism Value: A. thaliana
  misc_feature: MA Experiment 20001560 PARAMETER Experiment Name: At_Drought_Soil_Dry_P Parameter: Plant Line Value: WS
  misc_feature: MA Experiment 20001560 PARAMETER Experiment Name: At_Drought_Soil_Dry_P Parameter: Post Timepoint (hr) Value: None
  misc_feature: MA Experiment 20001560 PARAMETER Experiment Name: At_Drought_Soil_Dry_P Parameter: Post-Treatment Value: None
  misc_feature: MA Experiment 20001560 PARAMETER Experiment Name: At_Drought_Soil_Dry_P Parameter: Timepoint (day) Value: 14
  misc_feature: MA Experiment 20001560 PARAMETER Experiment Name: At_Drought_Soil_Dry_P Parameter: Treatment Value: Drought vs. No Drought
  misc_feature: MA Experiment ID: 20001757 Result: Up-regulated in Transcription
  misc_feature: MA Experiment 20001757 PARAMETER Experiment Name: At_50mM_NH4NO3_L-to-H_P Parameter: Timepoint (hr) Value: 6
  misc_feature: MA Experiment 20001757 PARAMETER Experiment Name: At_50mM_NH4NO3_L-to-H_P Parameter: Tissue Value: Leaf
  misc_feature: MA Experiment 20001757 PARAMETER Experiment Name: At_50mM_NH4NO3_L-to-H_P Parameter: Treatment Value: 50mM NH4NO3 vs 100mM Mannitol
cacttcttcatcgccgtctgcacaaaaccctaatctcacaatctcctacgagatctatcagtctccacgaagatgaaggttgttgccgcatacttgctcgctgttttgagcggaaaagcttcaccaaccagtgccgatatcaagactatccttggatcagttggtgctgagacagaggattctcagattgagcttttgttgaaggaagtgaaaggaaaagatttggctgagttgattgctgctggaagggagaagttagcttcagtgccgtctggtggcggaggtggtgttgcggttgcttctgctacatctggaggtggaggaggtggtggtgcttctgctgctgagtccaagaaagaagagaagaaggaagaaaaggaagaatccgatgatgacatgggtttcagtctattcgagtaagctggtagtagcatgaaaagtccggttttgttgtcctcttttaatattgtaaccttttgaaatctatatgttgttgttgtttagtttgtattcgatcatcttttttagacattgctgaaattctcaagagtttttgacccgaatgtcatttgcactttgttgtt

SEQ ID NO: 97717 - protein, 115 aa, Arabidopsis thaliana; identical to SEQ ID NO: 23308
  peptide (1)..(115): Ceres Seq. ID no. 13496728
  misc_feature (17)..(114): Pfam Name: 60s Acidic ribosomal protein Pfam Description: 60s Acidic ribosomal protein
  misc_feature (1)..(115): Homolog of NCBI NO: 15226230 NR Description: 60S acidic ribosomal protein P2 (RPP2B) thaliana] >gi|30683617|ref|NP_850106.1| 60S acidic ribosomal P2 (RPP2B) [Arabidopsis thaliana]
  misc_feature (1)..(115): Homolog of NCBI NO: 21593095 NR Description: 60S acidic ribosomal protein P2 [Arabidopsis
  misc_feature (1)..(115): Homolog of NCBI NO: 15226231 NR Description: 60S acidic ribosomal protein P2 (RPP2A)
  misc_feature (1)..(115): Homolog of NCBI NO: 24473796 NR Description: 60s acidic ribosomal protein [Prunus dulcis]
  misc_feature (1)..(115): Homolog of NCBI NO: 34906408 NR Description: putative 60S acidic ribosomal protein P2A [Oryza
  misc_feature (1)..(115): Homolog of NCBI NO: 15230454 NR Description: 60S acidic ribosomal protein P2 (RPP2D)
  misc_feature (1)..(115): Homolog of NCBI NO: 730583 NR Description: 60S acidic ribosomal protein P2
  misc_feature (1)..(115): Homolog of NCBI NO: 1173073 NR Description: 60S ACIDIC RIBOSOMAL PROTEIN P2A (P2)
  misc_feature (1)..(115): Homolog of NCBI NO: 899610 NR Description: acidic ribosomal protein P2
  misc_feature (1)..(115): Homolog of NCBI NO: 4204372 NR Description: acidic ribosomal protein P2a-2 [Zea mays]

SEQ ID NO: 97718 - DNA, 1067 bp, Arabidopsis thaliana
  misc_feature (1)..(1067): Ceres Seq. ID no. 13496733
  misc_feature: MA Experiment ID: 20000179 Result: Up-regulated in Transcription
  misc_feature: MA Experiment 20000179 PARAMETER Experiment Name: At_Germinating_Seeds_P Parameter: Age (hr) Value: 6 vs. 0
  misc_feature: MA Experiment 20000179 PARAMETER Experiment Name: At_Germinating_Seeds_P Parameter: Tissue Value: Germinating Seeds
  misc_feature: MA Experiment ID: 20000180 Result: Up-regulated in Transcription
  misc_feature: MA Experiment 20000180 PARAMETER Experiment Name: At_Germinating_Seeds_P Parameter: Age (hr) Value: 24 vs. 0
  misc_feature: MA Experiment 20000180 PARAMETER Experiment Name: At_Germinating_Seeds_P Parameter: Tissue Value: Germinating Seeds
  misc_feature: MA Experiment ID: 20000185 Result: Down-regulated in Transcription
  misc_feature: MA Experiment 20000185 PARAMETER Experiment Name: At_Roots__P Parameter: Age (day) Value: 7 vs. 21
  misc_feature: MA Experiment 20000185 PARAMETER Experiment Name: At_Roots__P Parameter: Organism Value: A. thaliana
  misc_feature: MA Experiment 20000185 PARAMETER Experiment Name: At_Roots__P Parameter: Tissue Value: Roots vs. Whole Plant
  misc_feature: MA Experiment ID: 20000269 Result: Down-regulated in Transcription
  misc_feature: MA Experiment 20000269 PARAMETER Experiment Name: At_1mM_KNO3_L-vs-H_Roots_P Parameter: Age (day) Value: 7,10,12
  misc_feature: MA Experiment 20000269 PARAMETER Experiment Name: At_1mM_KNO3_L-vs-H_Roots_P Parameter: Organism Value: A. thaliana
  misc_feature: MA Experiment 20000269 PARAMETER Experiment Name: At_1mM_KNO3_L-vs-H_Roots_P Parameter: Plant Line Value: WS
  misc_feature: MA Experiment 20000269 PARAMETER Experiment Name: At_1mM_KNO3_L-vs-H_Roots_P Parameter: Timepoint (day) Value: 7,10,12
  misc_feature: MA Experiment 20000269 PARAMETER Experiment Name: At_1mM_KNO3_L-vs-H_Roots_P Parameter: Tissue Value: Roots
  misc_feature: MA Experiment 20000269 PARAMETER Experiment Name: At_1mM_KNO3_L-vs-H_Roots_P Parameter: Treatment Value: 1mM KNO3 vs. 50mM KNO3
  misc_feature: MA Experiment ID: 20000439 Result: Down-regulated in Transcription
  misc_feature: MA Experiment 20000439 PARAMETER Experiment Name: At_Roots__P Parameter: Age (day) Value: 14 vs. 21
  misc_feature: MA Experiment 20000439 PARAMETER Experiment Name: At_Roots__P Parameter: Organism Value: A. thaliana
  misc_feature: MA Experiment 20000439 PARAMETER Experiment Name: At_Roots__P Parameter: Tissue Value: Roots vs. Whole Plant
  misc_feature: MA Experiment ID: 20000794 Result: Down-regulated in Transcription
  misc_feature: MA Experiment 20000794 PARAMETER Experiment Name: At_Petals_P Parameter: Age (day) Value: 23-25 days
  misc_feature: MA Experiment 20000794 PARAMETER Experiment Name: At_Petals_P Parameter: Plant Line Value: WS
  misc_feature: MA Experiment 20000794 PARAMETER Experiment Name: At_Petals_P Parameter: Tissue Value: Petals vs. Whole plant
  misc_feature: MA Experiment ID: 20001557 Result: Down-regulated in Transcription
  misc_feature: MA Experiment 20001557 PARAMETER Experiment Name: At_Drought_Soil_Dry_P Parameter: Age (day) Value: 27
  misc_feature: MA Experiment 20001557 PARAMETER Experiment Name: At_Drought_Soil_Dry_P Parameter: Organism Value: A. thaliana
  misc_feature: MA Experiment 20001557 PARAMETER Experiment Name: At_Drought_Soil_Dry_P Parameter: Plant Line Value: WS
  misc_feature: MA Experiment 20001557 PARAMETER Experiment Name: At_Drought_Soil_Dry_P Parameter: Post Timepoint (hr) Value: 3
  misc_feature: MA Experiment 20001557 PARAMETER Experiment Name: At_Drought_Soil_Dry_P Parameter: Post-Treatment Value: Re-Water vs. No Drought
  misc_feature: MA Experiment 20001557 PARAMETER Experiment Name: At_Drought_Soil_Dry_P Parameter: Timepoint (day) Value: 13
  misc_feature: MA Experiment 20001557 PARAMETER Experiment Name: At_Drought_Soil_Dry_P Parameter: Treatment Value: Drought vs. No Drought
  misc_feature: MA Experiment ID: 20001757 Result: Up-regulated in Transcription
  misc_feature: MA Experiment 20001757 PARAMETER Experiment Name: At_50mM_NH4NO3_L-to-H_P Parameter: Timepoint (hr) Value: 6
  misc_feature: MA Experiment 20001757 PARAMETER Experiment Name: At_50mM_NH4NO3_L-to-H_P Parameter: Tissue Value: Leaf
  misc_feature: MA Experiment 20001757 PARAMETER Experiment Name: At_50mM_NH4NO3_L-to-H_P Parameter: Treatment Value: 50mM NH4NO3 vs 100mM Mannitol
  misc_feature: MA Experiment ID: 20001904 Result: Down-regulated in Transcription
  misc_feature: MA Experiment 20001904 PARAMETER Experiment Name: At_Drought_Reproduction_P Parameter: Age (day) Value: 37
  misc_feature: MA Experiment 20001904 PARAMETER Experiment Name: At_Drought_Reproduction_P Parameter: Organism Value: A. thaliana
  misc_feature: MA Experiment 20001904 PARAMETER Experiment Name: At_Drought_Reproduction_P Parameter: Plant Line Value: WS
  misc_feature: MA Experiment 20001904 PARAMETER Experiment Name: At_Drought_Reproduction_P Parameter: Timepoint (day) Value: 7
  misc_feature: MA Experiment 20001904 PARAMETER Experiment Name: At_Drought_Reproduction_P Parameter: Tissue Value: Rosettes
  misc_feature: MA Experiment 20001904 PARAMETER Experiment Name: At_Drought_Reproduction_P Parameter: Treatment Value: Drought vs. No Drought
  misc_feature: MA Experiment ID: 20001906 Result: Down-regulated in Transcription
  misc_feature: MA Experiment 20001906 PARAMETER Experiment Name: At_Drought_Reproduction_P Parameter: Age (day) Value: 35
  misc_feature: MA Experiment 20001906 PARAMETER Experiment Name: At_Drought_Reproduction_P Parameter: Organism Value: A. thaliana
  misc_feature: MA Experiment 20001906 PARAMETER Experiment Name: At_Drought_Reproduction_P Parameter: Plant Line Value: WS
  misc_feature: MA Experiment 20001906 PARAMETER Experiment Name: At_Drought_Reproduction_P Parameter: Timepoint (day) Value: 5
  misc_feature: MA Experiment 20001906 PARAMETER Experiment Name: At_Drought_Reproduction_P Parameter: Tissue Value: Siliques
  misc_feature: MA Experiment 20001906 PARAMETER Experiment Name: At_Drought_Reproduction_P Parameter: Treatment Value: Drought vs. No Drought
tttcataacttaatcacacacaaggagagaagagagaaagagagaaagagagacagagataatggcgtacagtgcgtgtttcctacaccagagcgcattggcttcatcagccgcacgatcatcatcttcctcctcatcccagcgtcacgtgtcgctctccaaacctgttcagatcatctgtaaagctcaacagtctcatgaagacgataactccgccgtctcccgccgtcttgctctcactctcctcgtcggcgccgctgctgttggttccaaagtatctcctgctgatgccgcctacggtgaagctgcaaacgtgtttgggaagccaaagacgaacacagacttcttgccatacaatggagatgggttcaaagtgcaggttccagcaaaatggaacccaagcaaagagattgagtatccaggacaagtccttaggttcgaagacaacttcgatgctactagcaatctcaatgtcatggtcactcctaccgacaagaagtccatcactgattacggttctcccgaagagttcctctctcaggttaattacctcctagggaaacaagcttacttcggtgagactgcctctgagggaggctttgacaacaatgcagtggcaacagcaaacattctggagtcatcatctcaggaagttggtgggaaaccctactattacttgtctgtgttgacaagaacggctgatggagacgaaggtgggaagcatcagctgatcacagcaaccgtgaatggagggaagctttacatctgcaaagcacaagctggagacaagaggtggttcaagggagccaggaaatttgtcgagagcgcagccacttctttcagtgttgcttgagtgaaagcaacacaacgtaacaatgctctgcttgctttcttcatttgtctcttgtaaaaaatggaaaatgaaactgagcttttgagaactatcaagatgatgttaccttttcggcatcacttgtgtacctatgataacagactcgttttccaagttttcttaaaaaacaactatattcaatagatattttctcaaattaataagatattgactc

SEQ ID NO: 97719 - protein, 263 aa, Arabidopsis thaliana; identical to SEQ ID NO: 22602
  peptide (1)..(263): Ceres Seq. ID no. 13496734
  misc_feature (61)..(263): Pfam Name: PsbP Pfam Description: PsbP
  misc_feature (1)..(263): Homolog of NCBI NO: 15222166 NR Description: photosystem II oxygen-evolving complex 23 (OEC23)
  misc_feature (1)..(263): Homolog of NCBI NO: 131391 NR Description: Oxygen-evolving enhancer protein 2, chloroplast (OEE2) (23 kDa subunit of oxygen evolving system of photosystem (OEC 23 kDa subunit) (23 kDa thylakoid membrane protein)
  misc_feature (1)..(263): Homolog of NCBI NO: 11133887 NR Description: OXYGEN-EVOLVING ENHANCER PROTEIN 2-2, CHLOROPLAST (OEE2) (23 KDA SUBUNIT OF OXYGEN EVOLVING SYSTEM OF PHOTOSYSTEM
  misc_feature (13)..(263): Homolog of NCBI NO: 81723 NR Description: photosystem II oxygen-evolving complex protein 2 - white mustard (fragment) >gi|829289|emb|CAA68801.1| 23 kD [Sinapis alba] >gi|226314|prf||1506342A O2 evolving complex 23kD
  misc_feature (1)..(263): Homolog of NCBI NO: 15224572 NR Description: photosystem II oxygen-evolving complex 23 (OEC23)
  misc_feature (1)..(263): Homolog of NCBI NO: 7443216 NR Description: photosystem II oxygen-evolving complex protein 2
  misc_feature (6)..(263): Homolog of NCBI NO: 1345550 NR Description: 23-kDa ploypeptide of photosystem II
  misc_feature (8)..(263): Homolog of NCBI NO: 19898 NR Description: photosystem II 23 kDa polypeptide [Nicotiana
  misc_feature (1)..(263): Homolog of NCBI NO: 417604 NR Description: 23 kDa polypeptide of water-oxidizing complex of
  misc_feature (2)..(263): Homolog of NCBI NO: 266856 NR Description: Oxygen-evolving enhancer protein 2, chloroplast (OEE2) (23 kDa subunit of oxygen evolving system of photosystem (OEC 23 kDa subunit) (23 kDa thylakoid membrane protein)

SEQ ID NO: 97720 - DNA, 1038 bp, Arabidopsis thaliana
  misc_feature (1)..(1038): Ceres Seq. ID no. 13496750
  misc_feature: MA Experiment ID: 108569 Result: Up-regulated in Transcription
  misc_feature: MA Experiment 108569 PARAMETER Experiment Name: At_0.001%_MeJA__cDNA_P Parameter: Timepoint (hr) Value: 6
  misc_feature: MA Experiment 108569 PARAMETER Experiment Name: At_0.001%_MeJA__cDNA_P Parameter: Tissue Value: Aerial
  misc_feature: MA Experiment 108569 PARAMETER Experiment Name: At_0.001%_MeJA__cDNA_P Parameter: Treatment Value: 0.001% MeJA vs. No Treatment
  misc_feature: MA Experiment ID: 108573 Result: Up-regulated in Transcription
  misc_feature: MA Experiment 108573 PARAMETER Experiment Name: At_Drought_cDNA_P Parameter: Timepoint (hr) Value: 6
  misc_feature: MA Experiment 108573 PARAMETER Experiment Name: At_Drought_cDNA_P Parameter: Tissue Value: Aerial
  misc_feature: MA Experiment 108573 PARAMETER Experiment Name: At_Drought_cDNA_P Parameter: Treatment Value: Drought vs. No Drought
  misc_feature: MA Experiment ID: 108595 Result: Down-regulated in Transcription
  misc_feature: MA Experiment 108595 PARAMETER Experiment Name: At_Ler-pi_Ovule_cDNA_P Parameter: Plant Line Value: null
  misc_feature: MA Experiment ID: 20000111 Result: Down-regulated in Transcription
  misc_feature: MA Experiment 20000111 PARAMETER Experiment Name: At_42deg_Heat_cDNA_P Parameter: Temperature (deg C) Value: 42 vs. 22
  misc_feature: MA Experiment 20000111 PARAMETER Experiment Name: At_42deg_Heat_cDNA_P Parameter: Timepoint (hr) Value: 6
  misc_feature: MA Experiment 20000111 PARAMETER Experiment Name: At_42deg_Heat_cDNA_P Parameter: Tissue Value: Aerial
  misc_feature: MA Experiment ID: 20000113 Result: Down-regulated in Transcription
  misc_feature: MA Experiment 20000113 PARAMETER Experiment Name: At_42deg_Heat_cDNA_P Parameter: Temperature (deg C) Value: 42 vs. 22
  misc_feature: MA Experiment 20000113 PARAMETER Experiment Name: At_42deg_Heat_cDNA_P Parameter: Timepoint (hr) Value: 8
  misc_feature: MA Experiment 20000113 PARAMETER Experiment Name: At_42deg_Heat_cDNA_P Parameter: Tissue Value: Aerial
  misc_feature: MA Experiment ID: 20000224 Result: Down-regulated in Transcription
  misc_feature: MA Experiment ID: 20001911 Result: Down-regulated in Transcription
  misc_feature: MA Experiment 20001911 PARAMETER Experiment Name: At_Drought_Reproduction_P Parameter: Age (day) Value: 40
  misc_feature: MA Experiment 20001911 PARAMETER Experiment Name: At_Drought_Reproduction_P Parameter: Organism Value: A. thaliana
  misc_feature: MA Experiment 20001911 PARAMETER Experiment Name: At_Drought_Reproduction_P Parameter: Plant Line Value: WS
  misc_feature: MA Experiment 20001911 PARAMETER Experiment Name: At_Drought_Reproduction_P Parameter: Timepoint (day) Value: 10
  misc_feature: MA Experiment 20001911 PARAMETER Experiment Name: At_Drought_Reproduction_P Parameter: Tissue Value: Flowers
  misc_feature: MA Experiment 20001911 PARAMETER Experiment Name: At_Drought_Reproduction_P Parameter: Treatment Value: Drought vs. No Drought
actgtttgatttctgaggagaatccattgtttccatttgaagaaaactctaactttctcgttgaagctttgagctctctacctctttatctccggagatgtataataacatgggacctcaaccggggatgccaagacctccaggaaaccctgagcctggtccatttggtaatcctttcactggagctggctcgggttttatccgtggtggtttgggagcgtatggggagagaattttaggatcgagctctgagtatgttcagagcaatataagccggtacttctctgatccgcaatactatttccaagtgaatgatcaatatgtgaggaataaactgaaggttgttctgtttcctttcctacaccggggacactggaccagaatatctgaaccagttggtggtaggctctcatacaagcctccaatatatgatatcaatgctccagacttgtacattccctttatggcatttggtacctacgttgttcttgctggtctttcattgggacttaatggaaagtttacaccggaagctttgaattggctgtttgtgaaaggattggttggttggtttttgcaagtaatgctcctgaaagtaacacttctatcacttggtagtggagaggcaccattactagatattgtggcatacggagggtatgcttttgctggtctgtgtcttgcgggctttgccaaaataatgtggggatactcgtactacgcgttgatgccatggacttgtctatgcactgggattttcttggtgaagacgatgaaacgtgttctgtttgctgaagtaagaagttacgattcgagcaaacatcactaccttcttctgtttttagccttggtccagttcccacttttgatatggcttggtaacattagtgttaattggcttctttgaaatgaaaaagacgtttttgtgaattcttattggtatttgtagcgtaatttgaacgttcttggcatttggcaatgtatgtttgttgtctattctattcatttgcatgacgtgaagaaaaagttattttgaac

SEQ ID NO: 97721 - protein, 269 aa, Arabidopsis thaliana; identical to SEQ ID NO: 36555
  peptide (1)..(269): Ceres Seq. ID no. 13496751
  misc_feature (1)..(269): Homolog of NCBI NO: 18397705 NR Description: expressed protein [Arabidopsis thaliana] unknown protein [Arabidopsis thaliana] unknown protein [Arabidopsis thaliana]
  misc_feature (1)..(269): Homolog of NCBI NO: 9755388 NR Description: F17F8.24 [Arabidopsis thaliana]
  misc_feature (1)..(268): Homolog of NCBI NO: 30695009 NR Description: expressed protein [Arabidopsis thaliana]
  misc_feature (11)..(268): Homolog of NCBI NO: 11282553 NR Description: hypothetical protein T16L24.50 - Arabidopsis >gi|6996286|emb|CAB75447.1| putative protein [Arabidopsis
  misc_feature (11)..(268): Homolog of NCBI NO: 33589682 NR Description: At3g59500 [Arabidopsis thaliana]
  misc_feature (1)..(263): Homolog of NCBI NO: 38346458 NR Description: OSJNBa0019G23.6 [Oryza sativa (japonica
  misc_feature (142)..(263): Homolog of NCBI NO: 10241632 NR Description: putative protein [Oryza sativa (indica
  misc_feature (16)..(260): Homolog of NCBI NO: 12861030 NR Description: unnamed protein product [Mus musculus]
  misc_feature (1)..(239): Homolog of NCBI NO: 28277968 NR Description: Similar to Yip1p-interacting factor [Danio rerio]
  misc_feature (1)..(239): Homolog of NCBI NO: 37589677 NR Description: Unknown (protein for MGC:73136) [Danio rerio]

SEQ ID NO: 97722 - protein, 265 aa, Arabidopsis thaliana; identical to SEQ ID NO: 36556
  peptide (1)..(265): Ceres Seq. ID no. 13496752
  misc_feature (1)..(265): Homolog of NCBI NO: 18397705 NR Description: expressed protein [Arabidopsis thaliana] unknown protein [Arabidopsis thaliana] unknown protein [Arabidopsis thaliana]
  misc_feature (1)..(265): Homolog of NCBI NO: 9755388 NR Description: F17F8.24 [Arabidopsis thaliana]
  misc_feature (1)..(264): Homolog of NCBI NO: 30695009 NR Description: expressed protein [Arabidopsis thaliana]
  misc_feature (7)..(264): Homolog of NCBI NO: 11282553 NR Description: hypothetical protein T16L24.50 - Arabidopsis >gi|6996286|emb|CAB75447.1| putative protein [Arabidopsis
  misc_feature (7)..(264): Homolog of NCBI NO: 33589682 NR Description: At3g59500 [Arabidopsis thaliana]
  misc_feature (1)..(259): Homolog of NCBI NO: 38346458 NR Description: OSJNBa0019G23.6 [Oryza sativa (japonica
  misc_feature (138)..(259): Homolog of NCBI NO: 10241632 NR Description: putative protein [Oryza sativa (indica
  misc_feature (12)..(256): Homolog of NCBI NO: 12861030 NR Description: unnamed protein product [Mus musculus]
  misc_feature (1)..(235): Homolog of NCBI NO: 28277968 NR Description: Similar to Yip1p-interacting factor [Danio rerio]
  misc_feature (1)..(235): Homolog of NCBI NO: 37589677 NR Description: Unknown (protein for MGC:73136) [Danio rerio]

SEQ ID NO: 97723 - protein, 259 aa, Arabidopsis thaliana; identical to SEQ ID NO: 36557
  peptide (1)..(259): Ceres Seq. ID no. 13496753
  misc_feature (1)..(259): Homolog of NCBI NO: 18397705 NR Description: expressed protein [Arabidopsis thaliana] unknown protein [Arabidopsis thaliana] unknown protein [Arabidopsis thaliana]
  misc_feature (1)..(259): Homolog of NCBI NO: 9755388 NR Description: F17F8.24 [Arabidopsis thaliana]
  misc_feature (1)..(258): Homolog of NCBI NO: 30695009 NR Description: expressed protein [Arabidopsis thaliana]
  misc_feature (1)..(258): Homolog of NCBI NO: 11282553 NR Description: hypothetical protein T16L24.50 - Arabidopsis >gi|6996286|emb|CAB75447.1| putative protein [Arabidopsis
  misc_feature (1)..(258): Homolog of NCBI NO: 33589682 NR Description: At3g59500 [Arabidopsis thaliana]
  misc_feature (1)..(253): Homolog of NCBI NO: 38346458 NR Description: OSJNBa0019G23.6 [Oryza sativa (japonica
  misc_feature (132)..(253): Homolog of NCBI NO: 10241632 NR Description: putative protein [Oryza sativa (indica
  misc_feature (6)..(250): Homolog of NCBI NO: 12861030 NR Description: unnamed protein product [Mus musculus]
  misc_feature (1)..(229): Homolog of NCBI NO: 28277968 NR Description: Similar to Yip1p-interacting factor [Danio rerio]
  misc_feature (1)..(229): Homolog of NCBI NO: 37589677 NR Description: Unknown (protein for MGC:73136) [Danio rerio]

SEQ ID NO: 97724 - DNA, 880 bp, Arabidopsis thaliana
  misc_feature (1)..(880): Ceres Seq. ID no. 13499590
  misc_feature: MA Experiment ID: 108488 Result: Down-regulated in Transcription
  misc_feature: MA Experiment ID: 20000224 Result: Down-regulated in Transcription
  misc_feature: MA Experiment ID: 20000437 Result: Up-regulated in Transcription
  misc_feature: MA Experiment 20000437 PARAMETER Experiment Name: At_Drought_P Parameter: Age (day) Value: 8
  misc_feature: MA Experiment 20000437 PARAMETER Experiment Name: At_Drought_P Parameter: Organism Value: A. thaliana
  misc_feature: MA Experiment 20000437 PARAMETER Experiment Name: At_Drought_P Parameter: Plant Line Value: WS
  misc_feature: MA Experiment 20000437 PARAMETER Experiment Name: At_Drought_P Parameter: Timepoint (hr) Value: 24
  misc_feature: MA Experiment 20000437 PARAMETER Experiment Name: At_Drought_P Parameter: Tissue Value: Whole Plant
  misc_feature: MA Experiment 20000437 PARAMETER Experiment Name: At_Drought_P Parameter: Treatment Value: Drought vs. No Drought
  misc_feature: MA Experiment ID: 20001905 Result: Up-regulated in Transcription
  misc_feature: MA Experiment 20001905 PARAMETER Experiment Name: At_Drought_Reproduction_P Parameter: Age (day) Value: 40
  misc_feature: MA Experiment 20001905 PARAMETER Experiment Name: At_Drought_Reproduction_P Parameter: Organism Value: A. thaliana
  misc_feature: MA Experiment 20001905 PARAMETER Experiment Name: At_Drought_Reproduction_P Parameter: Plant Line Value: WS
  misc_feature: MA Experiment 20001905 PARAMETER Experiment Name: At_Drought_Reproduction_P Parameter: Timepoint (day) Value: 10
  misc_feature: MA Experiment 20001905 PARAMETER Experiment Name: At_Drought_Reproduction_P Parameter: Tissue Value: Rosettes
  misc_feature: MA Experiment 20001905 PARAMETER Experiment Name: At_Drought_Reproduction_P Parameter: Treatment Value: Drought vs. No Drought
acgagttttctcttcggctttccactttttcctctgttcgtgtcattcttctcgtagatctcgagagagagccttaaggaaattaaaaaaggttggattttgatcgatgggttcttcgtcaggacaacccgaatttgattacttgtttaaggttttattgatcggagattctggtgttggaaagagctctcttttgttgagtttcacatctaatacctttgatgatctttctccaacgattggtgtggattttaaggttaagtatctgacaattggagaaaagaaactcaagcttgcgatttgggatacagctgggcaagagagatttaggacgctaacaagttcgtattacagaggagctcagggtataattatggtatatgatgtgacacgaagagacacgttcacaaacctatcagacatatgggctaaggaaatcgacctctattcgactaatcaggattgcattaagatgcttgtcgggaataaagttgataaggagagtgaaagagctgtttctaaaaaagaaggcatagactttgctcgggagtacggatgtttgtttctggagtgtagtgcaaagactcgagtcaacgttgagcaatgttttgaagagcttgttcttaagatattggaaacgccgagtcttactgctgaaggttcgtctggcggaaagaagaacatcttcaaacaaaaccccgcacagaccaccagtacctcgtcgagctactgctgctcgtcttagacatggttttacagtttatgacaaattacactcttgctcatcatcttgttcttgattgtctctttgttttcctaaaccgcagcatcttggatgtaaatctcaaccctgatttgaaagttgtgttcactagtttcg

SEQ ID NO: 97725 - protein, 212 aa, Arabidopsis thaliana [sequence omitted]

SEQ ID NO: 97726 - protein, 123 aa, Arabidopsis thaliana; identical to SEQ ID NO: 26494
  peptide (1)..(123): Ceres Seq. ID no. 13499592
  misc_feature (1)..(88): Pfam Name: Ras family Pfam Description: Ras family
  misc_feature (1)..(123): Homolog of NCBI NO: 15218575 NR Description: GTP-binding protein, putative [Arabidopsis
  misc_feature (1)..(123): Homolog of NCBI NO: 25294118 NR Description: protein F9C16.3 [imported] - Arabidopsis thaliana
  misc_feature (1)..(121): Homolog of NCBI NO: 1370174 NR Description: RAB1Y [Lotus japonicus]
  misc_feature (1)..(122): Homolog of NCBI NO: 18414255 NR Description: Ras family GTP-binding protein [Arabidopsis
  misc_feature (1)..(122): Homolog of NCBI NO: 1370172 NR Description: RAB1X [Lotus japonicus]
  misc_feature (1)..(102): Homolog of NCBI NO: 15232785 NR Description: GTP-binding protein, putative [Arabidopsis
  misc_feature (1)..(121): Homolog of NCBI NO: 15451614 NR Description: Putative GTP-binding protein [Oryza sativa]
  misc_feature (1)..(121): Homolog of NCBI NO: 37534998 NR Description: putative GTP-binding protein [Oryza sativa
  misc_feature (1)..(102): Homolog of NCBI NO: 549810 NR Description: GTP-BINDING PROTEIN YPTV3 >gi|486945|pir||S36366
  misc_feature (1)..(120): Homolog of NCBI NO: 33416686 NR Description: Unknown (protein for MGC:69017) [Xenopus laevis]

SEQ ID NO: 97727 - DNA, 1365 bp, Arabidopsis thaliana
  misc_feature (1)..(1365): Ceres Seq. ID no. 13503905
  misc_feature: MA Experiment ID: 20000166 Result: Up-regulated in Transcription
  misc_feature: MA Experiment 20000166 PARAMETER Experiment Name: At_100uM_ABA_P Parameter: Age (day) Value: 14
  misc_feature: MA Experiment 20000166 PARAMETER Experiment Name: At_100uM_ABA_P Parameter: Organism Value: A. thaliana
  misc_feature: MA Experiment 20000166 PARAMETER Experiment Name: At_100uM_ABA_P Parameter: Plant Line Value: WS
  misc_feature: MA Experiment 20000166 PARAMETER Experiment Name: At_100uM_ABA_P Parameter: Timepoint (hr) Value: 1
  misc_feature: MA Experiment 20000166 PARAMETER Experiment Name: At_100uM_ABA_P Parameter: Tissue Value: Aerial
  misc_feature: MA Experiment 20000166 PARAMETER Experiment Name: At_100uM_ABA_P Parameter: Treatment Value: 100uM ABA vs. No Treatment
  misc_feature: MA Experiment ID: 20000169 Result: Up-regulated in Transcription
  misc_feature: MA Experiment 20000169 PARAMETER Experiment Name: At_100uM_ABA_P Parameter: Age (day) Value: 14
  misc_feature: MA Experiment 20000169 PARAMETER Experiment Name: At_100uM_ABA_P Parameter: Organism Value: A. thaliana
  misc_feature: MA Experiment 20000169 PARAMETER Experiment Name: At_100uM_ABA_P Parameter: Plant Line Value: WS
  misc_feature: MA Experiment 20000169 PARAMETER Experiment Name: At_100uM_ABA_P Parameter: Timepoint (hr) Value: 6
  misc_feature: MA Experiment 20000169 PARAMETER Experiment Name: At_100uM_ABA_P Parameter: Tissue Value: Aerial
  misc_feature: MA Experiment 20000169 PARAMETER Experiment Name: At_100uM_ABA_P Parameter: Treatment Value: 100uM ABA vs. No Treatment
  misc_feature: MA Experiment ID: 20000182 Result: Up-regulated in Transcription
  misc_feature: MA Experiment 20000182 PARAMETER Experiment Name: At_2mM_SA_P Parameter: Age (day) Value: 14
  misc_feature: MA Experiment 20000182 PARAMETER Experiment Name: At_2mM_SA_P Parameter: Organism Value: A. thaliana
  misc_feature: MA Experiment 20000182 PARAMETER Experiment Name: At_2mM_SA_P Parameter: Plant Line Value: WS
  misc_feature: MA Experiment 20000182 PARAMETER Experiment Name: At_2mM_SA_P Parameter: Timepoint (hr) Value: 6
  misc_feature: MA Experiment 20000182 PARAMETER Experiment Name: At_2mM_SA_P Parameter: Tissue Value: Aerial
  misc_feature: MA Experiment 20000182 PARAMETER Experiment Name: At_2mM_SA_P Parameter: Treatment Value: 2mM SA vs. No Treatment
  misc_feature: MA Experiment ID: 20000184 Result: Down-regulated in Transcription
  misc_feature: MA Experiment 20000184 PARAMETER Experiment Name: At_Shoots__P Parameter: Age (day) Value: 7
  misc_feature: MA Experiment 20000184 PARAMETER Experiment Name: At_Shoots__P Parameter: Tissue Value: Shoots vs. Whole Plant
  misc_feature: MA Experiment ID: 20000213 Result: Up-regulated in Transcription
  misc_feature: MA Experiment 20000213 PARAMETER Experiment Name: At_4deg_Cold_P Parameter: Timepoint (hr) Value: 2
  misc_feature: MA Experiment ID: 20000234 Result: Down-regulated in Transcription
  misc_feature: MA Experiment 20000234 PARAMETER Experiment Name: At_Siliques_P Parameter: Age (day) Value: 21
  misc_feature: MA Experiment 20000234 PARAMETER Experiment Name: At_Siliques_P Parameter: Organism Value: A. thaliana
  misc_feature: MA Experiment 20000234 PARAMETER Experiment Name: At_Siliques_P Parameter: Plant Line Value: WS
  misc_feature: MA Experiment 20000234 PARAMETER Experiment Name: At_Siliques_P Parameter: Tissue Value: Less Than 5mm Siliques vs. Whole Plant
  misc_feature: MA Experiment ID: 20000235 Result: Down-regulated in Transcription
  misc_feature: MA Experiment 20000235 PARAMETER Experiment Name: At_Siliques_P Parameter: Age (day) Value: 21
  misc_feature: MA Experiment 20000235 PARAMETER Experiment Name: At_Siliques_P Parameter: Organism Value: A. thaliana
  misc_feature: MA Experiment 20000235 PARAMETER Experiment Name: At_Siliques_P Parameter: Plant Line Value: WS
  misc_feature: MA Experiment 20000235 PARAMETER Experiment Name: At_Siliques_P Parameter: Tissue Value: 5-10mm Siliques vs. Whole Plant
  misc_feature: MA Experiment ID: 20000286 Result: Down-regulated in Transcription
  misc_feature: MA Experiment 20000286 PARAMETER Experiment Name: At_Open_Flower_P Parameter: Age (day) Value: 21
  misc_feature: MA Experiment 20000286 PARAMETER Experiment Name: At_Open_Flower_P Parameter: Plant Line Value: WS
  misc_feature: MA Experiment 20000286 PARAMETER Experiment Name: At_Open_Flower_P Parameter: Tissue Value: Half Open vs. Whole Plant
  misc_feature: MA Experiment ID: 20000437 Result: Up-regulated in Transcription
  misc_feature: MA Experiment 20000437 PARAMETER Experiment Name: At_Drought_P Parameter: Age (day) Value: 8
  misc_feature: MA Experiment 20000437 PARAMETER Experiment Name: At_Drought_P Parameter: Organism Value: A. thaliana
  misc_feature: MA Experiment 20000437 PARAMETER Experiment Name: At_Drought_P Parameter: Plant Line Value: WS
  misc_feature: MA Experiment 20000437 PARAMETER Experiment Name: At_Drought_P Parameter: Timepoint (hr) Value: 24
  misc_feature: MA Experiment 20000437 PARAMETER Experiment Name: At_Drought_P Parameter: Tissue Value: Whole Plant
  misc_feature: MA Experiment 20000437 PARAMETER Experiment Name: At_Drought_P Parameter: Treatment Value: Drought vs. No Drought
  misc_feature: MA Experiment ID: 20000495 Result: Down-regulated in Transcription
  misc_feature: MA Experiment 20000495 PARAMETER Experiment Name: At_Guard_Cells_P Parameter: Harvest Date Value: 8/2/2002
  misc_feature: MA Experiment 20000495 PARAMETER Experiment Name: At_Guard_Cells_P Parameter: Organism Value: A. thaliana
  misc_feature: MA Experiment 20000495 PARAMETER Experiment Name: At_Guard_Cells_P Parameter: Tissue Value: Guard Cells vs. Leaves
  misc_feature: MA Experiment ID: 20001247 Result: Up-regulated in Transcription
  misc_feature: MA Experiment 20001247 PARAMETER Experiment Name: At_Far-red-induction_P Parameter: Age (day) Value: 7
  misc_feature: MA Experiment 20001247 PARAMETER Experiment Name: At_Far-red-induction_P Parameter: Light Value: Far-red vs. White
  misc_feature: MA Experiment 20001247 PARAMETER Experiment Name: At_Far-red-induction_P Parameter: Organism Value: A. thaliana
  misc_feature: MA Experiment 20001247 PARAMETER Experiment Name: At_Far-red-induction_P Parameter: Plant Line Value: Columbia
  misc_feature: MA Experiment 20001247 PARAMETER Experiment Name: At_Far-red-induction_P Parameter: Timepoint (hr) Value: 1
  misc_feature: MA Experiment 20001247 PARAMETER Experiment Name: At_Far-red-induction_P Parameter: Tissue Value: Whole Plant
  misc_feature: MA Experiment ID: 20001560 Result: Down-regulated in Transcription
  misc_feature: MA Experiment 20001560 PARAMETER Experiment Name: At_Drought_Soil_Dry_P Parameter: Age (day) Value: 28
  misc_feature: MA Experiment 20001560 PARAMETER Experiment Name: At_Drought_Soil_Dry_P Parameter: Organism Value: A. thaliana
  misc_feature: MA Experiment 20001560 PARAMETER Experiment Name: At_Drought_Soil_Dry_P Parameter: Plant Line Value: WS
  misc_feature: MA Experiment 20001560 PARAMETER Experiment Name: At_Drought_Soil_Dry_P Parameter: Post Timepoint (hr) Value: None
  misc_feature: MA Experiment 20001560 PARAMETER Experiment Name: At_Drought_Soil_Dry_P Parameter: Post-Treatment Value: None
  misc_feature: MA Experiment 20001560 PARAMETER Experiment Name: At_Drought_Soil_Dry_P Parameter: Timepoint (day) Value: 14
  misc_feature: MA Experiment 20001560 PARAMETER Experiment Name: At_Drought_Soil_Dry_P Parameter: Treatment Value: Drought vs. No Drought
  misc_feature: MA Experiment ID: 20001904 Result: Up-regulated in Transcription
  misc_feature: MA Experiment 20001904 PARAMETER Experiment Name: At_Drought_Reproduction_P Parameter: Age (day) Value: 37
  misc_feature: MA Experiment 20001904 PARAMETER Experiment Name: At_Drought_Reproduction_P Parameter: Organism Value: A. thaliana
  misc_feature: MA Experiment 20001904 PARAMETER Experiment Name: At_Drought_Reproduction_P Parameter: Plant Line Value: WS
  misc_feature: MA Experiment 20001904 PARAMETER Experiment Name: At_Drought_Reproduction_P Parameter: Timepoint (day) Value: 7
  misc_feature: MA Experiment 20001904 PARAMETER Experiment Name: At_Drought_Reproduction_P Parameter: Tissue Value: Rosettes
  misc_feature: MA Experiment 20001904 PARAMETER Experiment Name: At_Drought_Reproduction_P Parameter: Treatment Value: Drought vs. No Drought
  misc_feature: MA Experiment ID: 20001905 Result: Up-regulated in Transcription
  misc_feature: MA Experiment 20001905 PARAMETER Experiment Name: At_Drought_Reproduction_P Parameter: Age (day) Value: 40
  misc_feature: MA Experiment 20001905 PARAMETER Experiment Name: At_Drought_Reproduction_P Parameter: Organism Value: A. thaliana
  misc_feature: MA Experiment 20001905 PARAMETER Experiment Name: At_Drought_Reproduction_P Parameter: Plant Line Value: WS
  misc_feature: MA Experiment 20001905 PARAMETER Experiment Name: At_Drought_Reproduction_P Parameter: Timepoint (day) Value: 10
  misc_feature: MA Experiment 20001905 PARAMETER Experiment Name: At_Drought_Reproduction_P Parameter: Tissue Value: Rosettes
  misc_feature: MA Experiment 20001905 PARAMETER Experiment Name: At_Drought_Reproduction_P Parameter: Treatment Value: Drought vs. No Drought
acatactttcttctctctatttctcattctctcttcttcatcatattactcattttatagaacagcaaaaccctagatttcctgttcaagctcaagaccgtacaaaactttggaactcatatataaagatctcgagaatagcattatgaatatcgtctcttggaaagatgcaaacgacgaagttgcaggcggcgctacgacaagacgtgaaagagaagtaaaagaggatcaagaagaaaccgaagtcagagccaccagtggcaaaaccgtaattaaaaagcagcctacatcgatctcttcttcttcttcttcgtggatgaaatccaaggatccgaggattgttagggtttcacgcgcctttggaggcaaagaccgtcacagcaaagtgtgtacgttacgtggactacgtgacagacgcgtgagattatcagtcccaacggctattcagctctacgatcttcaagaacggctcggtgttgaccagcctagcaaagccgttgactggttgcttgatgcagctaaagaggagatcgacgagctacctccgttacctatctcgccggaaaatttcagcatcttcaaccatcatcagtccttcttgaatcttggtcaacggcccggtcaagatccgacccaactcgggtttaaaatcaatggatgtgtacaaaagtctactactactagccgcgaagaaaacgatagagagaaaggagaaaacgatgtcgtttacacaaacaatcatcatgttgggtcttatggaacttatcacaacctggaacatcatcatcatcatcaccaacatttgagtttacaggcagattatcatagtcatcaactacatagtcttgtcccatttccatcacaaattttggtatgtccaatgacgacatcaccaacaactacaactatacaatctttgtttccatcatcatcgtcagctggttcagggactatggagacattagatccgaggcaaatggtaagccattttcaaatgccattaatgggtaattcttcatcttcgtcttcccaaaacatttcgacattatattcgttgttacatggtagtagtagcaacaatggtggtagagacattgataatcggatgtcgtcggtccaattcaaccgaactaatagcactacaacggctaacatgtcgaggcatctaggctcggagcgttgtacaagtagaggaagtgatcaccatatgtgaagttagattattgaaacgatataattgttgtttgatgtgttcagaaataaggggacacaaaacaaaatataaggtaattactattgtactatgttttgctgatatattttttaatagacaaattaatgttataaattgatttattaatttac

SEQ ID NO: 97728 - protein, 355 aa, Arabidopsis thaliana
  peptide (1)..(355): Ceres Seq. ID no. 13503906
  misc_feature (58)..(293): Pfam Name: TCP family transcription factor Pfam Description: TCP family transcription factor
  misc_feature (1)..(355): Homolog of NCBI NO: 30678498 NR Description: TCP family transcription factor TFPD [Arabidopsis >gi|6041802|gb|AAF02122.1|AC009755_15 unknown protein thaliana] >gi|6513919|gb|AAF14823.1|AC011664_5 unknown protein
  misc_feature (1)..(278): Homolog of NCBI NO: 18396089 NR Description: TCP family transcription factor TFPD [Arabidopsis
  misc_feature (16)..(185): Homolog of NCBI NO: 15239489 NR Description: TCP family transcription factor, putative thaliana] >gi|10177320|dbj|BAB10646.1| gene_id:MSL3.11~unknown
  misc_feature (43)..(148): Homolog of NCBI NO: 34909780 NR Description: P0512C01.32 [Oryza sativa (japonica
  misc_feature (43)..(271): Homolog of NCBI NO: 15241512 NR Description: TCP family transcription factor, putative
  misc_feature (56)..(150): Homolog of NCBI NO: 18397402 NR Description: TCP family transcription factor, putative thaliana] >gi|30691609|ref|NP_849730.1| TCP family transcription putative [Arabidopsis thaliana] >gi|25369273|pir||C86426
  misc_feature (50)..(135): Homolog of NCBI NO: 7486304 NR Description: hypothetical protein F28J12.50 - Arabidopsis
  misc_feature (50)..(135): Homolog of NCBI NO: 18415079 NR Description: TCP family transcription factor, putative thaliana] >gi|14194129|gb|AAK56259.1|AF367270_1 [Arabidopsis thaliana] >gi|14194171|gb|AAK56280.1|AF367292_1
  misc_feature (64)..(135): Homolog of NCBI NO: 25369264 NR Description: probable basic helix-loop-helix DNA binding
  misc_feature (70)..(187): Homolog of NCBI NO: 20975255 NR Description: transcription factor PCF6 [Oryza sativa (japonica
MNIVSWKDANDEVAGGATTRREREVKEDQEETEVRATSGKTVIKKQPTSISSSSSSWMKSKDPRIVRVSRAFGGKDRHSKVCTLRGLRDRRVRLSVPTAIQLYDLQERLGVDQPSKAVDWLLDAAKEEIDELPPLPISPENFSIFNHHQSFLNLGQRPGQDPTQLGFKINGCVQKSTTTSREENDREKGENDVVYTNNHHVGSYGTYHNLEHHHHHHQHLSLQADYHSHQLHSLVPFPSQILVCPMTTSPTTTTIQSLFPSSSSAGSGTMETLDPRQMVSHFQMPLMGNSSSSSSQNISTLYSLLHGSSSNNGGRDIDNRMSSVQFNRTNSTTTANMSRHLGSERCTSRGSDHHM

SEQ ID NO: 97729 - protein, 298 aa, Arabidopsis thaliana
  peptide (1)..(298): Ceres Seq. ID no. 13503907
  misc_feature (1)..(236): Pfam Name: TCP family transcription factor Pfam Description: TCP family transcription factor
  misc_feature (1)..(298): Homolog of NCBI NO: 30678498 NR Description: TCP family transcription factor TFPD [Arabidopsis >gi|6041802|gb|AAF02122.1|AC009755_15 unknown protein thaliana] >gi|6513919|gb|AAF14823.1|AC011664_5 unknown protein
  misc_feature (1)..(221): Homolog of NCBI NO: 18396089 NR Description: TCP family transcription factor TFPD [Arabidopsis
  misc_feature (1)..(128): Homolog of NCBI NO: 15239489 NR Description: TCP family transcription factor, putative thaliana] >gi|10177320|dbj|BAB10646.1| gene_id:MSL3.11~unknown
  misc_feature (1)..(91): Homolog of NCBI NO: 34909780 NR Description: P0512C01.32 [Oryza sativa (japonica
  misc_feature (1)..(214): Homolog of NCBI NO: 15241512 NR Description: TCP family transcription factor, putative
  misc_feature (1)..(93): Homolog of NCBI NO: 18397402 NR Description: TCP family transcription factor, putative thaliana] >gi|30691609|ref|NP_849730.1| TCP family transcription putative [Arabidopsis thaliana] >gi|25369273|pir||C86426
  misc_feature (1)..(78): Homolog of NCBI NO: 7486304 NR Description: hypothetical protein F28J12.50 - Arabidopsis
  misc_feature (1)..(78): Homolog of NCBI NO: 18415079 NR Description: TCP family transcription factor, putative thaliana] >gi|14194129|gb|AAK56259.1|AF367270_1 [Arabidopsis thaliana] >gi|14194171|gb|AAK56280.1|AF367292_1
  misc_feature (7)..(78): Homolog of NCBI NO: 25369264 NR Description: probable basic helix-loop-helix DNA binding
  misc_feature (13)..(130): Homolog of NCBI NO: 20975255 NR Description: transcription factor PCF6 [Oryza sativa (japonica
MKSKDPRIVRVSRAFGGKDRHSKVCTLRGLRDRRVRLSVPTAIQLYDLQERLGVDQPSKAVDWLLDAAKEEIDELPPLPISPENFSIFNHHQSFLNLGQRPGQDPTQLGFKINGCVQKSTTTSREENDREKGENDVVYTNNHHVGSYGTYHNLEHHHHHHQHLSLQADYHSHQLHSLVPFPSQILVCPMTTSPTTTTIQSLFPSSSSAGSGTMETLDPRQMVSHFQMPLMGNSSSSSSQNISTLYSLLHGSSSNNGGRDIDNRMSSVQFNRTNSTTTANMSRHLGSERCTSRGSDHHM

SEQ ID NO: 97730 - DNA, 1173 bp, Arabidopsis thaliana
  misc_feature (1)..(1173): Ceres Seq. ID no. 13504705
  misc_feature: MA Experiment ID: 20000171 Result: Down-regulated in Transcription
  misc_feature: MA Experiment 20000171 PARAMETER Experiment Name: At_42deg_Heat_P Parameter: Age (day) Value: 14
  misc_feature: MA Experiment 20000171 PARAMETER Experiment Name: At_42deg_Heat_P Parameter: Organism Value: A. thaliana
  misc_feature: MA Experiment 20000171 PARAMETER Experiment Name: At_42deg_Heat_P Parameter: Plant Line Value: WS
  misc_feature: MA Experiment 20000171 PARAMETER Experiment Name: At_42deg_Heat_P Parameter: Temperature (deg C) Value: 42 vs. 22
  misc_feature: MA Experiment 20000171 PARAMETER Experiment Name: At_42deg_Heat_P Parameter: Timepoint (hr) Value: 1
  misc_feature: MA Experiment 20000171 PARAMETER Experiment Name: At_42deg_Heat_P Parameter: Tissue Value: Aerial
  misc_feature: MA Experiment ID: 20000173 Result: Down-regulated in Transcription
  misc_feature: MA Experiment 20000173 PARAMETER Experiment Name: At_42deg_Heat_P Parameter: Age (day) Value: 14
  misc_feature: MA Experiment 20000173 PARAMETER Experiment Name: At_42deg_Heat_P Parameter: Organism Value: A. thaliana
  misc_feature: MA Experiment 20000173 PARAMETER Experiment Name: At_42deg_Heat_P Parameter: Plant Line Value: WS
  misc_feature: MA Experiment 20000173 PARAMETER Experiment Name: At_42deg_Heat_P Parameter: Temperature (deg C) Value: 42 vs. 22
  misc_feature: MA Experiment 20000173 PARAMETER Experiment Name: At_42deg_Heat_P Parameter: Timepoint (hr) Value: 6
  misc_feature: MA Experiment 20000173 PARAMETER Experiment Name: At_42deg_Heat_P Parameter: Tissue Value: Aerial
  misc_feature: MA Experiment ID: 20000184 Result: Down-regulated in Transcription
  misc_feature: MA Experiment 20000184 PARAMETER Experiment Name: At_Shoots__P Parameter: Age (day) Value: 7
  misc_feature: MA Experiment 20000184 PARAMETER Experiment Name: At_Shoots__P Parameter: Tissue Value: Shoots vs. Whole Plant
  misc_feature: MA Experiment ID: 20001554 Result: Up-regulated in Transcription
  misc_feature: MA Experiment 20001554 PARAMETER Experiment Name: At_Drought_Soil_Dry_P Parameter: Age (day) Value: 21
  misc_feature: MA Experiment 20001554 PARAMETER Experiment Name: At_Drought_Soil_Dry_P Parameter: Organism Value: A. thaliana
  misc_feature: MA Experiment 20001554 PARAMETER Experiment Name: At_Drought_Soil_Dry_P Parameter: Plant Line Value: WS
  misc_feature: MA Experiment 20001554 PARAMETER Experiment Name: At_Drought_Soil_Dry_P Parameter: Post Timepoint (hr) Value: None
  misc_feature: MA Experiment 20001554 PARAMETER Experiment Name: At_Drought_Soil_Dry_P Parameter: Post-Treatment Value: None
  misc_feature: MA Experiment 20001554 PARAMETER Experiment Name: At_Drought_Soil_Dry_P Parameter: Timepoint (day) Value: 7
  misc_feature: MA Experiment 20001554 PARAMETER Experiment Name: At_Drought_Soil_Dry_P Parameter: Treatment Value: Drought vs. No Drought
  misc_feature: MA Experiment ID: 20001560 Result: Down-regulated in Transcription
  misc_feature: MA Experiment 20001560 PARAMETER Experiment Name: At_Drought_Soil_Dry_P Parameter: Age (day) Value: 28
  misc_feature: MA Experiment 20001560 PARAMETER Experiment Name: At_Drought_Soil_Dry_P Parameter: Organism Value: A. thaliana
  misc_feature: MA Experiment 20001560 PARAMETER Experiment Name: At_Drought_Soil_Dry_P Parameter: Plant Line Value: WS
  misc_feature: MA Experiment 20001560 PARAMETER Experiment Name: At_Drought_Soil_Dry_P Parameter: Post Timepoint (hr) Value: None
  misc_feature: MA Experiment 20001560 PARAMETER Experiment Name: At_Drought_Soil_Dry_P Parameter: Post-Treatment Value: None
  misc_feature: MA Experiment 20001560 PARAMETER Experiment Name: At_Drought_Soil_Dry_P Parameter: Timepoint (day) Value: 14
  misc_feature: MA Experiment 20001560 PARAMETER Experiment Name: At_Drought_Soil_Dry_P Parameter: Treatment Value: Drought vs. No Drought
atgaagggggatcaagaagtacaagtcattgttcagcagggaaaagaaccaattccaacagatcaagacgaaagaagttcggtcagtggcagccaaacaaaactatctcactctaatacatacaaacggtggctccgggttgctatctatacattctttgtcatttcaggccaatcagttgctacaattctgggcagactatactatgaaaatggaggaaacagcaaatggctagcaacggtagttcagcttgtaggctttcctattctacttccatatcatctcttgtcagtcaaaacacatacaacaactcagagagatggcaaattaacctcacttaggaaccgtgcattagtttacatagtgcttggacttcttgtaggagcagcttgctacctatattccattggactgctttacctacctgtttctaccctttccctgatctgtgcatcacagttagccttcaccgctttcttctcttatttactcaactcacaaaaacttactcctatcattttgaattctcttttcctcctcactatatcttccaccctccttgcatttaataacgaggaatcagattccaaaaaagttacaaaaggagagtatgtcaaaggtttcgtatgcaccgttggtgcatctgctgggtttggtctactcttatccctacaacagctagcctttcgtaaagttttaaagaagcaaactttctcagaagttataaatatgataatctacatgagtctagtggccagttgtgttagcgtggtggggctttttgctagtagcgagtggaaaactttgagcagtgaaatggaaaactacaaacttgggaaggtatcctatgtcatgaacctagtgtggacagctgttacctggcaggtattctccatcggttgcacaggactgatcttcgagctttcctccctattctcaaatgcaataagcgctttgggactccccgtggttcctatcctggctgtcatcattttccatgacaaaatgaacggcttaaaggtgatttctatgattctagctatttggggtttcgtatcctatgtctaccaacaatatcttgatgaaacaaacttgaagaaaagtaatgaaataccaacaacagaatcccctgaccgaccagaagcagaagggtcaagtgagcaatcaaaataa

SEQ ID NO: 97731 - protein, 390 aa, Arabidopsis thaliana
  peptide (1)..(390): Ceres Seq. ID no. 15222821
  misc_feature (190)..(372): Pfam Name: Domain of unknown function, DUF250 Pfam Description: Domain of unknown function, DUF250
  misc_feature (1)..(390): Homolog of NCBI NO: 30684325 NR Description: purine permease family [Arabidopsis thaliana]
  misc_feature (55)..(390): Homolog of NCBI NO: 15236799 NR Description: purine permease family [Arabidopsis thaliana]
  misc_feature (67)..(390): Homolog of NCBI NO: 7487849 NR Description: hypothetical protein T9A21.60 - Arabidopsis >gi|2832695|emb|CAA16793.1| putative protein [Arabidopsis >gi|7268614|emb|CAB78823.1| putative protein [Arabidopsis
  misc_feature (6)..(375): Homolog of NCBI NO: 15236796 NR Description: purine permease family [Arabidopsis thaliana]
  misc_feature (21)..(375): Homolog of NCBI NO: 18491221 NR Description: unknown protein [Arabidopsis thaliana]
  misc_feature (20)..(384): Homolog of NCBI NO: 15236796 NR Description: purine permease family [Arabidopsis thaliana]
  misc_feature (15)..(370): Homolog of NCBI NO: 15219436 NR Description: purine permease family [Arabidopsis thaliana]
  misc_feature (17)..(390): Homolog of NCBI NO: 38605752 NR Description: OSJNBb0016D16.5 [Oryza sativa (japonica
  misc_feature (17)..(369): Homolog of NCBI NO: 38344290 NR Description: OSJNBa0013K16.22 [Oryza sativa (japonica
  misc_feature (38)..(378): Homolog of NCBI NO: 15236794 NR Description: purine permease family [Arabidopsis thaliana]
MKGDQEVQVIVQQGKEPIPTDQDERSSVSGSQTKLSHSNTYKRWLRVAIYTFFVISGQSVATILGRLYYENGGNSKWLATVVQLVGFPILLPYHLLSVKTHTTTQRDGKLTSLRNRALVYIVLGLLVGAACYLYSIGLLYLPVSTLSLICASQLAFTAFFSYLLNSQKLTPIILNSLFLLTISSTLLAFNNEESDSKKVTKGEYVKGFVCTVGASAGFGLLLSLQQLAFRKVLKKQTFSEVINMIIYMSLVASCVSVVGLFASSEWKTLSSEMENYKLGKVSYVMNLVWTAVTWQVFSIGCTGLIFELSSLFSNAISALGLPVVPILAVIIFHDKMNGLKVISMILAIWGFVSYVYQQYLDETNLKKSNEIPTTESPDRPEAEGSSEQSK

SEQ ID NO: 97732 - DNA, 2550 bp, Arabidopsis thaliana
  misc_feature (1)..(2550): Ceres Seq. ID no. 13504808
  misc_feature: MA Experiment ID: 108461 Result: Down-regulated in Transcription
  misc_feature: MA Experiment 108461 PARAMETER Experiment Name: At_Germinating_Seeds_cDNA_P Parameter: Age (day) Value: 1 vs. 0
  misc_feature: MA Experiment 108461 PARAMETER Experiment Name: At_Germinating_Seeds_cDNA_P Parameter: Tissue Value: Germinating Seeds
  misc_feature: MA Experiment ID: 108462 Result: Down-regulated in Transcription
  misc_feature: MA Experiment 108462 PARAMETER Experiment Name: At_Germinating_Seeds_cDNA_P Parameter: Age (day) Value: 2 vs. 0
  misc_feature: MA Experiment 108462 PARAMETER Experiment Name: At_Germinating_Seeds_cDNA_P Parameter: Tissue Value: Germinating Seeds
  misc_feature: MA Experiment ID: 108464 Result: Down-regulated in Transcription
  misc_feature: MA Experiment 108464 PARAMETER Experiment Name: At_Germinating_Seeds_cDNA_P Parameter: Age (day) Value: 4 vs. 0
  misc_feature: MA Experiment 108464 PARAMETER Experiment Name: At_Germinating_Seeds_cDNA_P Parameter: Tissue Value: Germinating Seeds
  misc_feature: MA Experiment ID: 108607 Result: Down-regulated in Transcription
  misc_feature: MA Experiment 108607 PARAMETER Experiment Name: At_100uM_ABA_cDNA_P Parameter: Timepoint (hr) Value: 4
  misc_feature: MA Experiment 108607 PARAMETER Experiment Name: At_100uM_ABA_cDNA_P Parameter: Tissue Value: Aerial
  misc_feature: MA Experiment 108607 PARAMETER Experiment Name: At_100uM_ABA_cDNA_P Parameter: Treatment Value: 100uM ABA vs. No Treatment
  misc_feature: MA Experiment ID: 20000180 Result: Up-regulated in Transcription
  misc_feature: MA Experiment 20000180 PARAMETER Experiment Name: At_Germinating_Seeds_P Parameter: Age (hr) Value: 24 vs. 0
  misc_feature: MA Experiment 20000180 PARAMETER Experiment Name: At_Germinating_Seeds_P Parameter: Tissue Value: Germinating Seeds
  misc_feature: MA Experiment ID: 20000185 Result: Up-regulated in Transcription
  misc_feature: MA Experiment 20000185 PARAMETER Experiment Name: At_Roots__P Parameter: Age (day) Value: 7 vs. 21
  misc_feature: MA Experiment 20000185 PARAMETER Experiment Name: At_Roots__P Parameter: Organism Value: A. thaliana
  misc_feature: MA Experiment 20000185 PARAMETER Experiment Name: At_Roots__P Parameter: Tissue Value: Roots vs. Whole Plant
  misc_feature: MA Experiment ID: 20000227 Result: Up-regulated in Transcription
  misc_feature: MA Experiment 20000227 PARAMETER Experiment Name: At_Root-Tips-vs-Tops_P Parameter: Tissue Value: Root Tips vs. Root Tops
  misc_feature: MA Experiment ID: 20000234 Result: Up-regulated in Transcription
  misc_feature: MA Experiment 20000234 PARAMETER Experiment Name: At_Siliques_P Parameter: Age (day) Value: 21
  misc_feature: MA Experiment 20000234 PARAMETER Experiment Name: At_Siliques_P Parameter: Organism Value: A. thaliana
  misc_feature: MA Experiment 20000234 PARAMETER Experiment Name: At_Siliques_P Parameter: Plant Line Value: WS
  misc_feature: MA Experiment 20000234 PARAMETER Experiment Name: At_Siliques_P Parameter: Tissue Value: Less Than 5mm Siliques vs. Whole Plant
  misc_feature: MA Experiment ID: 20000264 Result: Up-regulated in Transcription
  misc_feature: MA Experiment 20000264 PARAMETER Experiment Name: At_Open_Flower_P Parameter: Age (day) Value: 21
  misc_feature: MA Experiment 20000264 PARAMETER Experiment Name: At_Open_Flower_P Parameter: Plant Line Value: WS
  misc_feature: MA Experiment 20000264 PARAMETER Experiment Name: At_Open_Flower_P Parameter: Tissue Value: Open Flower vs. Whole Plant
  misc_feature: MA Experiment ID: 20000265 Result: Up-regulated in Transcription
  misc_feature: MA Experiment 20000265 PARAMETER Experiment Name: At_Open_Flower_P Parameter: Age (day) Value: 21
  misc_feature: MA Experiment 20000265 PARAMETER Experiment Name: At_Open_Flower_P Parameter: Plant Line Value: WS
  misc_feature: MA Experiment 20000265 PARAMETER Experiment Name: At_Open_Flower_P Parameter: Tissue Value: Closed Flower vs. Whole Plant
  misc_feature: MA Experiment ID: 20000437 Result: Down-regulated in Transcription
  misc_feature: MA Experiment 20000437 PARAMETER Experiment Name: At_Drought_P Parameter: Age (day) Value: 8
  misc_feature: MA Experiment 20000437 PARAMETER Experiment Name: At_Drought_P Parameter: Organism Value: A. thaliana
  misc_feature: MA Experiment 20000437 PARAMETER Experiment Name: At_Drought_P Parameter: Plant Line Value: WS
  misc_feature: MA Experiment 20000437 PARAMETER Experiment Name: At_Drought_P Parameter: Timepoint (hr) Value: 24
  misc_feature: MA Experiment 20000437 PARAMETER Experiment Name: At_Drought_P Parameter: Tissue Value: Whole Plant
  misc_feature: MA Experiment 20000437 PARAMETER Experiment Name: At_Drought_P Parameter: Treatment Value: Drought vs. No Drought
  misc_feature: MA Experiment ID: 20000439 Result: Up-regulated in Transcription
  misc_feature: MA Experiment 20000439 PARAMETER Experiment Name: At_Roots__P Parameter: Age (day) Value: 14 vs. 21
  misc_feature: MA Experiment 20000439 PARAMETER Experiment Name: At_Roots__P Parameter: Organism Value: A. thaliana
  misc_feature: MA Experiment 20000439 PARAMETER Experiment Name: At_Roots__P Parameter: Tissue Value: Roots vs. Whole Plant
  misc_feature: MA Experiment ID: 20000495 Result: Up-regulated in Transcription
  misc_feature: MA Experiment 20000495 PARAMETER Experiment Name: At_Guard_Cells_P Parameter: Harvest Date Value: 8/2/2002
  misc_feature: MA Experiment 20000495 PARAMETER Experiment Name: At_Guard_Cells_P Parameter: Organism Value: A. thaliana
  misc_feature: MA Experiment 20000495 PARAMETER Experiment Name: At_Guard_Cells_P Parameter: Tissue Value: Guard Cells vs. Leaves
  misc_feature: MA Experiment ID: 20001911 Result: Down-regulated in Transcription
  misc_feature: MA Experiment 20001911 PARAMETER Experiment Name: At_Drought_Reproduction_P Parameter: Age (day) Value: 40
  misc_feature: MA Experiment 20001911 PARAMETER Experiment Name: At_Drought_Reproduction_P Parameter: Organism Value: A. thaliana
  misc_feature: MA Experiment 20001911 PARAMETER Experiment Name: At_Drought_Reproduction_P Parameter: Plant Line Value: WS
  misc_feature: MA Experiment 20001911 PARAMETER Experiment Name: At_Drought_Reproduction_P Parameter: Timepoint (day) Value: 10
  misc_feature: MA Experiment 20001911 PARAMETER Experiment Name: At_Drought_Reproduction_P Parameter: Tissue Value: Flowers
  misc_feature: MA Experiment 20001911 PARAMETER Experiment Name: At_Drought_Reproduction_P Parameter: Treatment Value: Drought vs. No Drought
aaaagaatttcctcgctctaccgccgccgtctctcttctctcagcaaggttgaatcatcagagaagaaagggttttacactgcggcgtaaaggatgaagcttgacgtgaatgtgttgagatatttatccaaagatgattttcgagttctcactgctgtcgagatgggaatgcgaaaccatgagattgttccttctgagcttgtggagcgcattgcttgtctaaaacatggaggcacctacaaggtcctgaagaacttgctcaagtataagcttttgcaccacgattcctctaaatatgatggattccgactcacctatctgggttatgactttcttgccattaaaacattggtcaaccggggtatatttaccggtgtcggtcgtcagattggtgttggtaaagagtcagacatatttgaggtcgctcaggaagatggaactattctagcaatgaagttacatagactagggagaacctcctttagggctgtcaaatctaagcgtgactacttgaggcatcgcagtagtttcagctggttgtatctctcccgacttgcagctctcaaggagtttgcttttatgaaggtgaagcaattacagaaccctgagacaattttcgagaagatcattggtattgttgttcgtttggctgagcatggtctaattcattgtgacttcaatgaattcaacatcatgattgatgatgaagagaaaataacgatgattgattttccacaaatggtatctgtttcacaccgaaatgcacaaatgtactttgaccgtgatatcgaatgcatcttcaagtttttcagaaaaaggtttaatatgtctttccatgaagataaaggtgaatcagaggagacggaggtggatgagaacagcagaccatcttttttcgatattactaaagatgctaatgctctggataaagatctagaagctagtgggttcacaagaaaggagcagactgacctcgataaatttattgaaggtggggtggagaagagtgaagattctgatgaggatgaggaatctgatgatgaagagcagacttgtgaatcaaacgaagaaggaaacctaaatgaaataaaatcattacagttgcaagacaaggagcaaaaaagttcagatggtgttgaggcagaagttgagttggataataccgagaacggtgaaagcaatggagatgaagatgaagtcggaagtaatgaggaggaggaagagaaagaggcagagctggagaaaaatttgggcaagatgatgagagatgttttcaggccgactaaatcagccccttgttctcctgcaaagccacttggtatctctcgcactcaatctgaatcatttcatgctattcacaaagttcctgtcggagacagtccttatgtcagagcaaagaatgttcagttagtggagaaggatccagagagagcaattcctctgttttggaaggctattaatgctggagatagagtggacagtgctttgaaagacatggctattgtgatgaagcaacaaaaccgcgctgaagaagccattgaagctattaaatcactcagagttagatgttcagatcaagctcaggaatctctcgacaatatcctcttagatctctacaagagatgtgggagattagatgaccagattggacttttgaaacataagctcttcttgatacagaaaggactcgctttcaatggtaaacgaaccaaaacagctagatctcaaggcaagaagtttcaagtctctgtggagcaagaagctactcggttactgggaaacttgggatgggctctgatgcaacgagacaactttgtggaagctgaagatgcatacagaagagctttatcaatagcaccagacaacaacaaaatgtgtaaccttggtatctgccttatgaagcaaggaaggatcgatgaggccaaagagactttacgacgtgtgaaacccgcggttgttgatggccctagaggcgtggattcacatctaaaagcttacgagagagcgcaacagatgctgaatgatcttggatctgagatgatgagaagaggaggagatgataaggttgaacaaagaaggctctttgatgcaatctttggatcttcctctatatggcaacctcagccttgtagtgagcagactgtgaaggctaaaccaaagcctggtttaagcaatggtgatggatacggtgatgagaacgtgaagatgagtgtgaatccagtagtagtaaacccattaagggttgatgcaaaaccgttcttctcttcgaagttggtcatcagtaacaacgagaagctgaagagaacgagatcgtcgagccaagggatggggatgttgagtggtattggtggtgatcatgagggagagacaaacacaagcacgagaaggagattgtcaatggagaagaaagcaacggagtgtggattaccagacaataaagactttgaagatgcgatcatggctgctgttttaggaacagaaaccaaagtggacaagaagaggctcaaggtgttccaggatatcactttgtgtctcaatcagagtctctaa

SEQ ID NO: 97733 - protein, 818 aa, Arabidopsis thaliana
  peptide (1)..(818): Ceres Seq. ID no. 13504809
  misc_feature (106)..(164): Pfam Name: RIO1 family Pfam Description: RIO1 family
  misc_feature (389)..(818): Homolog of NCBI NO: 15230439 NR Description: male sterility MS5, putative [Arabidopsis
  misc_feature (521)..(805): Homolog of NCBI NO: 25455795 NR Description: MS5-like protein [imported] - Arabidopsis thaliana
  misc_feature (154)..(391): Homolog of NCBI NO: 15230437 NR Description: hypothetical protein [Arabidopsis thaliana]
  misc_feature (160)..(367): Homolog of NCBI NO: 37681925 NR Description: RIO kinase 2 [Danio rerio]
  misc_feature (2)..(164): Homolog of NCBI NO: 37681925 NR Description: RIO kinase 2 [Danio rerio]
  misc_feature (160)..(367): Homolog of NCBI NO: 28502888 NR Description: Similar to hypothetical protein FLJ11159 [Danio
  misc_feature (2)..(164): Homolog of NCBI NO: 28502888 NR Description: Similar to hypothetical protein FLJ11159 [Danio
  misc_feature (2)..(164): Homolog of NCBI NO: 26354833 NR Description: unnamed protein product [Mus musculus]
  misc_feature (160)..(318): Homolog of NCBI NO: 26354833 NR Description: unnamed protein product [Mus musculus]
  misc_feature (2)..(164): Homolog of NCBI NO: 13385428 NR Description: RIKEN cDNA 2010110K24 [Mus musculus] unnamed protein product [Mus musculus] unnamed protein product [Mus musculus]
MKLDVNVLRYLSKDDFRVLTAVEMGMRNHEIVPSELVERIACLKHGGTYKVLKNLLKYKLLHHDSSKYDGFRLTYLGYDFLAIKTLVNRGIFTGVGRQIGVGKESDIFEVAQEDGTILAMKLHRLGRTSFRAVKSKRDYLRHRSSFSWLYLSRLAALKEFAFMKVKQLQNPETIFEKIIGIVVRLAEHGLIHCDFNEFNIMIDDEEKITMIDFPQMVSVSHRNAQMYFDRDIECIFKFFRKRFNMSFHEDKGESEETEVDENSRPSFFDITKDANALDKDLEASGFTRKEQTDLDKFIEGGVEKSEDSDEDEESDDEEQTCESNEEGNLNEIKSLQLQDKEQKSSDGVEAEVELDNTENGESNGDEDEVGSNEEEEEKEAELEKNLGKMMRDVFRPTKSAPCSPAKPLGISRTQSESFHAIHKVPVGDSPYVRAKNVQLVEKDPERAIPLFWKAINAGDRVDSALKDMAIVMKQQNRAEEAIEAIKSLRVRCSDQAQESLDNILLDLYKRCGRLDDQIGLLKHKLFLIQKGLAFNGKRTKTARSQGKKFQVSVEQEATRLLGNLGWALMQRDNFVEAEDAYRRALSIAPDNNKMCNLGICLMKQGRIDEAKETLRRVKPAVVDGPRGVDSHLKAYERAQQMLNDLGSEMMRRGGDDKVEQRRLFDAIFGSSSIWQPQPCSEQTVKAKPKPGLSNGDGYGDENVKMSVNPVVVNPLRVDAKPFFSSKLVISNNEKLKRTRSSSQGMGMLSGIGGDHEGETNTSTRRRLSMEKKATECGLPDNKDFEDAIMAAVLGTETKVDKKRLKVFQDITLCLNQSL

SEQ ID NO: 97734 - protein, 795 aa, Arabidopsis thaliana
  peptide (1)..(795): Ceres Seq. ID no. 13504810
  misc_feature (83)..(141): Pfam Name: RIO1 family Pfam Description: RIO1 family
  misc_feature (366)..(795): Homolog of NCBI NO: 15230439 NR Description: male sterility MS5, putative [Arabidopsis
  misc_feature (498)..(782): Homolog of NCBI NO: 25455795 NR Description: MS5-like protein [imported] - Arabidopsis thaliana
  misc_feature (131)..(368): Homolog of NCBI NO: 15230437 NR Description: hypothetical protein [Arabidopsis thaliana]
  misc_feature (137)..(344): Homolog of NCBI NO: 37681925 NR Description: RIO kinase 2 [Danio rerio]
  misc_feature (1)..(141): Homolog of NCBI NO: 37681925 NR Description: RIO kinase 2 [Danio rerio]
  misc_feature (137)..(344): Homolog of NCBI NO: 28502888 NR Description: Similar to hypothetical protein FLJ11159 [Danio
  misc_feature (1)..(141): Homolog of NCBI NO: 28502888 NR Description: Similar to hypothetical protein FLJ11159 [Danio
  misc_feature (1)..(141): Homolog of NCBI NO: 26354833 NR Description: unnamed protein product [Mus musculus]
  misc_feature (137)..(295): Homolog of NCBI NO: 26354833 NR Description: unnamed protein product [Mus musculus]
  misc_feature (1)..(141): Homolog of NCBI NO: 13385428 NR Description: RIKEN cDNA 2010110K24 [Mus musculus] unnamed protein product [Mus musculus] unnamed protein product [Mus musculus]
MGMRNHEIVPSELVERIACLKHGGTYKVLKNLLKYKLLHHDSSKYDGFRLTYLGYDFLAIKTLVNRGIFTGVGRQIGVGKESDIFEVAQEDGTILAMKLHRLGRTSFRAVKSKRDYLRHRSSFSWLYLSRLAALKEFAFMKVKQLQNPETIFEKIIGIVVRLAEHGLIHCDFNEFNIMIDDEEKITMIDFPQMVSVSHRNAQMYFDRDIECIFKFFRKRFNMSFHEDKGESEETEVDENSRPSFFDITKDANALDKDLEASGFTRKEQTDLDKFIEGGVEKSEDSDEDEESDDEEQTCESNEEGNLNEIKSLQLQDKEQKSSDGVEAEVELDNTENGESNGDEDEVGSNEEEEEKEAELEKNLGKMMRDVFRPTKSAPCSPAKPLGISRTQSESFHAIHKVPVGDSPYVRAKNVQLVEKDPERAIPLFWKAINAGDRVDSALKDMAIVMKQQNRAEEAIEAIKSLRVRCSDQAQESLDNILLDLYKRCGRLDDQIGLLKHKLFLIQKGLAFNGKRTKTARSQGKKFQVSVEQEATRLLGNLGWALMQRDNFVEAEDAYRRALSIAPDNNKMCNLGICLMKQGRIDEAKETLRRVKPAVVDGPRGVDSHLKAYERAQQMLNDLGSEMMRRGGDDKVEQRRLFDAIFGSSSIWQPQPCSEQTVKAKPKPGLSNGDGYGDENVKMSVNPVVVNPLRVDAKPFFSSKLVISNNEKLKRTRSSSQGMGMLSGIGGDHEGETNTSTRRRLSMEKKATECGLPDNKDFEDAIMAAVLGTETKVDKKRLKVFQDITLCLNQSL

SEQ ID NO: 97735 - protein, 793 aa, Arabidopsis thaliana
  peptide (1)..(793): Ceres Seq. ID no. 13504811
  misc_feature (81)..(139): Pfam Name: RIO1 family Pfam Description: RIO1 family
  misc_feature (364)..(793): Homolog of NCBI NO: 15230439 NR Description: male sterility MS5, putative [Arabidopsis
  misc_feature (496)..(780): Homolog of NCBI NO: 25455795 NR Description: MS5-like protein [imported] - Arabidopsis thaliana
  misc_feature (129)..(366): Homolog of NCBI NO: 15230437 NR Description: hypothetical protein [Arabidopsis thaliana]
  misc_feature (135)..(342): Homolog of NCBI NO: 37681925 NR Description: RIO kinase 2 [Danio rerio]
  misc_feature (1)..(139): Homolog of NCBI NO: 37681925 NR Description: RIO kinase 2 [Danio rerio]
  misc_feature (135)..(342): Homolog of NCBI NO: 28502888 NR Description: Similar to hypothetical protein FLJ11159 [Danio
  misc_feature (1)..(139): Homolog of NCBI NO: 28502888 NR Description: Similar to hypothetical protein FLJ11159 [Danio
  misc_feature (1)..(139): Homolog of NCBI NO: 26354833 NR Description: unnamed protein product [Mus musculus]
  misc_feature (135)..(293): Homolog of NCBI NO: 26354833 NR Description: unnamed protein product [Mus musculus]
  misc_feature (1)..(139): Homolog of NCBI NO: 13385428 NR Description: RIKEN cDNA 2010110K24 [Mus musculus] unnamed protein product [Mus musculus] unnamed protein product [Mus musculus]
MRNHEIVPSELVERIACLKHGGTYKVLKNLLKYKLLHHDSSKYDGFRLTYLGYDFLAIKTLVNRGIFTGVGRQIGVGKESDIFEVAQEDGTILAMKLHRLGRTSFRAVKSKRDYLRHRSSFSWLYLSRLAALKEFAFMKVKQLQNPETIFEKIIGIVVRLAEHGLIHCDFNEFNIMIDDEEKITMIDFPQMVSVSHRNAQMYFDRDIECIFKFFRKRFNMSFHEDKGESEETEVDENSRPSFFDITKDANALDKDLEASGFTRKEQTDLDKFIEGGVEKSEDSDEDEESDDEEQTCESNEEGNLNEIKSLQLQDKEQKSSDGVEAEVELDNTENGESNGDEDEVGSNEEEEEKEAELEKNLGKMMRDVFRPTKSAPCSPAKPLGISRTQSESFHAIHKVPVGDSPYVRAKNVQLVEKDPERAIPLFWKAINAGDRVDSALKDMAIVMKQQNRAEEAIEAIKSLRVRCSDQAQESLDNILLDLYKRCGRLDDQIGLLKHKLFLIQKGLAFNGKRTKTARSQGKKFQVSVEQEATRLLGNLGWALMQRDNFVEAEDAYRRALSIAPDNNKMCNLGICLMKQGRIDEAKETLRRVKPAVVDGPRGVDSHLKAYERAQQMLNDLGSEMMRRGGDDKVEQRRLFDAIFGSSSIWQPQPCSEQTVKAKPKPGLSNGDGYGDENVKMSVNPVVVNPLRVDAKPFFSSKLVISNNEKLKRTRSSSQGMGMLSGIGGDHEGETNTSTRRRLSMEKKATECGLPDNKDFEDAIMAAVLGTETKVDKKRLKVFQDITLCLNQSL

SEQ ID NO: 97736 - DNA, 1821 bp, Arabidopsis thaliana
  misc_feature (1)..(1821): Ceres Seq. ID no. 13504843
  misc_feature: MA Experiment ID: 108488 Result: Down-regulated in Transcription
  misc_feature: MA Experiment ID: 108573 Result: Up-regulated in Transcription
  misc_feature: MA Experiment 108573 PARAMETER Experiment Name: At_Drought_cDNA_P Parameter: Timepoint (hr) Value: 6
  misc_feature: MA Experiment 108573 PARAMETER Experiment Name: At_Drought_cDNA_P Parameter: Tissue Value: Aerial
  misc_feature: MA Experiment 108573 PARAMETER Experiment Name: At_Drought_cDNA_P Parameter: Treatment Value: Drought vs. No Drought
  misc_feature: MA Experiment ID: 108579 Result: Up-regulated in Transcription
  misc_feature: MA Experiment 108579 PARAMETER Experiment Name: At_4deg_Cold_cDNA_P Parameter: Temperature (deg C) Value: 4 vs. 22
  misc_feature: MA Experiment 108579 PARAMETER Experiment Name: At_4deg_Cold_cDNA_P Parameter: Timepoint (hr) Value: 6
  misc_feature: MA Experiment 108579 PARAMETER Experiment Name: At_4deg_Cold_cDNA_P Parameter: Tissue Value: Aerial
  misc_feature: MA Experiment ID: 108585 Result: Up-regulated in Transcription
  misc_feature: MA Experiment 108585 PARAMETER Experiment Name: At_5mM_NaNP_cDNA_P Parameter: Timepoint (hr) Value: 6
  misc_feature: MA Experiment 108585 PARAMETER Experiment Name: At_5mM_NaNP_cDNA_P Parameter: Tissue Value: Aerial
  misc_feature: MA Experiment 108585 PARAMETER Experiment Name: At_5mM_NaNP_cDNA_P Parameter: Treatment Value: null
  misc_feature: MA Experiment ID: 108594 Result: Up-regulated in Transcription
  misc_feature: MA Experiment 108594 PARAMETER Experiment Name: At_Ler-rhl_Root_cDNA_P Parameter: Plant Line Value: null
  misc_feature: MA Experiment ID: 108595 Result: Up-regulated in Transcription
  misc_feature: MA Experiment 108595 PARAMETER Experiment Name: At_Ler-pi_Ovule_cDNA_P Parameter: Plant Line Value: null
  misc_feature: MA Experiment ID: 20000111 Result: Up-regulated in Transcription
  misc_feature: MA Experiment 20000111 PARAMETER Experiment Name: At_42deg_Heat_cDNA_P Parameter: Temperature (deg C) Value: 42 vs. 22
  misc_feature: MA Experiment 20000111 PARAMETER Experiment Name: At_42deg_Heat_cDNA_P Parameter: Timepoint (hr) Value: 6
  misc_feature: MA Experiment 20000111 PARAMETER Experiment Name: At_42deg_Heat_cDNA_P Parameter: Tissue Value: Aerial
  misc_feature: MA Experiment ID: 20000173 Result: Up-regulated in Transcription
  misc_feature: MA Experiment 20000173 PARAMETER Experiment Name: At_42deg_Heat_P Parameter: Age (day) Value: 14
  misc_feature: MA Experiment 20000173 PARAMETER Experiment Name: At_42deg_Heat_P Parameter: Organism Value: A. thaliana
  misc_feature: MA Experiment 20000173 PARAMETER Experiment Name: At_42deg_Heat_P Parameter: Plant Line Value: WS
  misc_feature: MA Experiment 20000173 PARAMETER Experiment Name: At_42deg_Heat_P Parameter: Temperature (deg C) Value: 42 vs. 22
  misc_feature: MA Experiment 20000173 PARAMETER Experiment Name: At_42deg_Heat_P Parameter: Timepoint (hr) Value: 6
  misc_feature: MA Experiment 20000173 PARAMETER Experiment Name: At_42deg_Heat_P Parameter: Tissue Value: Aerial
  misc_feature: MA Experiment ID: 20000182 Result: Up-regulated in Transcription
  misc_feature: MA Experiment 20000182 PARAMETER Experiment Name: At_2mM_SA_P Parameter: Age (day) Value: 14
  misc_feature: MA Experiment 20000182 PARAMETER Experiment Name: At_2mM_SA_P Parameter: Organism Value: A. thaliana
  misc_feature: MA Experiment 20000182 PARAMETER Experiment Name: At_2mM_SA_P Parameter: Plant Line Value: WS
  misc_feature: MA Experiment 20000182 PARAMETER Experiment Name: At_2mM_SA_P Parameter: Timepoint (hr) Value: 6
  misc_feature: MA Experiment 20000182 PARAMETER Experiment Name: At_2mM_SA_P Parameter: Tissue Value: Aerial
  misc_feature: MA Experiment 20000182 PARAMETER Experiment Name: At_2mM_SA_P Parameter: Treatment Value: 2mM SA vs. No Treatment
  misc_feature: MA Experiment ID: 20000184 Result: Down-regulated in Transcription
  misc_feature: MA Experiment 20000184 PARAMETER Experiment Name: At_Shoots__P Parameter: Age (day) Value: 7
  misc_feature: MA Experiment 20000184 PARAMETER Experiment Name: At_Shoots__P Parameter: Tissue Value: Shoots vs. Whole Plant
  misc_feature: MA Experiment ID: 20000185 Result: Down-regulated in Transcription
  misc_feature: MA Experiment 20000185 PARAMETER Experiment Name: At_Roots__P Parameter: Age (day) Value: 7 vs. 21
  misc_feature: MA Experiment 20000185 PARAMETER Experiment Name: At_Roots__P Parameter: Organism Value: A. thaliana
  misc_feature: MA Experiment 20000185 PARAMETER Experiment Name: At_Roots__P Parameter: Tissue Value: Roots vs. Whole Plant
  misc_feature: MA Experiment ID: 20000234 Result: Down-regulated in Transcription
  misc_feature: MA Experiment 20000234 PARAMETER Experiment Name: At_Siliques_P Parameter: Age (day) Value: 21
  misc_feature: MA Experiment 20000234 PARAMETER Experiment Name: At_Siliques_P Parameter: Organism Value: A. thaliana
  misc_feature: MA Experiment 20000234 PARAMETER Experiment Name: At_Siliques_P Parameter: Plant Line Value: WS
  misc_feature: MA Experiment 20000234 PARAMETER Experiment Name: At_Siliques_P Parameter: Tissue Value: Less Than 5mm Siliques vs. Whole Plant
  misc_feature: MA Experiment ID: 20000264 Result: Down-regulated in Transcription
  misc_feature: MA Experiment 20000264 PARAMETER Experiment Name: At_Open_Flower_P Parameter: Age (day) Value: 21
  misc_feature: MA Experiment 20000264 PARAMETER Experiment Name: At_Open_Flower_P Parameter: Plant Line Value: WS
  misc_feature: MA Experiment 20000264 PARAMETER Experiment Name: At_Open_Flower_P Parameter: Tissue Value: Open Flower vs. Whole Plant
  misc_feature: MA Experiment ID: 20000265 Result: Down-regulated in Transcription
  misc_feature: MA Experiment 20000265 PARAMETER Experiment Name: At_Open_Flower_P Parameter: Age (day) Value: 21
  misc_feature: MA Experiment 20000265 PARAMETER Experiment Name: At_Open_Flower_P Parameter: Plant Line Value: WS
  misc_feature: MA Experiment 20000265 PARAMETER Experiment Name: At_Open_Flower_P Parameter: Tissue Value: Closed Flower vs. Whole Plant
  misc_feature: MA Experiment ID: 20000286 Result: Down-regulated in Transcription
  misc_feature: MA Experiment 20000286 PARAMETER Experiment Name: At_Open_Flower_P Parameter: Age (day) Value: 21
  misc_feature: MA Experiment 20000286 PARAMETER Experiment Name: At_Open_Flower_P Parameter: Plant Line Value: WS
  misc_feature: MA Experiment 20000286 PARAMETER Experiment Name: At_Open_Flower_P Parameter: Tissue Value: Half Open vs. Whole Plant
  misc_feature: MA Experiment ID: 20000438 Result: Down-regulated in Transcription
  misc_feature: MA Experiment 20000438 PARAMETER Experiment Name: At_Shoots__P Parameter: Age (day) Value: 14
  misc_feature: MA Experiment 20000438 PARAMETER Experiment Name: At_Shoots__P Parameter: Tissue Value: Shoots vs. Whole Plant
  misc_feature: MA Experiment ID: 20000439 Result: Down-regulated in Transcription
  misc_feature: MA Experiment 20000439 PARAMETER Experiment Name: At_Roots__P Parameter: Age (day) Value: 14 vs. 21
  misc_feature: MA Experiment 20000439 PARAMETER Experiment Name: At_Roots__P Parameter: Organism Value: A. thaliana
  misc_feature: MA Experiment 20000439 PARAMETER Experiment Name: At_Roots__P Parameter: Tissue Value: Roots vs. Whole Plant
  misc_feature: MA Experiment ID: 20000460 Result: Up-regulated in Transcription
  misc_feature: MA Experiment 20000460 PARAMETER Experiment Name: At_10percent_PEG_P Parameter: Age (day) Value: 12
  misc_feature: MA Experiment 20000460 PARAMETER Experiment Name: At_10percent_PEG_P Parameter: Organism Value: A. thaliana
  misc_feature: MA Experiment 20000460 PARAMETER Experiment Name: At_10percent_PEG_P Parameter: Plant Line Value: WS
  misc_feature: MA Experiment 20000460 PARAMETER Experiment Name: At_10percent_PEG_P Parameter: Timepoint (day) Value: 12
  misc_feature: MA Experiment 20000460 PARAMETER Experiment Name: At_10percent_PEG_P Parameter: Tissue Value: Whole Plant
  misc_feature: MA Experiment 20000460 PARAMETER Experiment Name: At_10percent_PEG_P Parameter: Treatment Value: 10percent PEG vs. No Treatment
  misc_feature: MA Experiment ID: 20000496 Result: Up-regulated in Transcription
  misc_feature: MA Experiment 20000496 PARAMETER Experiment Name: At_Guard_Cells_P Parameter: Harvest Date Value: 7/19/2002
  misc_feature: MA Experiment 20000496 PARAMETER Experiment Name: At_Guard_Cells_P Parameter: Organism Value: Canola
  misc_feature: MA Experiment 20000496 PARAMETER Experiment Name: At_Guard_Cells_P Parameter: Tissue Value: Guard Cells vs. Leaves
  misc_feature: MA Experiment ID: 20000527 Result: Up-regulated in Transcription
  misc_feature: MA Experiment 20000527 PARAMETER Experiment Name: At_10percent_PEG_P Parameter: Age (day) Value: 20
  misc_feature: MA Experiment 20000527 PARAMETER Experiment Name: At_10percent_PEG_P Parameter: Organism Value: A. thaliana
  misc_feature: MA Experiment 20000527 PARAMETER Experiment Name: At_10percent_PEG_P Parameter: Plant Line Value: WS
  misc_feature: MA Experiment 20000527 PARAMETER Experiment Name: At_10percent_PEG_P Parameter: Timepoint (day) Value: 20
  misc_feature: MA Experiment 20000527 PARAMETER Experiment Name: At_10percent_PEG_P Parameter: Tissue Value: Whole Plant
  misc_feature: MA Experiment 20000527 PARAMETER Experiment Name: At_10percent_PEG_P Parameter: Treatment Value: 10percent PEG vs. No Treatment
  misc_feature: MA Experiment ID: 20000573 Result: Down-regulated in Transcription
  misc_feature: MA Experiment 20000573 PARAMETER Experiment Name: At_100uM_ABA_Mutants__P Parameter: Organism Value: A. thaliana
  misc_feature: MA Experiment 20000573 PARAMETER Experiment Name: At_100uM_ABA_Mutants__P Parameter: Plant Line Value: CS22 vs. Ler wt
  misc_feature: MA Experiment 20000573 PARAMETER Experiment Name: At_100uM_ABA_Mutants__P Parameter: Timepoint (hr) Value: N/A
  misc_feature: MA Experiment 20000573 PARAMETER Experiment Name: At_100uM_ABA_Mutants__P Parameter: Tissue Value: Whole Plant
  misc_feature: MA Experiment 20000573 PARAMETER Experiment Name: At_100uM_ABA_Mutants__P Parameter: Treatment Value: None
  misc_feature: MA Experiment ID: 20000574 Result: Down-regulated in Transcription
  misc_feature: MA Experiment 20000574 PARAMETER Experiment Name: At_100uM_ABA_Mutants__P Parameter: Organism Value: A. thaliana
  misc_feature: MA Experiment 20000574 PARAMETER Experiment Name: At_100uM_ABA_Mutants__P Parameter: Plant Line Value: CS23 vs. Ler wt
  misc_feature: MA Experiment 20000574 PARAMETER Experiment Name: At_100uM_ABA_Mutants__P Parameter: Timepoint (hr) Value: N/A
  misc_feature: MA Experiment 20000574 PARAMETER Experiment Name: At_100uM_ABA_Mutants__P Parameter: Tissue Value: Whole Plant
  misc_feature: MA Experiment 20000574 PARAMETER Experiment Name: At_100uM_ABA_Mutants__P Parameter: Treatment Value: None
  misc_feature: MA Experiment ID: 20001905 Result: Up-regulated in Transcription
  misc_feature: MA Experiment 20001905 PARAMETER Experiment Name: At_Drought_Reproduction_P Parameter: Age (day) Value: 40
  misc_feature: MA Experiment 20001905 PARAMETER Experiment Name: At_Drought_Reproduction_P Parameter: Organism Value: A. thaliana
  misc_feature: MA Experiment 20001905 PARAMETER Experiment Name: At_Drought_Reproduction_P Parameter: Plant Line Value: WS
  misc_feature: MA Experiment 20001905 PARAMETER Experiment Name: At_Drought_Reproduction_P Parameter: Timepoint (day) Value: 10
  misc_feature: MA Experiment 20001905 PARAMETER Experiment Name: At_Drought_Reproduction_P Parameter: Tissue Value: Rosettes
  misc_feature: MA Experiment 20001905 PARAMETER Experiment Name: At_Drought_Reproduction_P Parameter: Treatment Value: Drought vs. No Drought
  misc_feature: MA Experiment ID: 20001911 Result: Up-regulated in Transcription
  misc_feature: MA Experiment 20001911 PARAMETER Experiment Name: At_Drought_Reproduction_P Parameter: Age (day) Value: 40
  misc_feature: MA Experiment 20001911 PARAMETER Experiment Name: At_Drought_Reproduction_P Parameter: Organism Value: A. thaliana
  misc_feature: MA Experiment 20001911 PARAMETER Experiment Name: At_Drought_Reproduction_P Parameter: Plant Line Value: WS
  misc_feature: MA Experiment 20001911 PARAMETER Experiment Name: At_Drought_Reproduction_P Parameter: Timepoint (day) Value: 10
  misc_feature: MA Experiment 20001911 PARAMETER Experiment Name: At_Drought_Reproduction_P Parameter: Tissue Value: Flowers
  misc_feature: MA Experiment 20001911 PARAMETER Experiment Name: At_Drought_Reproduction_P Parameter: Treatment Value: Drought vs. No Drought
atctccttcttctccactttaccaaatcgtgtcaaattttagggttttttcttttcgtacttcatcaaattctggaatctggttttttcttagttttcttctatatacctttgaatcgcatctttgatccaaattcattttagatatcaccttgaagtcgaatttgtgattttttcttttcctctcgaattctcaaagtctcacgcaactatgaaagaagacatggaagtactatcgctcgcttcactaccggttgggttcagatttagtccaacggacgaagagttagtccggtactatctccggctcaagatcaacggtcacgataacgacgttagagtaattcgtgagatcgatatctgcaaatgggagccttgggatttgcctgatttttctgtggtgaagacaacagactcagagtggctcttcttttgtcctttggaccggaaatatccgagtggaagtcgaatgaatagagctactgtggctggatactggaaggcgacgggaaaagaccgtaagatcaaatcaggaaagactaagattataggtgttaagaggactctagtgttttatacaggtcgtgctcctaaagggacacgaacttgttggattatgcatgagtatcgtgctactgagaaggatcttgatggaacaaagtctggccagaatccgtttgttgtttgtaagttgtttaagaagcaagatattgtgaacggagctgctgaaccagaagagtcaaagtcatgtgaagttgaaccagcggtatcgtctccaactgttgtggacgaggttgaaatgtctgaggtatctcctgttttccctaaaacagaagagactaatccttgtgacgtcgcagagtcttctcttgtaatccccagcgaatgtcgtagtggatactctgtccctgaggttacaaccaccgggcttgacgatatcgattggctctcgtttatggagtttgattccccgaagctgttctctccgttgcactctcaggtgcaatctgagctcggttcctctttcaatggcttacaatctgagtctagtgaattgttcaaaaaccacaatgaggattacattcagactcagtacggtacaaatgatgcggatgaatatatgtccaagttcttggattcttttcttgacattccctatgagccagaacagatcccatatgagccacagaatcttagctcatgcaacaagatcaatgatgaatctaagagaggaattaagattagagctcgacgagcacaagccccgggttgtgctgagcagtttgtaatgcagggcgatgcctcaagaaggctgcgtcttcaggttaaccttaacagccacaagtcagaaactgacagtacacaacttcaatttatcaagaaagaggttaaggacacaacaacggaaactatgacgaaaggatgtggaaatttcacaagatcaaagagcaggactagtttcatattcaagaaaattgcagccatgggatgttcatacagagggcttttcagagtcggtgtggtagcggttgtgtgtgtgatgtcggtctgcagtctagtcgcataaatccgctgaatgtgatgtttgttccgatcaattcatatagtaagaataaagaaagtggtttttacgggtggagagagcgcggatttgtgtgtataacaggggttttggcctggttctgcatctgttgttattgttgttgtttttgtcggcttaagcttaaccatggtcggtttaggagtgtagtagacttgtagttaacatgtacgacgactcataatattcagatggtaatgtttggaaatttttttattcctg

SEQ ID NO: 97737 - protein, 451 aa, Arabidopsis thaliana
  peptide (1)..(451): Ceres Seq. ID no. 13504844
  misc_feature (13)..(142): Pfam Name: No apical meristem (NAM) protein Pfam Description: No apical meristem (NAM) protein
  misc_feature (1)..(451): Homolog of NCBI NO: 30689531 NR Description: No apical meristem (NAM) protein family thaliana] >gi|9408601|gb|AAF87300.1|AF281062_1 TIP [Arabidopsis
  misc_feature (1)..(451): Homolog of NCBI NO: 15229161 NR Description: No apical meristem (NAM) protein family
  misc_feature (5)..(219): Homolog of NCBI NO: 7486659 NR Description: hypothetical protein F8D20.90 - Arabidopsis
  misc_feature (2)..(201): Homolog of NCBI NO: 21358787 NR Description: nam-like protein 1 [Petunia x hybrida]
  misc_feature (287)..(385): Homolog of NCBI NO: 21358787 NR Description: nam-like protein 1 [Petunia x hybrida]
  misc_feature (1)..(301): Homolog of NCBI NO: 6910587 NR Description: CDS [Arabidopsis thaliana]
  misc_feature (1)..(301): Homolog of NCBI NO: 30692812 NR Description: No apical meristem (NAM) protein family
  misc_feature (12)..(318): Homolog of NCBI NO: 15218843 NR Description: No apical meristem (NAM) protein family
  misc_feature (5)..(304): Homolog of NCBI NO: 34902994 NR Description: unnamed protein product [Oryza sativa (japonica group)] >gi|6730946|dbj|BAA89802.1| OsNAC8 protein [Oryza sativa]
  misc_feature (11)..(255): Homolog of NCBI NO: 21105751 NR Description: nam-like protein 11 [Petunia x hybrida]
MKEDMEVLSLASLPVGFRFSPTDEELVRYYLRLKINGHDNDVRVIREIDICKWEPWDLPDFSVVKTTDSEWLFFCPLDRKYPSGSRMNRATVAGYWKATGKDRKIKSGKTKIIGVKRTLVFYTGRAPKGTRTCWIMHEYRATEKDLDGTKSGQNPFVVCKLFKKQDIVNGAAEPEESKSCEVEPAVSSPTVVDEVEMSEVSPVFPKTEETNPCDVAESSLVIPSECRSGYSVPEVTTTGLDDIDWLSFMEFDSPKLFSPLHSQVQSELGSSFNGLQSESSELFKNHNEDYIQTQYGTNDADEYMSKFLDSFLDIPYEPEQIPYEPQNLSSCNKINDESKRGIKIRARRAQAPGCAEQFVMQGDASRRLRLQVNLNSHKSETDSTQLQFIKKEVKDTTTETMTKGCGNFTRSKSRTSFIFKKIAAMGCSYRGLFRVGVVAVVCVMSVCSLVA

SEQ ID NO: 97738 - protein, 447 aa, Arabidopsis thaliana
  peptide (1)..(447): Ceres Seq. ID no. 13504845
  misc_feature (9)..(138): Pfam Name: No apical meristem (NAM) protein Pfam Description: No apical meristem (NAM) protein
  misc_feature (1)..(447): Homolog of NCBI NO: 30689531 NR Description: No apical meristem (NAM) protein family thaliana] >gi|9408601|gb|AAF87300.1|AF281062_1 TIP [Arabidopsis
  misc_feature (1)..(447): Homolog of NCBI NO: 15229161 NR Description: No apical meristem (NAM) protein family
  misc_feature (1)..(215): Homolog of NCBI NO: 7486659 NR Description: hypothetical protein F8D20.90 - Arabidopsis
  misc_feature (1)..(197): Homolog of NCBI NO: 21358787 NR Description: nam-like protein 1 [Petunia x hybrida]
  misc_feature (283)..(381): Homolog of NCBI NO: 21358787 NR Description: nam-like protein 1 [Petunia x hybrida]
  misc_feature (1)..(297): Homolog of NCBI NO: 6910587 NR Description: CDS [Arabidopsis thaliana]
  misc_feature (1)..(297): Homolog of NCBI NO: 30692812 NR Description: No apical meristem (NAM) protein family
  misc_feature (8)..(314): Homolog of NCBI NO: 15218843 NR Description: No apical meristem (NAM) protein family
  misc_feature (1)..(300): Homolog of NCBI NO: 34902994 NR Description: unnamed protein product [Oryza sativa (japonica group)] >gi|6730946|dbj|BAA89802.1| OsNAC8 protein [Oryza sativa]
  misc_feature (7)..(251): Homolog of NCBI NO: 21105751 NR Description: nam-like protein 11 [Petunia x hybrida]
MEVLSLASLPVGFRFSPTDEELVRYYLRLKINGHDNDVRVIREIDICKWEPWDLPDFSVVKTTDSEWLFFCPLDRKYPSGSRMNRATVAGYWKATGKDRKIKSGKTKIIGVKRTLVFYTGRAPKGTRTCWIMHEYRATEKDLDGTKSGQNPFVVCKLFKKQDIVNGAAEPEESKSCEVEPAVSSPTVVDEVEMSEVSPVFPKTEETNPCDVAESSLVIPSECRSGYSVPEVTTTGLDDIDWLSFMEFDSPKLFSPLHSQVQSELGSSFNGLQSESSELFKNHNEDYIQTQYGTNDADEYMSKFLDSFLDIPYEPEQIPYEPQNLSSCNKINDESKRGIKIRARRAQAPGCAEQFVMQGDASRRLRLQVNLNSHKSETDSTQLQFIKKEVKDTTTETMTKGCGNFTRSKSRTSFIFKKIAAMGCSYRGLFRVGVVAVVCVMSVCSLVA

SEQ ID NO: 97739 - protein, 365 aa, Arabidopsis thaliana
  peptide (1)..(365): Ceres Seq. ID no. 13504846
  misc_feature (1)..(56): Pfam Name: No apical meristem (NAM) protein Pfam Description: No apical meristem (NAM) protein
  misc_feature (1)..(365): Homolog of NCBI NO: 30689531 NR Description: No apical meristem (NAM) protein family thaliana] >gi|9408601|gb|AAF87300.1|AF281062_1 TIP [Arabidopsis
  misc_feature (1)..(365): Homolog of NCBI NO: 15229161 NR Description: No apical meristem (NAM) protein family
  misc_feature (1)..(133): Homolog of NCBI NO: 7486659 NR Description: hypothetical protein F8D20.90 - Arabidopsis
  misc_feature (1)..(115): Homolog of NCBI NO: 21358787 NR Description: nam-like protein 1 [Petunia x hybrida]
  misc_feature (201)..(299): Homolog of NCBI NO: 21358787 NR Description: nam-like protein 1 [Petunia x hybrida]
  misc_feature (1)..(215): Homolog of NCBI NO: 6910587 NR Description: CDS [Arabidopsis thaliana]
  misc_feature (1)..(215): Homolog of NCBI NO: 30692812 NR Description: No apical meristem (NAM) protein family
  misc_feature (1)..(232): Homolog of NCBI NO: 15218843 NR Description: No apical meristem (NAM) protein family
  misc_feature (1)..(218): Homolog of NCBI NO: 34902994 NR Description: unnamed protein product [Oryza sativa (japonica group)] >gi|6730946|dbj|BAA89802.1| OsNAC8 protein [Oryza sativa]
  misc_feature (1)..(169): Homolog of NCBI NO: 21105751 NR Description: nam-like protein 11 [Petunia x hybrida]
MNRATVAGYWKATGKDRKIKSGKTKIIGVKRTLVFYTGRAPKGTRTCWIMHEYRATEKDLDGTKSGQNPFVVCKLFKKQDIVNGAAEPEESKSCEVEPAVSSPTVVDEVEMSEVSPVFPKTEETNPCDVAESSLVIPSECRSGYSVPEVTTTGLDDIDWLSFMEFDSPKLFSPLHSQVQSELGSSFNGLQSESSELFKNHNEDYIQTQYGTNDADEYMSKFLDSFLDIPYEPEQIPYEPQNLSSCNKINDESKRGIKIRARRAQAPGCAEQFVMQGDASRRLRLQVNLNSHKSETDSTQLQFIKKEVKDTTTETMTKGCGNFTRSKSRTSFIFKKIAAMGCSYRGLFRVGVVAVVCVMSVCSLVA

SEQ ID NO: 97740 - DNA, 1568 bp, Arabidopsis thaliana
  misc_feature (1)..(1568): Ceres Seq. ID no. 13504989
  misc_feature: MA Experiment ID: 108461 Result: Up-regulated in Transcription
  misc_feature: MA Experiment 108461 PARAMETER Experiment Name: At_Germinating_Seeds_cDNA_P Parameter: Age (day) Value: 1 vs. 0
  misc_feature: MA Experiment 108461 PARAMETER Experiment Name: At_Germinating_Seeds_cDNA_P Parameter: Tissue Value: Germinating Seeds
  misc_feature: MA Experiment ID: 108462 Result: Up-regulated in Transcription
  misc_feature: MA Experiment 108462 PARAMETER Experiment Name: At_Germinating_Seeds_cDNA_P Parameter: Age (day) Value: 2 vs. 0
  misc_feature: MA Experiment 108462 PARAMETER Experiment Name: At_Germinating_Seeds_cDNA_P Parameter: Tissue Value: Germinating Seeds
  misc_feature: MA Experiment ID: 108464 Result: Up-regulated in Transcription
  misc_feature: MA Experiment 108464 PARAMETER Experiment Name: At_Germinating_Seeds_cDNA_P Parameter: Age (day) Value: 4 vs. 0
  misc_feature: MA Experiment 108464 PARAMETER Experiment Name: At_Germinating_Seeds_cDNA_P Parameter: Tissue Value: Germinating Seeds
  misc_feature: MA Experiment ID: 20000111 Result: Down-regulated in Transcription
  misc_feature: MA Experiment 20000111 PARAMETER Experiment Name: At_42deg_Heat_cDNA_P Parameter: Temperature (deg C) Value: 42 vs. 22
  misc_feature: MA Experiment 20000111 PARAMETER Experiment Name: At_42deg_Heat_cDNA_P Parameter: Timepoint (hr) Value: 6
  misc_feature: MA Experiment 20000111 PARAMETER Experiment Name: At_42deg_Heat_cDNA_P Parameter: Tissue Value: Aerial
  misc_feature: MA Experiment ID: 20000113 Result: Down-regulated in Transcription
  misc_feature: MA Experiment 20000113 PARAMETER Experiment Name: At_42deg_Heat_cDNA_P Parameter: Temperature (deg C) Value: 42 vs. 22
  misc_feature: MA Experiment 20000113 PARAMETER Experiment Name: At_42deg_Heat_cDNA_P Parameter: Timepoint (hr) Value: 8
  misc_feature: MA Experiment 20000113 PARAMETER Experiment Name: At_42deg_Heat_cDNA_P Parameter: Tissue Value: Aerial
  misc_feature: MA Experiment ID: 20000173 Result: Down-regulated in Transcription
  misc_feature: MA Experiment 20000173 PARAMETER Experiment Name: At_42deg_Heat_P Parameter: Age (day) Value: 14
  misc_feature: MA Experiment 20000173 PARAMETER Experiment Name: At_42deg_Heat_P Parameter: Organism Value: A. thaliana
  misc_feature: MA Experiment 20000173 PARAMETER Experiment Name: At_42deg_Heat_P Parameter: Plant Line Value: WS
  misc_feature: MA Experiment 20000173 PARAMETER Experiment Name: At_42deg_Heat_P Parameter: Temperature (deg C) Value: 42 vs. 22
  misc_feature: MA Experiment 20000173 PARAMETER Experiment Name: At_42deg_Heat_P Parameter: Timepoint (hr) Value: 6
  misc_feature: MA Experiment 20000173 PARAMETER Experiment Name: At_42deg_Heat_P Parameter: Tissue Value: Aerial
  misc_feature: MA Experiment ID: 20000179 Result: Up-regulated in Transcription
  misc_feature: MA Experiment 20000179 PARAMETER Experiment Name: At_Germinating_Seeds_P Parameter: Age (hr) Value: 6 vs. 0
  misc_feature: MA Experiment 20000179 PARAMETER Experiment Name: At_Germinating_Seeds_P Parameter: Tissue Value: Germinating Seeds
  misc_feature: MA Experiment ID: 20000180 Result: Up-regulated in Transcription
  misc_feature: MA Experiment 20000180 PARAMETER Experiment Name: At_Germinating_Seeds_P Parameter: Age (hr) Value: 24 vs. 0
  misc_feature: MA Experiment 20000180 PARAMETER Experiment Name: At_Germinating_Seeds_P Parameter: Tissue Value: Germinating Seeds
  misc_feature: MA Experiment ID: 20000227 Result: Up-regulated in Transcription
  misc_feature: MA Experiment 20000227 PARAMETER Experiment Name: At_Root-Tips-vs-Tops_P Parameter: Tissue Value: Root Tips vs. Root Tops
  misc_feature: MA Experiment ID: 20000437 Result: Up-regulated in Transcription
  misc_feature: MA Experiment 20000437 PARAMETER Experiment Name: At_Drought_P Parameter: Age (day) Value: 8
  misc_feature: MA Experiment 20000437 PARAMETER Experiment Name: At_Drought_P Parameter: Organism Value: A. thaliana
  misc_feature: MA Experiment 20000437 PARAMETER Experiment Name: At_Drought_P Parameter: Plant Line Value: WS
  misc_feature: MA Experiment 20000437 PARAMETER Experiment Name: At_Drought_P Parameter: Timepoint (hr) Value: 24
  misc_feature: MA Experiment 20000437 PARAMETER Experiment Name: At_Drought_P Parameter: Tissue Value: Whole Plant
  misc_feature: MA Experiment 20000437 PARAMETER Experiment Name: At_Drought_P Parameter: Treatment Value: Drought vs. No Drought
  misc_feature: MA Experiment ID: 20001248 Result: Up-regulated in Transcription
  misc_feature: MA Experiment 20001248 PARAMETER Experiment Name: At_Far-red-induction_P Parameter: Age (day) Value: 7
  misc_feature: MA Experiment 20001248 PARAMETER Experiment Name: At_Far-red-induction_P Parameter: Light Value: Far-red vs. White
  misc_feature: MA Experiment 20001248 PARAMETER Experiment Name: At_Far-red-induction_P Parameter: Organism Value: A. thaliana
  misc_feature: MA Experiment 20001248 PARAMETER Experiment Name: At_Far-red-induction_P Parameter: Plant Line Value: Columbia
  misc_feature: MA Experiment 20001248 PARAMETER Experiment Name: At_Far-red-induction_P Parameter: Timepoint (hr) Value: 4
  misc_feature: MA Experiment 20001248 PARAMETER Experiment Name: At_Far-red-induction_P Parameter: Tissue Value: Whole Plant
  misc_feature: MA Experiment ID: 20001558 Result: Down-regulated in Transcription
  misc_feature: MA Experiment 20001558 PARAMETER Experiment Name: At_Drought_Soil_Dry_P Parameter: Age (day) Value: 27
  misc_feature: MA Experiment 20001558 PARAMETER Experiment Name: At_Drought_Soil_Dry_P Parameter: Organism Value: A. thaliana
  misc_feature: MA Experiment 20001558 PARAMETER Experiment Name: At_Drought_Soil_Dry_P Parameter: Plant Line Value: WS
  misc_feature: MA Experiment 20001558 PARAMETER Experiment Name: At_Drought_Soil_Dry_P Parameter: Post Timepoint (hr) Value: 6
  misc_feature: MA Experiment 20001558 PARAMETER Experiment Name: At_Drought_Soil_Dry_P Parameter: Post-Treatment Value: Re-Water vs. No Drought
  misc_feature: MA Experiment 20001558 PARAMETER Experiment Name: At_Drought_Soil_Dry_P Parameter: Timepoint (day) Value: 13
  misc_feature: MA Experiment 20001558 PARAMETER Experiment Name: At_Drought_Soil_Dry_P Parameter: Treatment Value: Drought vs. No Drought
tttctgtcattttgatcagatccaagaaaccaaaagagtaaaacaaacacagagaagcttcttcttaaacgatgccgtactataccagagatgacaacgacgtcgacgatttcgatgagtttgatccaacgccgtacagtggtggttacgacatcacggtgatctacggccgtccgattccaccttccgatgagacttgttatcctctctcatctggtgtcgatgatgatttcgaatacgagagacctgaatttactcagatccatgagccttctgcttacggtgatgaagctcttaacacagagtacagtagctattctcgacccaagccacgacccgcatttcgacccgattcaggtggtggtggtcatgttcaaggtgaaagaccaaatcctggttatggatctgaatccggttatgggaggaaaccggaatctgagtacggatctggctatggtggacaaacggaggtggagtatggtcggagacctgagcagagttatggatctggttatggtggaaggacggagactgaatcggagtatggatctggtggtggtggaagaactgaggttgagtatggtaggagacctgaatcagggcttggatctggttatggtgggagatcggagtctgagtatgagcgtaagcctagctatggaaggtctgaggaacaagaagaaggttataggaagcctagctatggaagatctgaagaacaagaggaaggttacaggaagccaagttatggaagatctgaggagcaggaagaaggatatagaaagcctagctatggaagatctgaggaggaacaagaggaaggttataggaagcctagctatggaagatctgaggaacaagaggaaggaagttacaggaaacctagttatgggaggtctgatgatcaggtggagagttacattaagcctagctatggaagatctgaggaacaggaggagggaagttacaggaagcctagttatgggaggtctgaggaacaggaagaggggagttacaggaagcagcctagctatggccgtggcaatgacgatgatgatgatgagcagcgtaggaaccgttctggttctggtgatgatgaggaagggagctatggccgcaagaaatatggtggcaatgactctgatgaggatgaggagaagaagaagcaccgtcacaagcatcaccaccagaagcgtcgtgacgaagacgatgagtaaactaaaccctctctgtgctagagagtgtaatgagaatgtgtgtttgcttagcctcaaaaatctactaaataaagagctaagtcacatacctttctacataatatcttccgacgttggtgttgtgtttgtttgaatctctgtattattactacagagtcttcgtactggttcataataagacctttaagtggtattgggtcaccatgtaactgttgctactctgtttcgttttctatctatcgttttgtgttatgatttacttttctatccttatataattatgatgatcatttcgtgtaatatcagaatgttttttgcatgaattggaattagatggaaactttgtttaag

SEQ ID NO: 97741 - protein, 386 aa, Arabidopsis thaliana; identical to SEQ ID NO: 25082
  peptide (1)..(386): Ceres Seq. ID no. 13504990
  misc_feature (1)..(386): Homolog of NCBI NO: 18421880 NR Description: expressed protein [Arabidopsis thaliana] putative protein [Arabidopsis thaliana]

SEQ ID NO: 97742 - protein, 381 aa, Arabidopsis thaliana; identical to SEQ ID NO: 25083
  peptide (1)..(381): Ceres Seq. ID no. 13504991
  misc_feature (87)..(345): Pfam Name: High molecular weight glutenin subunit Pfam Description: High molecular weight glutenin subunit
  misc_feature (1)..(381): Homolog of NCBI NO: 9758332 NR Description: gene_id:MIJ24.6~ref|NP_013897.1~similar to protein [Arabidopsis thaliana] >gi|16604364|gb|AAL24188.1| [Arabidopsis thaliana] >gi|23308191|gb|AAN18065.1|
  misc_feature (1)..(381): Homolog of NCBI NO: 24417262 NR Description: unknown [Arabidopsis thaliana]
  misc_feature (1)..(279): Homolog of NCBI NO: 15228587 NR Description: glycine-rich protein [Arabidopsis thaliana]
  misc_feature (1)..(246): Homolog of NCBI NO: 21928162 NR Description: AT3g29075/MXE2_1 [Arabidopsis thaliana]
  misc_feature (97)..(327): Homolog of NCBI NO: 12580871 NR Description: hypothetical protein [Picea abies]
  misc_feature (69)..(359): Homolog of NCBI NO: 171388 NR Description: DDR48 stress protein
  misc_feature (69)..(359): Homolog of NCBI NO: 6323826 NR Description: DNA damage inducible; implicated in the
  misc_feature (51)..(356): Homolog of NCBI NO: 15228587 NR Description: glycine-rich protein [Arabidopsis thaliana]
  misc_feature (55)..(381): Homolog of NCBI NO: 9837379 NR Description: retinitis pigmentosa GTPase regulator [Homo
  misc_feature (163)..(378): Homolog of NCBI NO: 12580871 NR Description: hypothetical protein [Picea abies]

SEQ ID NO: 97743 - protein, 375 aa, Arabidopsis thaliana; identical to SEQ ID NO: 25084
  peptide (1)..(375): Ceres Seq. ID no. 13504992
  misc_feature (1)..(375): Homolog of NCBI NO: 18421880 NR Description: expressed protein [Arabidopsis thaliana] putative protein [Arabidopsis thaliana]

SEQ ID NO: 97744 - DNA, 1051 bp, Arabidopsis thaliana
  misc_feature (1)..(1051): Ceres Seq. ID no. 13505015
  misc_feature: MA Experiment ID: 108434 Result: Down-regulated in Transcription
  misc_feature: MA Experiment 108434 PARAMETER Experiment Name: At_Root_Tips_cDNA_P Parameter: Tissue Value: Root Tips
  misc_feature: MA Experiment ID: 108461 Result: Up-regulated in Transcription
  misc_feature: MA Experiment 108461 PARAMETER Experiment Name: At_Germinating_Seeds_cDNA_P Parameter: Age (day) Value: 1 vs. 0
  misc_feature: MA Experiment 108461 PARAMETER Experiment Name: At_Germinating_Seeds_cDNA_P Parameter: Tissue Value: Germinating Seeds
  misc_feature: MA Experiment ID: 108462 Result: Up-regulated in Transcription
  misc_feature: MA Experiment 108462 PARAMETER Experiment Name: At_Germinating_Seeds_cDNA_P Parameter: Age (day) Value: 2 vs. 0
  misc_feature: MA Experiment 108462 PARAMETER Experiment Name: At_Germinating_Seeds_cDNA_P Parameter: Tissue Value: Germinating Seeds
  misc_feature: MA Experiment ID: 108464 Result: Up-regulated in Transcription
  misc_feature: MA Experiment 108464 PARAMETER Experiment Name: At_Germinating_Seeds_cDNA_P Parameter: Age (day) Value: 4 vs. 0
  misc_feature: MA Experiment 108464 PARAMETER Experiment Name: At_Germinating_Seeds_cDNA_P Parameter: Tissue Value: Germinating Seeds
  misc_feature: MA Experiment ID: 108488 Result: Up-regulated in Transcription
  misc_feature: MA Experiment ID: 108489 Result: Down-regulated in Transcription
  misc_feature: MA Experiment ID: 108595 Result: Down-regulated in Transcription
  misc_feature: MA Experiment 108595 PARAMETER Experiment Name: At_Ler-pi_Ovule_cDNA_P Parameter: Plant Line Value: null
  misc_feature: MA Experiment ID: 20000180 Result: Up-regulated in Transcription
  misc_feature: MA Experiment 20000180 PARAMETER Experiment Name: At_Germinating_Seeds_P Parameter: Age (hr) Value: 24 vs. 0
  misc_feature: MA Experiment 20000180 PARAMETER Experiment Name: At_Germinating_Seeds_P Parameter: Tissue Value: Germinating Seeds
  misc_feature: MA Experiment ID: 20000185 Result: Down-regulated in Transcription
  misc_feature: MA Experiment 20000185 PARAMETER Experiment Name: At_Roots__P Parameter: Age (day) Value: 7 vs. 21
  misc_feature: MA Experiment 20000185 PARAMETER Experiment Name: At_Roots__P Parameter: Organism Value: A. thaliana
  misc_feature: MA Experiment 20000185 PARAMETER Experiment Name: At_Roots__P Parameter: Tissue Value: Roots vs. Whole Plant
  misc_feature: MA Experiment ID: 20000227 Result: Down-regulated in Transcription
  misc_feature: MA Experiment 20000227 PARAMETER Experiment Name: At_Root-Tips-vs-Tops_P Parameter: Tissue Value: Root Tips vs. Root Tops
  misc_feature: MA Experiment ID: 20000439 Result: Down-regulated in Transcription
  misc_feature: MA Experiment 20000439 PARAMETER Experiment Name: At_Roots__P Parameter: Age (day) Value: 14 vs. 21
  misc_feature: MA Experiment 20000439 PARAMETER Experiment Name: At_Roots__P Parameter: Organism Value: A. thaliana
  misc_feature: MA Experiment 20000439 PARAMETER Experiment Name: At_Roots__P Parameter: Tissue Value: Roots vs. Whole Plant
  misc_feature: MA Experiment ID: 20000794 Result: Down-regulated in Transcription
  misc_feature: MA Experiment 20000794 PARAMETER Experiment Name: At_Petals_P Parameter: Age (day) Value: 23-25 days
  misc_feature: MA Experiment 20000794 PARAMETER Experiment Name: At_Petals_P Parameter: Plant Line Value: WS
  misc_feature: MA Experiment 20000794 PARAMETER Experiment Name: At_Petals_P Parameter: Tissue Value: Petals vs. Whole plant
  misc_feature: MA Experiment ID: 20001450 Result: Up-regulated in Transcription
  misc_feature: MA Experiment 20001450 PARAMETER Experiment Name: At_Far-red-induction_P Parameter: Age (day) Value: 7
  misc_feature: MA Experiment 20001450 PARAMETER Experiment Name: At_Far-red-induction_P Parameter: Light Value: Far-red vs. White
  misc_feature: MA Experiment 20001450 PARAMETER Experiment Name: At_Far-red-induction_P Parameter: Organism Value: A. thaliana
  misc_feature: MA Experiment 20001450 PARAMETER Experiment Name: At_Far-red-induction_P Parameter: Plant Line Value: Columbia
  misc_feature: MA Experiment 20001450 PARAMETER Experiment Name: At_Far-red-induction_P Parameter: Timepoint (hr) Value: 8
  misc_feature: MA Experiment 20001450 PARAMETER Experiment Name: At_Far-red-induction_P Parameter: Tissue Value: Whole Plant
  misc_feature: MA Experiment ID: 20001451 Result: Up-regulated in Transcription
  misc_feature: MA Experiment 20001451 PARAMETER Experiment Name: At_Far-red-induction_P Parameter: Age (day) Value: 7
  misc_feature: MA Experiment 20001451 PARAMETER Experiment Name: At_Far-red-induction_P Parameter: Light Value: Far-red vs. White
  misc_feature: MA Experiment 20001451 PARAMETER Experiment Name: At_Far-red-induction_P Parameter: Organism Value: A. thaliana
  misc_feature: MA Experiment 20001451 PARAMETER Experiment Name: At_Far-red-induction_P Parameter: Plant Line Value: Columbia
  misc_feature: MA Experiment 20001451 PARAMETER Experiment Name: At_Far-red-induction_P Parameter: Timepoint (hr) Value: 24
  misc_feature: MA Experiment 20001451 PARAMETER Experiment Name: At_Far-red-induction_P Parameter: Tissue Value: Whole Plant
  misc_feature: MA Experiment ID: 20001757 Result: Up-regulated in Transcription
  misc_feature: MA Experiment 20001757 PARAMETER Experiment Name: At_50mM_NH4NO3_L-to-H_P Parameter: Timepoint (hr) Value: 6
  misc_feature: MA Experiment 20001757 PARAMETER Experiment Name: At_50mM_NH4NO3_L-to-H_P Parameter: Tissue Value: Leaf
  misc_feature: MA Experiment 20001757 PARAMETER Experiment Name: At_50mM_NH4NO3_L-to-H_P Parameter: Treatment Value: 50mM NH4NO3 vs 100mM Mannitol
atcaataccaaaccacccatttcttggcttacaacaacaaatcttaaacgttttactttgtgctgcactactcaacctcaatggccgcctcaacaatggctctctcctcccctgccttcgccggtaaggccgtcaagctttcccccgcggcatctgaagtccttggaagcggccgtgtgacaatgaggaagactgttgccaagccaaagggcccatcaggcagcccatggtacggatctgaccgtgtcaagtacttgggtccattctctggcgaatcaccgagctaccttaccggagagttccccggagactacggatgggacaccgccggactttcagctgaccccgagacattcgcaaggaaccgtgaactagaagttatccacagcaggtgggccatgctcggagccctaggctgcgtcttccctgagcttttggctagaaacggagtcaagttcggagaggcggtttggttcaaggccggttcacagatcttcagcgatggagggctcgattacttgggaaaccctagcttggttcacgctcagagcattttggccatttgggccacacaagttattttgatgggagccgttgaaggctacagagtcgcaggaaatgggccattgggagaggccgaggacttgctttaccccggtggcagcttcgacccattgggtttggctaccgacccagaggcattcgctgagttgaaggtgaaggagctcaagaacggaagattggctatgttctctatgtttggattcttcgttcaagccatcgtcactggtaagggaccgatagagaaccttgctgaccatttggccgatccagttaacaacaacgcatgggccttcgccaccaactttgttcccggaaagtgagccaagttttatctgtattttgcttcagtctttgcttcgtgagtgtgagaggagaaagagagcttgtttagatgtaaaatttgcaagactttgtatttttttcattaatcaaataactcgtttttctctcaaattatctggcaattaccaaattggattcgttttat

SEQ ID NO: 97745 - protein, 267 aa, Arabidopsis thaliana; identical to SEQ ID NO: 22639
  peptide (1)..(267): Ceres Seq. ID no. 13505016
  misc_feature (65)..(234): Pfam Name: Chlorophyll A-B binding protein Pfam Description: Chlorophyll A-B binding protein
  misc_feature (1)..(267): Homolog of NCBI NO: 15220615 NR Description: light-harvesting chlorophyll a/b binding protein
  misc_feature (1)..(267): Homolog of NCBI NO: 18397286 NR Description: photosystem II type I chlorophyll a /b binding putative [Arabidopsis thaliana] >gi|18397288|ref|NP_564340.1|
  misc_feature (1)..(267): Homolog of NCBI NO: 17473828 NR Description: chlorophyll a/b-binding protein [Arabidopsis
  misc_feature (1)..(267): Homolog of NCBI NO: 18403546 NR Description: photosystem II type I chlorophyll a /b binding
  misc_feature (1)..(267): Homolog of NCBI NO: 115778 NR Description: Chlorophyll A-B binding protein 1, chloroplast
  misc_feature (1)..(267): Homolog of NCBI NO: 18403549 NR Description: photosystem II type I chlorophyll a /b binding
  misc_feature (1)..(267): Homolog of NCBI NO: 18266039 NR Description: chlorophyll a/b binding protein [Brassica
  misc_feature (1)..(267): Homolog of NCBI NO: 21592428 NR Description: putative photosystem II type I chlorophyll a b
  misc_feature (19)..(267): Homolog of NCBI NO: 12324161 NR Description: chlorophyll A-B-binding protein 2 precursor, 5'
  misc_feature (1)..(267): Homolog of NCBI NO: 115819 NR Description: Chlorophyll A-B binding protein 1B, chloroplast

SEQ ID NO: 97746 - protein, 262 aa, Arabidopsis thaliana; identical to SEQ ID NO: 22640
  peptide (1)..(262): Ceres Seq. ID no. 13505017
  misc_feature (60)..(229): Pfam Name: Chlorophyll A-B binding protein Pfam Description: Chlorophyll A-B binding protein
  misc_feature (1)..(262): Homolog of NCBI NO: 15220615 NR Description: light-harvesting chlorophyll a/b binding protein
  misc_feature (1)..(262): Homolog of NCBI NO: 18397286 NR Description: photosystem II type I chlorophyll a /b binding putative [Arabidopsis thaliana] >gi|18397288|ref|NP_564340.1|
  misc_feature (1)..(262): Homolog of NCBI NO: 17473828 NR Description: chlorophyll a/b-binding protein [Arabidopsis
  misc_feature (1)..(262): Homolog of NCBI NO: 18403546 NR Description: photosystem II type I chlorophyll a /b binding
  misc_feature (1)..(262): Homolog of NCBI NO: 115778 NR Description: Chlorophyll A-B binding protein 1, chloroplast
  misc_feature (1)..(262): Homolog of NCBI NO: 18403549 NR Description: photosystem II type I chlorophyll a /b binding
  misc_feature (1)..(262): Homolog of NCBI NO: 18266039 NR Description: chlorophyll a/b binding protein [Brassica
  misc_feature (1)..(262): Homolog of NCBI NO: 21592428 NR Description: putative photosystem II type I chlorophyll a b
  misc_feature (14)..(262): Homolog of NCBI NO: 12324161 NR Description: chlorophyll A-B-binding protein 2 precursor, 5'
  misc_feature (1)..(262): Homolog of NCBI NO: 115819 NR Description: Chlorophyll A-B binding protein 1B, chloroplast

SEQ ID NO: 97747 - protein, 233 aa, Arabidopsis thaliana; identical to SEQ ID NO: 21214
  peptide (1)..(233): Ceres Seq. ID no. 13505018
  misc_feature (31)..(200): Pfam Name: Chlorophyll A-B binding protein Pfam Description: Chlorophyll A-B binding protein
  misc_feature (1)..(233): Homolog of NCBI NO: 15220615 NR Description: light-harvesting chlorophyll a/b binding protein
  misc_feature (1)..(233): Homolog of NCBI NO: 18397286 NR Description: photosystem II type I chlorophyll a /b binding putative [Arabidopsis thaliana] >gi|18397288|ref|NP_564340.1|
  misc_feature (1)..(233): Homolog of NCBI NO: 17473828 NR Description: chlorophyll a/b-binding protein [Arabidopsis
  misc_feature (1)..(233): Homolog of NCBI NO: 18403546 NR Description: photosystem II type I chlorophyll a /b binding
  misc_feature (1)..(233): Homolog of NCBI NO: 115778 NR Description: Chlorophyll A-B binding protein 1, chloroplast
  misc_feature (1)..(233): Homolog of NCBI NO: 18403549 NR Description: photosystem II type I chlorophyll a /b binding
  misc_feature (1)..(233): Homolog of NCBI NO: 18266039 NR Description: chlorophyll a/b binding protein [Brassica
  misc_feature (1)..(233): Homolog of NCBI NO: 21592428 NR Description: putative photosystem II type I chlorophyll a b
  misc_feature (1)..(233): Homolog of NCBI NO: 12324161 NR Description: chlorophyll A-B-binding protein 2 precursor, 5'
  misc_feature (1)..(233): Homolog of NCBI NO: 115819 NR Description: Chlorophyll A-B binding protein 1B, chloroplast

SEQ ID NO: 97748 - DNA, 1597 bp, Arabidopsis thaliana
  misc_feature (1)..(1597): Ceres Seq. ID no. 13508963
  misc_feature: MA Experiment ID: 20000173 Result: Down-regulated in Transcription
  misc_feature: MA Experiment 20000173 PARAMETER Experiment Name: At_42deg_Heat_P Parameter: Age (day) Value: 14
  misc_feature: MA Experiment 20000173 PARAMETER Experiment Name: At_42deg_Heat_P Parameter: Organism Value: A. thaliana
  misc_feature: MA Experiment 20000173 PARAMETER Experiment Name: At_42deg_Heat_P Parameter: Plant Line Value: WS
  misc_feature: MA Experiment 20000173 PARAMETER Experiment Name: At_42deg_Heat_P Parameter: Temperature (deg C) Value: 42 vs. 22
  misc_feature: MA Experiment 20000173 PARAMETER Experiment Name: At_42deg_Heat_P Parameter: Timepoint (hr) Value: 6
  misc_feature: MA Experiment 20000173 PARAMETER Experiment Name: At_42deg_Heat_P Parameter: Tissue Value: Aerial
  misc_feature: MA Experiment ID: 20000184 Result: Down-regulated in Transcription
  misc_feature: MA Experiment 20000184 PARAMETER Experiment Name: At_Shoots__P Parameter: Age (day) Value: 7
  misc_feature: MA Experiment 20000184 PARAMETER Experiment Name: At_Shoots__P Parameter: Tissue Value: Shoots vs. Whole Plant
  misc_feature: MA Experiment ID: 20000495 Result: Up-regulated in Transcription
  misc_feature: MA Experiment 20000495 PARAMETER Experiment Name: At_Guard_Cells_P Parameter: Harvest Date Value: 8/2/2002
  misc_feature: MA Experiment 20000495 PARAMETER Experiment Name: At_Guard_Cells_P Parameter: Organism Value: A. thaliana
  misc_feature: MA Experiment 20000495 PARAMETER Experiment Name: At_Guard_Cells_P Parameter: Tissue Value: Guard Cells vs. Leaves
  misc_feature: MA Experiment ID: 20000496 Result: Up-regulated in Transcription
  misc_feature: MA Experiment 20000496 PARAMETER Experiment Name: At_Guard_Cells_P Parameter: Harvest Date Value: 7/19/2002
  misc_feature: MA Experiment 20000496 PARAMETER Experiment Name: At_Guard_Cells_P Parameter: Organism Value: Canola
  misc_feature: MA Experiment 20000496 PARAMETER Experiment Name: At_Guard_Cells_P Parameter: Tissue Value: Guard Cells vs. Leaves
  misc_feature: MA Experiment ID: 20000794 Result: Down-regulated in Transcription
  misc_feature: MA Experiment 20000794 PARAMETER Experiment Name: At_Petals_P Parameter: Age (day) Value: 23-25 days
  misc_feature: MA Experiment 20000794 PARAMETER Experiment Name: At_Petals_P Parameter: Plant Line Value: WS
  misc_feature: MA Experiment 20000794 PARAMETER Experiment Name: At_Petals_P Parameter: Tissue Value: Petals vs. Whole plant
  misc_feature: MA Experiment ID: 20001911 Result: Down-regulated in Transcription
  misc_feature: MA Experiment 20001911 PARAMETER Experiment Name: At_Drought_Reproduction_P Parameter: Age (day) Value: 40
  misc_feature: MA Experiment 20001911 PARAMETER Experiment Name: At_Drought_Reproduction_P Parameter: Organism Value: A. thaliana
  misc_feature: MA Experiment 20001911 PARAMETER Experiment Name: At_Drought_Reproduction_P Parameter: Plant Line Value: WS
  misc_feature: MA Experiment 20001911 PARAMETER Experiment Name: At_Drought_Reproduction_P Parameter: Timepoint (day) Value: 10
  misc_feature: MA Experiment 20001911 PARAMETER Experiment Name: At_Drought_Reproduction_P Parameter: Tissue Value: Flowers
  misc_feature: MA Experiment 20001911 PARAMETER Experiment Name: At_Drought_Reproduction_P Parameter: Treatment Value: Drought vs. No Drought
acccagtctggagtctggccattgggattaaactaacttctcattctcattccaccttcttcttctttgttcttgtgtgctactaaaaatcaagaaagcacaaggagacaaataaacctatccatttcattaccaaacaagccgtacattctctagttatggcttcttcttcttcttcttcttcaactacttcaaccatcacatccaaatttattgggcttatgcttcttctctctcttcaactagacttattactcggatcagctattcatcttaaaaaccaaacttcattcagacccaacagggagattcagaagcttagaagagtggaagcatatctcagcaaaatcaacaaaccttccatcaaaacaatccacagcccagacggagatgtaatagaatgtgtaccgtctcatttacaacccgcatttgatcatcctcagctacaaggccagaaaccacttgactcaccttacaggccaagtaaaggaaatgaaacaacatatgaggaaagttttaatcagttatggagtatgtccggtgaaagttgtccaattgggtcaataccaattagaaaaacaacaaagaatgatgttttaagggcaaattcagttcgacggtttggtcggaaattaagaagacccattagacgagattcatccggaggtggtcacgagcatgcggtggtgtttgtaaatggagaacaatactatggagctaaagcaagcattaacgtgtgggcgccacgtgtcactgatgcttatgagtttagtttatctcagatttggctcatctctggatcctttggtcatgacctaaacaccattgaagctggttggcaggttagtcctgaactatacggagataattatccaagattcttcacatattggacgactgatgcataccaagcaactgggtgctacaatttactctgctctggattcgtacaaaccaacaataaaattgcaattggtgcagcgatttccccgaggtcctcttataatggaagacagtttgatatcggtttaatgatttggaaggatccaaaacatgggcactggtggcttgaactagggaatggacttcttgtgggatactggccagctttcttgttcagtcacttgaggagtcatgcaagtatggtacaatttggcggcgaagttgtgaacagccgatcaagcggtgctcacaccggaacacagatgggaagcggccatttcgcagatgaagggtttgagaaagctgcctactttaggaatttacaagttgttgactgggacaacaatctcttgcctctgaagaatctccatgtcttggccgatcaccccgcttgttatgacatcagacaaggcaaaaacaatgtatgggggacttatttttactatggagggcctggtcggaacccaaggtgtccttgactcacccaaacagaaatataaaaaatatttgatgtgaatttatgttatttttctgttactagattttttatttcttcttagatttttttttttttggtgtttgtaaggctgttactaataaaacagtttgtggttctactgtatttttttgacgtgatgaaatagataacttttat

SEQ ID NO: 97749 - protein, 420 aa, Arabidopsis thaliana
  peptide (1)..(420): Ceres Seq. ID no. 13508964
  misc_feature (184)..(379): Pfam Name: Arabidopsis proteins of unknown function Pfam Description: Arabidopsis proteins of unknown function
  misc_feature (1)..(420): Homolog of NCBI NO: 15240622 NR Description: expressed protein [Arabidopsis thaliana] AT5g50150/MPF21_17 [Arabidopsis thaliana]
  misc_feature (1)..(420): Homolog of NCBI NO: 21389708 NR Description: putative carboxyl-terminal proteinase [Gossypium
  misc_feature (1)..(420): Homolog of NCBI NO: 30698726 NR Description: expressed protein [Arabidopsis thaliana]
  misc_feature (13)..(420): Homolog of NCBI NO: 15220207 NR Description: expressed protein [Arabidopsis thaliana]
  misc_feature (15)..(420): Homolog of NCBI NO: 25345697 NR Description: unknown protein F5A18.27 [imported] - Arabidopsis
  misc_feature (15)..(420): Homolog of NCBI NO: 28416687 NR Description: At1g70550 [Arabidopsis thaliana]
  misc_feature (11)..(420): Homolog of NCBI NO: 30688348 NR Description: expressed protein [Arabidopsis thaliana] unknown protein [Arabidopsis thaliana]
  misc_feature (128)..(420): Homolog of NCBI NO: 6573746 NR Description: F20B24.18 [Arabidopsis thaliana]
  misc_feature (13)..(102): Homolog of NCBI NO: 6573746 NR Description: F20B24.18 [Arabidopsis thaliana]
  misc_feature (11)..(420): Homolog of NCBI NO: 25345695 NR Description: protein F26F24.22 [imported] - Arabidopsis >gi|9295704|gb|AAF87010.1|AC005292_19 F26F24.22 [Arabidopsis
MASSSSSSSTTSTITSKFIGLMLLLSLQLDLLLGSAIHLKNQTSFRPNREIQKLRRVEAYLSKINKPSIKTIHSPDGDVIECVPSHLQPAFDHPQLQGQKPLDSPYRPSKGNETTYEESFNQLWSMSGESCPIGSIPIRKTTKNDVLRANSVRRFGRKLRRPIRRDSSGGGHEHAVVFVNGEQYYGAKASINVWAPRVTDAYEFSLSQIWLISGSFGHDLNTIEAGWQVSPELYGDNYPRFFTYWTTDAYQATGCYNLLCSGFVQTNNKIAIGAAISPRSSYNGRQFDIGLMIWKDPKHGHWWLELGNGLLVGYWPAFLFSHLRSHASMVQFGGEVVNSRSSGAHTGTQMGSGHFADEGFEKAAYFRNLQVVDWDNNLLPLKNLHVLADHPACYDIRQGKNNVWGTYFYYGGPGRNPRCP

SEQ ID NO: 97750 - protein, 399 aa, Arabidopsis thaliana
  peptide (1)..(399): Ceres Seq. ID no. 13508965
  misc_feature (163)..(358): Pfam Name: Arabidopsis proteins of unknown function Pfam Description: Arabidopsis proteins of unknown function
  misc_feature (1)..(399): Homolog of NCBI NO: 15240622 NR Description: expressed protein [Arabidopsis thaliana] AT5g50150/MPF21_17 [Arabidopsis thaliana]
  misc_feature (1)..(399): Homolog of NCBI NO: 21389708 NR Description: putative carboxyl-terminal proteinase [Gossypium
  misc_feature (1)..(399): Homolog of NCBI NO: 30698726 NR Description: expressed protein [Arabidopsis thaliana]
  misc_feature (1)..(399): Homolog of NCBI NO: 15220207 NR Description: expressed protein [Arabidopsis thaliana]
  misc_feature (1)..(399): Homolog of NCBI NO: 25345697 NR Description: unknown protein F5A18.27 [imported] - Arabidopsis
  misc_feature (1)..(399): Homolog of NCBI NO: 28416687 NR Description: At1g70550 [Arabidopsis thaliana]
  misc_feature (1)..(399): Homolog of NCBI NO: 30688348 NR Description: expressed protein [Arabidopsis thaliana] unknown protein [Arabidopsis thaliana]
  misc_feature (107)..(399): Homolog of NCBI NO: 6573746 NR Description: F20B24.18 [Arabidopsis thaliana]
  misc_feature (1)..(81): Homolog of NCBI NO: 6573746 NR Description: F20B24.18 [Arabidopsis thaliana]
  misc_feature (1)..(399): Homolog of NCBI NO: 25345695 NR Description: protein F26F24.22 [imported] - Arabidopsis >gi|9295704|gb|AAF87010.1|AC005292_19 F26F24.22 [Arabidopsis
MLLLSLQLDLLLGSAIHLKNQTSFRPNREIQKLRRVEAYLSKINKPSIKTIHSPDGDVIECVPSHLQPAFDHPQLQGQKPLDSPYRPSKGNETTYEESFNQLWSMSGESCPIGSIPIRKTTKNDVLRANSVRRFGRKLRRPIRRDSSGGGHEHAVVFVNGEQYYGAKASINVWAPRVTDAYEFSLSQIWLISGSFGHDLNTIEAGWQVSPELYGDNYPRFFTYWTTDAYQATGCYNLLCSGFVQTNNKIAIGAAISPRSSYNGRQFDIGLMIWKDPKHGHWWLELGNGLLVGYWPAFLFSHLRSHASMVQFGGEVVNSRSSGAHTGTQMGSGHFADEGFEKAAYFRNLQVVDWDNNLLPLKNLHVLADHPACYDIRQGKNNVWGTYFYYGGPGRNPRCP

SEQ ID NO: 97751 - protein, 295 aa, Arabidopsis thaliana
  peptide (1)..(295): Ceres Seq. ID no. 13508966
  misc_feature (59)..(254): Pfam Name: Arabidopsis proteins of unknown function Pfam Description: Arabidopsis proteins of unknown function
  misc_feature (1)..(295): Homolog of NCBI NO: 15240622 NR Description: expressed protein [Arabidopsis thaliana] AT5g50150/MPF21_17 [Arabidopsis thaliana]
  misc_feature (1)..(295): Homolog of NCBI NO: 21389708 NR Description: putative carboxyl-terminal proteinase [Gossypium
  misc_feature (1)..(295): Homolog of NCBI NO: 30698726 NR Description: expressed protein [Arabidopsis thaliana]
  misc_feature (1)..(295): Homolog of NCBI NO: 15220207 NR Description: expressed protein [Arabidopsis thaliana]
  misc_feature (1)..(295): Homolog of NCBI NO: 25345697 NR Description: unknown protein F5A18.27 [imported] - Arabidopsis
  misc_feature (1)..(295): Homolog of NCBI NO: 28416687 NR Description: At1g70550 [Arabidopsis thaliana]
  misc_feature (1)..(295): Homolog of NCBI NO: 30688348 NR Description: expressed protein [Arabidopsis thaliana] unknown protein [Arabidopsis thaliana]
  misc_feature (3)..(295): Homolog of NCBI NO: 6573746 NR Description: F20B24.18 [Arabidopsis thaliana]
  misc_feature (1)..(295): Homolog of NCBI NO: 25345695 NR Description: protein F26F24.22 [imported] - Arabidopsis >gi|9295704|gb|AAF87010.1|AC005292_19 F26F24.22 [Arabidopsis
  misc_feature (1)..(294): Homolog of NCBI NO: 34913794 NR Description: OSJNBa0026J14.25 [Oryza sativa (japonica
MSGESCPIGSIPIRKTTKNDVLRANSVRRFGRKLRRPIRRDSSGGGHEHAVVFVNGEQYYGAKASINVWAPRVTDAYEFSLSQIWLISGSFGHDLNTIEAGWQVSPELYGDNYPRFFTYWTTDAYQATGCYNLLCSGFVQTNNKIAIGAAISPRSSYNGRQFDIGLMIWKDPKHGHWWLELGNGLLVGYWPAFLFSHLRSHASMVQFGGEVVNSRSSGAHTGTQMGSGHFADEGFEKAAYFRNLQVVDWDNNLLPLKNLHVLADHPACYDIRQGKNNVWGTYFYYGGPGRNPRCP

SEQ ID NO: 97752 - DNA, 1291 bp, Arabidopsis thaliana
  misc_feature (1)..(1291): Ceres Seq. ID no. 13509025
  misc_feature: MA Experiment ID: 108434 Result: Down-regulated in Transcription
  misc_feature: MA Experiment 108434 PARAMETER Experiment Name: At_Root_Tips_cDNA_P Parameter: Tissue Value: Root Tips
  misc_feature: MA Experiment ID: 108488 Result: Down-regulated in Transcription
  misc_feature: MA Experiment ID: 108585 Result: Up-regulated in Transcription
  misc_feature: MA Experiment 108585 PARAMETER Experiment Name: At_5mM_NaNP_cDNA_P Parameter: Timepoint (hr) Value: 6
  misc_feature: MA Experiment 108585 PARAMETER Experiment Name: At_5mM_NaNP_cDNA_P Parameter: Tissue Value: Aerial
  misc_feature: MA Experiment 108585 PARAMETER Experiment Name: At_5mM_NaNP_cDNA_P Parameter: Treatment Value: null
  misc_feature: MA Experiment ID: 108594 Result: Up-regulated in Transcription
  misc_feature: MA Experiment 108594 PARAMETER Experiment Name: At_Ler-rhl_Root_cDNA_P Parameter: Plant Line Value: null
  misc_feature: MA Experiment ID: 20000111 Result: Down-regulated in Transcription
  misc_feature: MA Experiment 20000111 PARAMETER Experiment Name: At_42deg_Heat_cDNA_P Parameter: Temperature (deg C) Value: 42 vs. 22
  misc_feature: MA Experiment 20000111 PARAMETER Experiment Name: At_42deg_Heat_cDNA_P Parameter: Timepoint (hr) Value: 6
  misc_feature: MA Experiment 20000111 PARAMETER Experiment Name: At_42deg_Heat_cDNA_P Parameter: Tissue Value: Aerial
  misc_feature: MA Experiment ID: 20000173 Result: Down-regulated in Transcription
  misc_feature: MA Experiment 20000173 PARAMETER Experiment Name: At_42deg_Heat_P Parameter: Age (day) Value: 14
  misc_feature: MA Experiment 20000173 PARAMETER Experiment Name: At_42deg_Heat_P Parameter: Organism Value: A. thaliana
  misc_feature: MA Experiment 20000173 PARAMETER Experiment Name: At_42deg_Heat_P Parameter: Plant Line Value: WS
  misc_feature: MA Experiment 20000173 PARAMETER Experiment Name: At_42deg_Heat_P Parameter: Temperature (deg C) Value: 42 vs. 22
  misc_feature: MA Experiment 20000173 PARAMETER Experiment Name: At_42deg_Heat_P Parameter: Timepoint (hr) Value: 6
  misc_feature: MA Experiment 20000173 PARAMETER Experiment Name: At_42deg_Heat_P Parameter: Tissue Value: Aerial
  misc_feature: MA Experiment ID: 20000182 Result: Up-regulated in Transcription
  misc_feature: MA Experiment 20000182 PARAMETER Experiment Name: At_2mM_SA_P Parameter: Age (day) Value: 14
  misc_feature: MA Experiment 20000182 PARAMETER Experiment Name: At_2mM_SA_P Parameter: Organism Value: A. thaliana
  misc_feature: MA Experiment 20000182 PARAMETER Experiment Name: At_2mM_SA_P Parameter: Plant Line Value: WS
  misc_feature: MA Experiment 20000182 PARAMETER Experiment Name: At_2mM_SA_P Parameter: Timepoint (hr) Value: 6
  misc_feature: MA Experiment 20000182 PARAMETER Experiment Name: At_2mM_SA_P Parameter: Tissue Value: Aerial
  misc_feature: MA Experiment 20000182 PARAMETER Experiment Name: At_2mM_SA_P Parameter: Treatment Value: 2mM SA vs. No Treatment
  misc_feature: MA Experiment ID: 20000184 Result: Down-regulated in Transcription
  misc_feature: MA Experiment 20000184 PARAMETER Experiment Name: At_Shoots__P Parameter: Age (day) Value: 7
  misc_feature: MA Experiment 20000184 PARAMETER Experiment Name: At_Shoots__P Parameter: Tissue Value: Shoots vs. Whole Plant
  misc_feature: MA Experiment ID: 20000234 Result: Down-regulated in Transcription
  misc_feature: MA Experiment 20000234 PARAMETER Experiment Name: At_Siliques_P Parameter: Age (day) Value: 21
  misc_feature: MA Experiment 20000234 PARAMETER Experiment Name: At_Siliques_P Parameter: Organism Value: A. thaliana
  misc_feature: MA Experiment 20000234 PARAMETER Experiment Name: At_Siliques_P Parameter: Plant Line Value: WS
  misc_feature: MA Experiment 20000234 PARAMETER Experiment Name: At_Siliques_P Parameter: Tissue Value: Less Than 5mm Siliques vs. Whole Plant
  misc_feature: MA Experiment ID: 20000235 Result: Down-regulated in Transcription
  misc_feature: MA Experiment 20000235 PARAMETER Experiment Name: At_Siliques_P Parameter: Age (day) Value: 21
  misc_feature: MA Experiment 20000235 PARAMETER Experiment Name: At_Siliques_P Parameter: Organism Value: A. thaliana
  misc_feature: MA Experiment 20000235 PARAMETER Experiment Name: At_Siliques_P Parameter: Plant Line Value: WS
  misc_feature: MA Experiment 20000235 PARAMETER Experiment Name: At_Siliques_P Parameter: Tissue Value: 5-10mm Siliques vs. Whole Plant
  misc_feature: MA Experiment ID: 20000264 Result: Down-regulated in Transcription
  misc_feature: MA Experiment 20000264 PARAMETER Experiment Name: At_Open_Flower_P Parameter: Age (day) Value: 21
  misc_feature: MA Experiment 20000264 PARAMETER Experiment Name: At_Open_Flower_P Parameter: Plant Line Value: WS
  misc_feature: MA Experiment 20000264 PARAMETER Experiment Name: At_Open_Flower_P Parameter: Tissue Value: Open Flower vs. Whole Plant
  misc_feature: MA Experiment ID: 20000265 Result: Down-regulated in Transcription
  misc_feature: MA Experiment 20000265 PARAMETER Experiment Name: At_Open_Flower_P Parameter: Age (day) Value: 21
  misc_feature: MA Experiment 20000265 PARAMETER Experiment Name: At_Open_Flower_P Parameter: Plant Line Value: WS
  misc_feature: MA Experiment 20000265 PARAMETER Experiment Name: At_Open_Flower_P Parameter: Tissue Value: Closed Flower vs. Whole Plant
  misc_feature: MA Experiment ID: 20000286 Result: Down-regulated in Transcription
  misc_feature: MA Experiment 20000286 PARAMETER Experiment Name: At_Open_Flower_P Parameter: Age (day) Value: 21
  misc_feature: MA Experiment 20000286 PARAMETER Experiment Name: At_Open_Flower_P Parameter: Plant Line Value: WS
  misc_feature: MA Experiment 20000286 PARAMETER Experiment Name: At_Open_Flower_P Parameter: Tissue Value: Half Open vs. Whole Plant
  misc_feature: MA Experiment ID: 20000438 Result: Down-regulated in Transcription
  misc_feature: MA Experiment 20000438 PARAMETER Experiment Name: At_Shoots__P Parameter: Age (day) Value: 14
  misc_feature: MA Experiment 20000438 PARAMETER Experiment Name: At_Shoots__P Parameter: Tissue Value: Shoots vs. Whole Plant
  misc_feature: MA Experiment ID: 20001247 Result: Up-regulated in Transcription
  misc_feature: MA Experiment 20001247 PARAMETER Experiment Name: At_Far-red-induction_P Parameter: Age (day) Value: 7
  misc_feature: MA Experiment 20001247 PARAMETER Experiment Name: At_Far-red-induction_P Parameter: Light Value: Far-red vs. White
  misc_feature: MA Experiment 20001247 PARAMETER Experiment Name: At_Far-red-induction_P Parameter: Organism Value: A. thaliana
  misc_feature: MA Experiment 20001247 PARAMETER Experiment Name: At_Far-red-induction_P Parameter: Plant Line Value: Columbia
  misc_feature: MA Experiment 20001247 PARAMETER Experiment Name: At_Far-red-induction_P Parameter: Timepoint (hr) Value: 1
  misc_feature: MA Experiment 20001247 PARAMETER Experiment Name: At_Far-red-induction_P Parameter: Tissue Value: Whole Plant
cagacacttacccacaaaatattcctctcggcgatgatccctttctgctgaatttttagtcctttgtcgctcgactgttttcttcgtctactatttgttccttttggatattcttcggacttttcgttgatttgattttcaagagagagagtttgaacaaggaaggattgaactatggaagatgcatcagagactagctactggtgtcacatgtgctcccgatcggtgattccattgattcaagacgaaatcatcaaatgcaatttctgtcaaagtggttttgttgaagaaatggataataatgatgaccatcaggctgctgattctctctggactcctatcttgatggagatgatgaacaacaatcacgaccaacattctaccaatcaggaagactcagaatctattcttgaagatgaagacgaagacgaagatgatggtgatgatggtgatcagaacaatgatggagaaattgatataactcatcaacttgaagagattaggaggataaggactagacattcaactgctattgttaatctgcttcaggggattcgagctggattattgatcgaatccgagaacaacgaggataatcccgataatagcgagcttgtcgtcttgatcaactcatttaaccaaaggatcagggttcatcaagattctgtagacaccacttctgttccttctggatctttgggtgactatttcattggacctggattcgagacgttgcttcagcgtttggctgagaatgatctgaacaacaggtatgggacacctccagctacaaaagaagcggttgaggcattggcgatggtgaaaatcgaagatagtttgttgcagtgtagtgtgtgtttggatgattttgagattggaatggaggctaaagagatgccgtgtaagcataagtttcatagtgactgcttgttgccatggcttgagcttcatagctcatgccctgtttgcagatatctgcttcctacaggagatgatgatgagccaaagactgatgcagaaacatcgagaaacgatgataacaatgaagatatcagtaatgcttctatggctagtaatggatcatcaccagactcaagttcgaacaattcatcggttaactaaactaaggctcactatctgagacaggtttacttgaacagaggagaactgatgggatcgtttgagatcagtctttagtgtttaatgttatttggtttgcacatagtttctcagatttggtggaaaatgtattctttggaattaattaacagtcttttttttttttgacttt

SEQ ID NO: 97753 - protein, 315 aa, Arabidopsis thaliana; identical to SEQ ID NO: 42008
  peptide (1)..(315): Ceres Seq. ID no. 13509026
  misc_feature (225)..(265): Pfam Name: Zinc finger, C3HC4 type (RING finger) Pfam Description: Zinc finger, C3HC4 type (RING finger)
  misc_feature (1)..(315): Homolog of NCBI NO: 15231238 NR Description: expressed protein [Arabidopsis thaliana]
  misc_feature (1)..(315): Homolog of NCBI NO: 38454178 NR Description: At3g13430 [Arabidopsis thaliana]
  misc_feature (1)..(310): Homolog of NCBI NO: 18405411 NR Description: expressed protein [Arabidopsis thaliana]
  misc_feature (71)..(306): Homolog of NCBI NO: 15241188 NR Description: expressed protein [Arabidopsis thaliana] gene_id:MCD7.7~pir||T05064~similar to unknown protein thaliana] >gi|17380898|gb|AAL36261.1| unknown protein
  misc_feature (1)..(43): Homolog of NCBI NO: 15241188 NR Description: expressed protein [Arabidopsis thaliana] gene_id:MCD7.7~pir||T05064~similar to unknown protein thaliana] >gi|17380898|gb|AAL36261.1| unknown protein
  misc_feature (11)..(313): Homolog of NCBI NO: 7486783 NR Description: hypothetical protein M3E9.170 - Arabidopsis >gi|2982466|emb|CAA18230.1| putative protein [Arabidopsis >gi|7269492|emb|CAB79495.1| putative protein [Arabidopsis
  misc_feature (11)..(313): Homolog of NCBI NO: 22328949 NR Description: expressed protein [Arabidopsis thaliana] expressed protein [Arabidopsis thaliana] putative protein [Arabidopsis thaliana]
  misc_feature (173)..(287): Homolog of NCBI NO: 11994207 NR Description: gene_id:MPN9.20~unknown protein [Arabidopsis
  misc_feature (173)..(287): Homolog of NCBI NO: 15231003 NR Description: expressed protein [Arabidopsis thaliana] AT3g19950/MPN9_19 [Arabidopsis thaliana]
  misc_feature (55)..(303): Homolog of NCBI NO: 15238295 NR Description: COP1-interacting protein CIP8 [Arabidopsis

SEQ ID NO: 97754 - protein, 303 aa, Arabidopsis thaliana; identical to SEQ ID NO: 42009
  peptide (1)..(303): Ceres Seq. ID no. 13509027
  misc_feature (213)..(253): Pfam Name: Zinc finger, C3HC4 type (RING finger) Pfam Description: Zinc finger, C3HC4 type (RING finger)
  misc_feature (1)..(303): Homolog of NCBI NO: 15231238 NR Description: expressed protein [Arabidopsis thaliana]
  misc_feature (1)..(303): Homolog of NCBI NO: 38454178 NR Description: At3g13430 [Arabidopsis thaliana]
  misc_feature (1)..(298): Homolog of NCBI NO: 18405411 NR Description: expressed protein [Arabidopsis thaliana]
  misc_feature (59)..(294): Homolog of NCBI NO: 15241188 NR Description: expressed protein [Arabidopsis thaliana] gene_id:MCD7.7~pir||T05064~similar to unknown protein thaliana] >gi|17380898|gb|AAL36261.1| unknown protein
  misc_feature (1)..(31): Homolog of NCBI NO: 15241188 NR Description: expressed protein [Arabidopsis thaliana] gene_id:MCD7.7~pir||T05064~similar to unknown protein thaliana] >gi|17380898|gb|AAL36261.1| unknown protein
  misc_feature (1)..(301): Homolog of NCBI NO: 7486783 NR Description: hypothetical protein M3E9.170 - Arabidopsis >gi|2982466|emb|CAA18230.1| putative protein [Arabidopsis >gi|7269492|emb|CAB79495.1| putative protein [Arabidopsis
  misc_feature (1)..(301): Homolog of NCBI NO: 22328949 NR Description: expressed protein [Arabidopsis thaliana] expressed protein [Arabidopsis thaliana] putative protein [Arabidopsis thaliana]
  misc_feature (161)..(275): Homolog of NCBI NO: 11994207 NR Description: gene_id:MPN9.20~unknown protein [Arabidopsis
  misc_feature (161)..(275): Homolog of NCBI NO: 15231003 NR Description: expressed protein [Arabidopsis thaliana] AT3g19950/MPN9_19 [Arabidopsis thaliana]
  misc_feature (43)..(291): Homolog of NCBI NO: 15238295 NR Description: COP1-interacting protein CIP8 [Arabidopsis

SEQ ID NO: 97755 - protein, 276 aa, Arabidopsis thaliana; identical to SEQ ID NO: 42010
  peptide (1)..(276): Ceres Seq. ID no. 13509028
  misc_feature (186)..(226): Pfam Name: Zinc finger, C3HC4 type (RING finger) Pfam Description: Zinc finger, C3HC4 type (RING finger)
  misc_feature (1)..(276): Homolog of NCBI NO: 15231238 NR Description: expressed protein [Arabidopsis thaliana]
  misc_feature (1)..(276): Homolog of NCBI NO: 38454178 NR Description: At3g13430 [Arabidopsis thaliana]
  misc_feature (1)..(271): Homolog of NCBI NO: 18405411 NR Description: expressed protein [Arabidopsis thaliana]
  misc_feature (32)..(267): Homolog of NCBI NO: 15241188 NR Description: expressed protein [Arabidopsis thaliana] gene_id:MCD7.7~pir||T05064~similar to unknown protein thaliana] >gi|17380898|gb|AAL36261.1| unknown protein
  misc_feature (1)..(274): Homolog of NCBI NO: 7486783 NR Description: hypothetical protein M3E9.170 - Arabidopsis >gi|2982466|emb|CAA18230.1| putative protein [Arabidopsis >gi|7269492|emb|CAB79495.1| putative protein [Arabidopsis
  misc_feature (1)..(274): Homolog of NCBI NO: 22328949 NR Description: expressed protein [Arabidopsis thaliana] expressed protein [Arabidopsis thaliana] putative protein [Arabidopsis thaliana]
  misc_feature (134)..(248): Homolog of NCBI NO: 11994207 NR Description: gene_id:MPN9.20~unknown protein [Arabidopsis
  misc_feature (134)..(248): Homolog of NCBI NO: 15231003 NR Description: expressed protein [Arabidopsis thaliana] AT3g19950/MPN9_19 [Arabidopsis thaliana]
  misc_feature (16)..(264): Homolog of NCBI NO: 15238295 NR Description: COP1-interacting protein CIP8 [Arabidopsis
  misc_feature (131)..(274): Homolog of NCBI NO: 37535546 NR Description: putative zinc finger protein [Oryza sativa

SEQ ID NO: 97756 - DNA, 1037 bp, Arabidopsis thaliana
  misc_feature (1)..(1037): Ceres Seq. ID no. 13509334
  misc_feature: MA Experiment ID: 20000184 Result: Down-regulated in Transcription
  misc_feature: MA Experiment 20000184 PARAMETER Experiment Name: At_Shoots__P Parameter: Age (day) Value: 7
  misc_feature: MA Experiment 20000184 PARAMETER Experiment Name: At_Shoots__P Parameter: Tissue Value: Shoots vs. Whole Plant
  misc_feature: MA Experiment ID: 20000437 Result: Up-regulated in Transcription
  misc_feature: MA Experiment 20000437 PARAMETER Experiment Name: At_Drought_P Parameter: Age (day) Value: 8
  misc_feature: MA Experiment 20000437 PARAMETER Experiment Name: At_Drought_P Parameter: Organism Value: A. thaliana
  misc_feature: MA Experiment 20000437 PARAMETER Experiment Name: At_Drought_P Parameter: Plant Line Value: WS
  misc_feature: MA Experiment 20000437 PARAMETER Experiment Name: At_Drought_P Parameter: Timepoint (hr) Value: 24
  misc_feature: MA Experiment 20000437 PARAMETER Experiment Name: At_Drought_P Parameter: Tissue Value: Whole Plant
  misc_feature: MA Experiment 20000437 PARAMETER Experiment Name: At_Drought_P Parameter: Treatment Value: Drought vs. No Drought
  misc_feature: MA Experiment ID: 20000794 Result: Down-regulated in Transcription
  misc_feature: MA Experiment 20000794 PARAMETER Experiment Name: At_Petals_P Parameter: Age (day) Value: 23-25 days
  misc_feature: MA Experiment 20000794 PARAMETER Experiment Name: At_Petals_P Parameter: Plant Line Value: WS
  misc_feature: MA Experiment 20000794 PARAMETER Experiment Name: At_Petals_P Parameter: Tissue Value: Petals vs. Whole plant
  misc_feature (1031)..(1031): n is a, c, t, g, unknown, or other
ctcctttgtctcgcttttttcttttgttctttcacatgtgtatatacacacagaacacacacttacatttctattatcatataaatcttcaactttaccttttatcttccaaaaaaaacactatcttcttcatcaaattctcttgattctgtttctttttatcctcctccatggccctctcacctaattcaagctctttagatttaacaatctcaattccgagcttctctccatctccttcacttggtgatcatcacgggatgagagattttgacataaaccaaacaccaaagacggaagaagatcgtgagtggatgatcggtgcaacaccacatgtcaacgaagatgatagcaactcgggtggccggcggcgcaaaaagctccgtctaacgaaagaacaatcacatcttcttgaagagagtttcatacaaaaccataccttaacccctaagcaaaaaaaagatttggccacctttttgaagcttagtcaaaggcaagttgaggtgtggtttcaaaatcgaagagctcggagtaagctaaagcacacggaaatggaatgtgagtatctaaaaagatggttcggatcgttgaaggaacaaaatcgacggctacaaatagaagttgaagaactacgagcgctaaagccatcatcgacctcggctttaaccatgtgtcctcggtgtgaacgtgtgactgatgcagtagataatgactctaatgccgttcaagagggggcagttcttagcagccggtcacggatgacaatttcctcttcctcttccctctgttgactggtttggtcgaagtcaaaagtcaaaagataaacgcctgtttcggggtaaaaagcaaagatttgatgatgattaggaggattttgtgtatagtttgctaattatttattacaaatttacaaaccagtgaggaaaaaagataatttaattctcgatctttaattagctttttgtgttatttattcataattttatttttcgtgtttaaccaaaaaatagacaaaacaaatattgcttttngtgttc

SEQ ID NO: 97757 - protein, 206 aa, Arabidopsis thaliana; identical to SEQ ID NO: 44156
  peptide (1)..(206): Ceres Seq. ID no. 13509335
  misc_feature (67)..(123): Pfam Name: Homeobox domain Pfam Description: Homeobox domain
  misc_feature (1)..(206): Homolog of NCBI NO: 30698765 NR Description: homeodomain-leucine zipper protein, putative thaliana] >gi|26451347|dbj|BAC42774.1| unknown protein thaliana] >gi|28973379|gb|AAO64014.1| putative homeodomain
  misc_feature (1)..(185): Homolog of NCBI NO: 30677923 NR Description: homeodomain-leucine zipper protein ATHB-17
  misc_feature (2)..(177): Homolog of NCBI NO: 5006851 NR Description: homeodomain leucine zipper protein [Oryza sativa]
  misc_feature (8)..(177): Homolog of NCBI NO: 34911664 NR Description: putative homeodomain-leucine zipper [Oryza sativa
  misc_feature (36)..(185): Homolog of NCBI NO: 25386214 NR Description: probable homeodomain transcription factor - Arabidopsis thaliana >gi|3785973|gb|AAC67320.1| putative
  misc_feature (15)..(199): Homolog of NCBI NO: 12230908 NR Description: Homeobox-leucine zipper protein HAT14 (HD-ZIP leucine zipper protein~gene_id:MPH15.6 [Arabidopsis thaliana]
  misc_feature (15)..(199): Homolog of NCBI NO: 22326632 NR Description: homeobox-leucine zipper protein HAT14 (HD-Zip
  misc_feature (15)..(199): Homolog of NCBI NO: 29028870 NR Description: At5g06710 [Arabidopsis thaliana]
  misc_feature (57)..(199): Homolog of NCBI NO: 25386203 NR Description: homeobox protein HAT14 [imported] - Arabidopsis
  misc_feature (5)..(176): Homolog of NCBI NO: 7489329 NR Description: homeobox protein - common sunflower

SEQ ID NO: 97758 - protein, 176 aa, Arabidopsis thaliana; identical to SEQ ID NO: 44157
  peptide (1)..(176): Ceres Seq. ID no. 13509336
  misc_feature (37)..(93): Pfam Name: Homeobox domain Pfam Description: Homeobox domain
  misc_feature (1)..(176): Homolog of NCBI NO: 30698765 NR Description: homeodomain-leucine zipper protein, putative thaliana] >gi|26451347|dbj|BAC42774.1| unknown protein thaliana] >gi|28973379|gb|AAO64014.1| putative homeodomain
  misc_feature (1)..(155): Homolog of NCBI NO: 30677923 NR Description: homeodomain-leucine zipper protein ATHB-17
  misc_feature (1)..(147): Homolog of NCBI NO: 5006851 NR Description: homeodomain leucine zipper protein [Oryza sativa]
  misc_feature (1)..(147): Homolog of NCBI NO: 34911664 NR Description: putative homeodomain-leucine zipper [Oryza sativa
  misc_feature (6)..(155): Homolog of NCBI NO: 25386214 NR Description: probable homeodomain transcription factor - Arabidopsis thaliana >gi|3785973|gb|AAC67320.1| putative
  misc_feature (1)..(169): Homolog of NCBI NO: 12230908 NR Description: Homeobox-leucine zipper protein HAT14 (HD-ZIP leucine zipper protein~gene_id:MPH15.6 [Arabidopsis thaliana]
  misc_feature (1)..(169): Homolog of NCBI NO: 22326632 NR Description: homeobox-leucine zipper protein HAT14 (HD-Zip
  misc_feature (1)..(169): Homolog of NCBI NO: 29028870 NR Description: At5g06710 [Arabidopsis thaliana]
  misc_feature (27)..(169): Homolog of NCBI NO: 25386203 NR Description: homeobox protein HAT14 [imported] - Arabidopsis
  misc_feature (1)..(146): Homolog of NCBI NO: 7489329 NR Description: homeobox protein - common sunflower

SEQ ID NO: 97759 - protein, 158 aa, Arabidopsis thaliana; identical to SEQ ID NO: 44158
  peptide (1)..(158): Ceres Seq. ID no. 13509337
  misc_feature (19)..(75): Pfam Name: Homeobox domain Pfam Description: Homeobox domain
  misc_feature (1)..(158): Homolog of NCBI NO: 30698765 NR Description: homeodomain-leucine zipper protein, putative thaliana] >gi|26451347|dbj|BAC42774.1| unknown protein thaliana] >gi|28973379|gb|AAO64014.1| putative homeodomain
  misc_feature (1)..(137): Homolog of NCBI NO: 30677923 NR Description: homeodomain-leucine zipper protein ATHB-17
  misc_feature (1)..(129): Homolog of NCBI NO: 5006851 NR Description: homeodomain leucine zipper protein [Oryza sativa]
  misc_feature (1)..(129): Homolog of NCBI NO: 34911664 NR Description: putative homeodomain-leucine zipper [Oryza sativa
  misc_feature (1)..(137): Homolog of NCBI NO: 25386214 NR Description: probable homeodomain transcription factor - Arabidopsis thaliana >gi|3785973|gb|AAC67320.1| putative
  misc_feature (1)..(151): Homolog of NCBI NO: 12230908 NR Description: Homeobox-leucine zipper protein HAT14 (HD-ZIP leucine zipper protein~gene_id:MPH15.6 [Arabidopsis thaliana]
  misc_feature (1)..(151): Homolog of NCBI NO: 22326632 NR Description: homeobox-leucine zipper protein HAT14 (HD-Zip
  misc_feature (1)..(151): Homolog of NCBI NO: 29028870 NR Description: At5g06710 [Arabidopsis thaliana]
  misc_feature (9)..(151): Homolog of NCBI NO: 25386203 NR Description: homeobox protein HAT14 [imported] - Arabidopsis
  misc_feature (1)..(128): Homolog of NCBI NO: 7489329 NR Description: homeobox protein - common sunflower

SEQ ID NO: 97760 - DNA, 3067 bp, Arabidopsis thaliana
  misc_feature (1)..(3067): Ceres Seq. ID no. 13509389
  misc_feature: MA Experiment ID: 108434 Result: Down-regulated in Transcription
  misc_feature: MA Experiment 108434 PARAMETER Experiment Name: At_Root_Tips_cDNA_P Parameter: Tissue Value: Root Tips
  misc_feature: MA Experiment ID: 108461 Result: Up-regulated in Transcription
  misc_feature: MA Experiment 108461 PARAMETER Experiment Name: At_Germinating_Seeds_cDNA_P Parameter: Age (day) Value: 1 vs. 0
  misc_feature: MA Experiment 108461 PARAMETER Experiment Name: At_Germinating_Seeds_cDNA_P Parameter: Tissue Value: Germinating Seeds
  misc_feature: MA Experiment ID: 108462 Result: Up-regulated in Transcription
  misc_feature: MA Experiment 108462 PARAMETER Experiment Name: At_Germinating_Seeds_cDNA_P Parameter: Age (day) Value: 2 vs. 0
  misc_feature: MA Experiment 108462 PARAMETER Experiment Name: At_Germinating_Seeds_cDNA_P Parameter: Tissue Value: Germinating Seeds
  misc_feature: MA Experiment ID: 108463 Result: Up-regulated in Transcription
  misc_feature: MA Experiment 108463 PARAMETER Experiment Name: At_Germinating_Seeds_cDNA_P Parameter: Age (day) Value: 3 vs. 0
  misc_feature: MA Experiment 108463 PARAMETER Experiment Name: At_Germinating_Seeds_cDNA_P Parameter: Tissue Value: Germinating Seeds
  misc_feature: MA Experiment ID: 108595 Result: Down-regulated in Transcription
  misc_feature: MA Experiment 108595 PARAMETER Experiment Name: At_Ler-pi_Ovule_cDNA_P Parameter: Plant Line Value: null
  misc_feature: MA Experiment ID: 20000087 Result: Down-regulated in Transcription
  misc_feature: MA Experiment 20000087 PARAMETER Experiment Name: At_100uM_ABA_Mutants_cDNA_P Parameter: Plant Line Value: WS
  misc_feature: MA Experiment 20000087 PARAMETER Experiment Name: At_100uM_ABA_Mutants_cDNA_P Parameter: Timepoint (hr) Value: 6
  misc_feature: MA Experiment 20000087 PARAMETER Experiment Name: At_100uM_ABA_Mutants_cDNA_P Parameter: Tissue Value: Aerial
  misc_feature: MA Experiment 20000087 PARAMETER Experiment Name: At_100uM_ABA_Mutants_cDNA_P Parameter: Treatment Value: 100uM ABA vs. No Treatment
  misc_feature: MA Experiment ID: 20000117 Result: Down-regulated in Transcription
  misc_feature: MA Experiment 20000117 PARAMETER Experiment Name: At_100uM_ABA_Mutants_cDNA_P Parameter: Plant Line Value: Columbia
  misc_feature: MA Experiment 20000117 PARAMETER Experiment Name: At_100uM_ABA_Mutants_cDNA_P Parameter: Timepoint (hr) Value: 6
  misc_feature: MA Experiment 20000117 PARAMETER Experiment Name: At_100uM_ABA_Mutants_cDNA_P Parameter: Tissue Value: Aerial
  misc_feature: MA Experiment 20000117 PARAMETER Experiment Name: At_100uM_ABA_Mutants_cDNA_P Parameter: Treatment Value: 100uM ABA vs. No Treatment
  misc_feature: MA Experiment ID: 20000180 Result: Up-regulated in Transcription
  misc_feature: MA Experiment 20000180 PARAMETER Experiment Name: At_Germinating_Seeds_P Parameter: Age (hr) Value: 24 vs. 0
  misc_feature: MA Experiment 20000180 PARAMETER Experiment Name: At_Germinating_Seeds_P Parameter: Tissue Value: Germinating Seeds
  misc_feature: MA Experiment ID: 20000185 Result: Down-regulated in Transcription
  misc_feature: MA Experiment 20000185 PARAMETER Experiment Name: At_Roots__P Parameter: Age (day) Value: 7 vs. 21
  misc_feature: MA Experiment 20000185 PARAMETER Experiment Name: At_Roots__P Parameter: Organism Value: A. thaliana
  misc_feature: MA Experiment 20000185 PARAMETER Experiment Name: At_Roots__P Parameter: Tissue Value: Roots vs. Whole Plant
  misc_feature: MA Experiment ID: 20000224 Result: Up-regulated in Transcription
  misc_feature: MA Experiment ID: 20000234 Result: Up-regulated in Transcription
  misc_feature: MA Experiment 20000234 PARAMETER Experiment Name: At_Siliques_P Parameter: Age (day) Value: 21
  misc_feature: MA Experiment 20000234 PARAMETER Experiment Name: At_Siliques_P Parameter: Organism Value: A. thaliana
  misc_feature: MA Experiment 20000234 PARAMETER Experiment Name: At_Siliques_P Parameter: Plant Line Value: WS
  misc_feature: MA Experiment 20000234 PARAMETER Experiment Name: At_Siliques_P Parameter: Tissue Value: Less Than 5mm Siliques vs. Whole Plant
  misc_feature: MA Experiment ID: 20000235 Result: Up-regulated in Transcription
  misc_feature: MA Experiment 20000235 PARAMETER Experiment Name: At_Siliques_P Parameter: Age (day) Value: 21
  misc_feature: MA Experiment 20000235 PARAMETER Experiment Name: At_Siliques_P Parameter: Organism Value: A. thaliana
  misc_feature: MA Experiment 20000235 PARAMETER Experiment Name: At_Siliques_P Parameter: Plant Line Value: WS
  misc_feature: MA Experiment 20000235 PARAMETER Experiment Name: At_Siliques_P Parameter: Tissue Value: 5-10mm Siliques vs. Whole Plant
  misc_feature: MA Experiment ID: 20000438 Result: Up-regulated in Transcription
  misc_feature: MA Experiment 20000438 PARAMETER Experiment Name: At_Shoots__P Parameter: Age (day) Value: 14
  misc_feature: MA Experiment 20000438 PARAMETER Experiment Name: At_Shoots__P Parameter: Tissue Value: Shoots vs. Whole Plant
  misc_feature: MA Experiment ID: 20000439 Result: Down-regulated in Transcription
  misc_feature: MA Experiment 20000439 PARAMETER Experiment Name: At_Roots__P Parameter: Age (day) Value: 14 vs. 21
  misc_feature: MA Experiment 20000439 PARAMETER Experiment Name: At_Roots__P Parameter: Organism Value: A. thaliana
  misc_feature: MA Experiment 20000439 PARAMETER Experiment Name: At_Roots__P Parameter: Tissue Value: Roots vs. Whole Plant
  misc_feature: MA Experiment ID: 20001450 Result: Down-regulated in Transcription
  misc_feature: MA Experiment 20001450 PARAMETER Experiment Name: At_Far-red-induction_P Parameter: Age (day) Value: 7
  misc_feature: MA Experiment 20001450 PARAMETER Experiment Name: At_Far-red-induction_P Parameter: Light Value: Far-red vs. White
  misc_feature: MA Experiment 20001450 PARAMETER Experiment Name: At_Far-red-induction_P Parameter: Organism Value: A. thaliana
  misc_feature: MA Experiment 20001450 PARAMETER Experiment Name: At_Far-red-induction_P Parameter: Plant Line Value: Columbia
  misc_feature: MA Experiment 20001450 PARAMETER Experiment Name: At_Far-red-induction_P Parameter: Timepoint (hr) Value: 8
  misc_feature: MA Experiment 20001450 PARAMETER Experiment Name: At_Far-red-induction_P Parameter: Tissue Value: Whole Plant
  misc_feature: MA Experiment ID: 20001557 Result: Down-regulated in Transcription
  misc_feature: MA Experiment 20001557 PARAMETER Experiment Name: At_Drought_Soil_Dry_P Parameter: Age (day) Value: 27
  misc_feature: MA Experiment 20001557 PARAMETER Experiment Name: At_Drought_Soil_Dry_P Parameter: Organism Value: A. thaliana
  misc_feature: MA Experiment 20001557 PARAMETER Experiment Name: At_Drought_Soil_Dry_P Parameter: Plant Line Value: WS
  misc_feature: MA Experiment 20001557 PARAMETER Experiment Name: At_Drought_Soil_Dry_P Parameter: Post Timepoint (hr) Value: 3
  misc_feature: MA Experiment 20001557 PARAMETER Experiment Name: At_Drought_Soil_Dry_P Parameter: Post-Treatment Value: Re-Water vs. No Drought
  misc_feature: MA Experiment 20001557 PARAMETER Experiment Name: At_Drought_Soil_Dry_P Parameter: Timepoint (day) Value: 13
  misc_feature: MA Experiment 20001557 PARAMETER Experiment Name: At_Drought_Soil_Dry_P Parameter: Treatment Value: Drought vs. No Drought
  misc_feature: MA Experiment ID: 20001905 Result: Down-regulated in Transcription
  misc_feature: MA Experiment 20001905 PARAMETER Experiment Name: At_Drought_Reproduction_P Parameter: Age (day) Value: 40
  misc_feature: MA Experiment 20001905 PARAMETER Experiment Name: At_Drought_Reproduction_P Parameter: Organism Value: A. thaliana
  misc_feature: MA Experiment 20001905 PARAMETER Experiment Name: At_Drought_Reproduction_P Parameter: Plant Line Value: WS
  misc_feature: MA Experiment 20001905 PARAMETER Experiment Name: At_Drought_Reproduction_P Parameter: Timepoint (day) Value: 10
  misc_feature: MA Experiment 20001905 PARAMETER Experiment Name: At_Drought_Reproduction_P Parameter: Tissue Value: Rosettes
  misc_feature: MA Experiment 20001905 PARAMETER Experiment Name: At_Drought_Reproduction_P Parameter: Treatment Value: Drought vs. No Drought
  misc_feature: MA Experiment ID: 20001906 Result: Down-regulated in Transcription
  misc_feature: MA Experiment 20001906 PARAMETER Experiment Name: At_Drought_Reproduction_P Parameter: Age (day) Value: 35
  misc_feature: MA Experiment 20001906 PARAMETER Experiment Name: At_Drought_Reproduction_P Parameter: Organism Value: A. thaliana
  misc_feature: MA Experiment 20001906 PARAMETER Experiment Name: At_Drought_Reproduction_P Parameter: Plant Line Value: WS
  misc_feature: MA Experiment 20001906 PARAMETER Experiment Name: At_Drought_Reproduction_P Parameter: Timepoint (day) Value: 5
  misc_feature: MA Experiment 20001906 PARAMETER Experiment Name: At_Drought_Reproduction_P Parameter: Tissue Value: Siliques
  misc_feature: MA Experiment 20001906 PARAMETER Experiment Name: At_Drought_Reproduction_P Parameter: Treatment Value: Drought vs. No Drought
  misc_feature: MA Experiment ID: 20001908 Result: Down-regulated in Transcription
  misc_feature: MA Experiment 20001908 PARAMETER Experiment Name: At_Drought_Reproduction_P Parameter: Age (day) Value: 40
  misc_feature: MA Experiment 20001908 PARAMETER Experiment Name: At_Drought_Reproduction_P Parameter: Organism Value: A. thaliana
  misc_feature: MA Experiment 20001908 PARAMETER Experiment Name: At_Drought_Reproduction_P Parameter: Plant Line Value: WS
  misc_feature: MA Experiment 20001908 PARAMETER Experiment Name: At_Drought_Reproduction_P Parameter: Timepoint (day) Value: 10
  misc_feature: MA Experiment 20001908 PARAMETER Experiment Name: At_Drought_Reproduction_P Parameter: Tissue Value: Siliques
  misc_feature: MA Experiment 20001908 PARAMETER Experiment Name: At_Drought_Reproduction_P Parameter: Treatment Value: Drought vs. No Drought
aatcataggcatagcaaaactcttccaaaatgtctgatttctcgagctccgtgaagcttaaatatgttaaactcggttaccaataccttatcaacaacttccttactcttcttttgattccagtcatagcaaccgtcgccatcgagcttctccgaatgggtcctcgagcgatcaggtctaggagaagagacttgtctccatccagctattcattacatccctccaactccaaccatggaatccgcaagaaacgaggcccaaatggttatcttcaccgccatggaagatctcttcaagaatacaggtcttaaacctaaagacatcgacatcctcattgttaattgctctctgttctcaccaacgccgtctctctccgctatgattatcaacaagtacaagcttaggagtaacatcaaaagctataacctttccgggatgggatgcagcgctagtcttatctcagttgatgtagcacgtgatttgttacaagtccatcctaactccaacgcaatcataattagcactgagatcattactcctaattactataagggtaatgagagagccatgttgctcccaaactgcctcttccgtatgggaggcgccgccattctcctctctaaccgcagatccgacaggtggcgagctaagtacaagttatgccaccttgttaggacccatcgcggtgcggatgacaaatcctacaactgtgttatggaacaggaagacaaaaatggtaacgtgggaatcaacttgtctaaagatctcatgaccattgccggagaagccttgaaagctaatatcactaccataggtcctttggtccttccggcatcggagcagcttctcttcctctcatcccttatcggacgtaaaatcttcaatccaaagtggaagccgtacataccagatttcaagcaggccttcgagcatttctgcatccacgcaggaggaagagcggtgattgatgagctgcaaaagaatctacagctgtcgggagaacacgtggaagcttcaagaatgacactacataggtttggtaatacatcgtcgtcatcattatggtatgagcttagctacatagaggctcaagggagaatgaagagaaacgatagggtttggcagatcgctttcggaagtggattcaagtgtaactccgccgtttggaaatgtaaccgtacgatcaagacaccaacggatggagcgtggtcggattgtatcgaacgataccctgtctttatccctgaagttgttaaactatgaaaatactttttttttatccttgaagttgttgaactatgaaaacacttttaaaagattgggaaaatagagaaaactgcaaaagacgataagatacaacacatgttctaataactgcgtcaactttttcatttggtgtattttattctttatactttctaatgatgtgatttgtgatgtatgaaatactaaaattttatttctaaaaaaaaaaaaaaactctccagggttggatcctctctggtctctgtaacttgcaagcttcccatcaatggcttctcctttgtcttcttccaccgtcgtctctcaccgccttttttttctccatccttcacctctcaatcgcaaattcctcttcgtaaaacccaaattaccctttaatcgaaccaattccggagatttccgcatgcgtctgcattctacatccagtaaaactggcactaaggaacttatacattcctgcaattcttcaattgattcgaagttgaacacttttgaagctggatctaaaaacctcgagaaattggttgcaacgatattgatatttgttcaagtatggtctccattgcccttgtttggtctagactctgcttacatttcacctgcagaggcagttctttactctccggacactaaagttccaagaactggagaacttgctctaagaagggctatacctgctaatccaagcatgaagataatacaggcttcgttggaagatatatcatatcttctcagaattcctcaaaggaagccttacggtaccatggagagcaatgtaaagaaagctttaaaggtggctatagatgataaggataagatcttggctagtataccagtagacttaaaagacaagggctcagaactgtatacaactctgattgatggaaagggtggactacaagcacttataacgtctattaagaaacaagatcctgataaagtgtcccttgggctggcagcatcactagatactgttgcggatctggagttattacaggcatctgggttgtcatttctacttcctcagcagtacttaaactatcccaggttagcaggaagaggaactgtggaaatcaccattgagaaagctgatggttcgactttttcagctgaagctggaggtgatcaaagaaagagtgctacagtacagatcgttatagatggatattcagcacctctaaccgcagggaattttgcaaaactggtaactagcggtgcatatgatggagccaaactcaatactgtaaaccaggctgttatcacagaggatgggagtggtaaggtggagagtgttagtgttccattggaagtaatgccttctggacaattcgaacctctctacagaacgccattgagtgtccaggatggggagttaccagtgcttcctttatcggtttatggagctgtagcaatggcgcacagcgaaaactcagaagaatactcttctccttaccaattcttcttctacctatacgataaaagaaactctggcttaggaggattatcctttgacgaaggacagttctcggtcttcggatacacaatagcaggaaaagatattctcgggcagatcaagactggagatatcatcaaatctgcaaaactaattgaaggccaagaccgccttagtttgcctgttcaaaacaacaacatcaacgaatccacttgattctttttctttctttacatccaaaacgttctaagactttcttgtccataaacagagtgctaagagtttcaactctctgcaattgggtatgattcttattggatttccaacattacaagaaaaagaaaagctttg

SEQ ID NO: 97761 - protein, 466 aa, Arabidopsis thaliana
  peptide (1)..(466): Ceres Seq. ID no. 13509390
  misc_feature (295)..(447): Pfam Name: Cyclophilin type peptidyl-prolyl cis-trans isomerase Pfam Description: Cyclophilin type peptidyl-prolyl cis-trans
  misc_feature (1)..(466): Homolog of NCBI NO: 15232608 NR Description: peptidyl-prolycis-trans isomerase protein thaliana] >gi|18202432|sp|P82869|TL38_ARATH Thylakoid lumenal 38
  misc_feature (111)..(456): Homolog of NCBI NO: 33146755 NR Description: putative peptidyl-prolycis-trans isomerase
  misc_feature (111)..(456): Homolog of NCBI NO: 33146756 NR Description: putative peptidyl-prolycis-trans isomerase
  misc_feature (111)..(456): Homolog of NCBI NO: 34899774 NR Description: putative peptidyl-prolycis-trans isomerase
  misc_feature (122)..(243): Homolog of NCBI NO: 7021737 NR Description: hypothetical protein [Arabidopsis thaliana] contains similarity to unknown
  misc_feature (293)..(406): Homolog of NCBI NO: 7021737 NR Description: hypothetical protein [Arabidopsis thaliana] contains similarity to unknown
  misc_feature (1)..(58): Homolog of NCBI NO: 7021737 NR Description: hypothetical protein [Arabidopsis thaliana] contains similarity to unknown
  misc_feature (296)..(453): Homolog of NCBI NO: 33239477 NR Description: Peptidyl-prolyl cis-trans isomerase
MASPLSSSTVVSHRLFFLHPSPLNRKFLFVKPKLPFNRTNSGDFRMRLHSTSSKTGTKELIHSCNSSIDSKLNTFEAGSKNLEKLVATILIFVQVWSPLPLFGLDSAYISPAEAVLYSPDTKVPRTGELALRRAIPANPSMKIIQASLEDISYLLRIPQRKPYGTMESNVKKALKVAIDDKDKILASIPVDLKDKGSELYTTLIDGKGGLQALITSIKKQDPDKVSLGLAASLDTVADLELLQASGLSFLLPQQYLNYPRLAGRGTVEITIEKADGSTFSAEAGGDQRKSATVQIVIDGYSAPLTAGNFAKLVTSGAYDGAKLNTVNQAVITEDGSGKVESVSVPLEVMPSGQFEPLYRTPLSVQDGELPVLPLSVYGAVAMAHSENSEEYSSPYQFFFYLYDKRNSGLGGLSFDEGQFSVFGYTIAGKDILGQIKTGDIIKSAKLIEGQDRLSLPVQNNNINEST

SEQ ID NO: 97762 - protein, 421 aa, Arabidopsis thaliana
  peptide (1)..(421): Ceres Seq. ID no. 13509391
  misc_feature (250)..(402): Pfam Name: Cyclophilin type peptidyl-prolyl cis-trans isomerase Pfam Description: Cyclophilin type peptidyl-prolyl cis-trans
  misc_feature (1)..(421): Homolog of NCBI NO: 15232608 NR Description: peptidyl-prolycis-trans isomerase protein thaliana] >gi|18202432|sp|P82869|TL38_ARATH Thylakoid lumenal 38
  misc_feature (66)..(411): Homolog of NCBI NO: 33146755 NR Description: putative peptidyl-prolycis-trans isomerase
  misc_feature (66)..(411): Homolog of NCBI NO: 33146756 NR Description: putative peptidyl-prolycis-trans isomerase
  misc_feature (66)..(411): Homolog of NCBI NO: 34899774 NR Description: putative peptidyl-prolycis-trans isomerase
  misc_feature (77)..(198): Homolog of NCBI NO: 7021737 NR Description: hypothetical protein [Arabidopsis thaliana] contains similarity to unknown
  misc_feature (248)..(361): Homolog of NCBI NO: 7021737 NR Description: hypothetical protein [Arabidopsis thaliana] contains similarity to unknown
  misc_feature (1)..(13): Homolog of NCBI NO: 7021737 NR Description: hypothetical protein [Arabidopsis thaliana] contains similarity to unknown
  misc_feature (251)..(408): Homolog of NCBI NO: 33239477 NR Description: Peptidyl-prolyl cis-trans isomerase
MRLHSTSSKTGTKELIHSCNSSIDSKLNTFEAGSKNLEKLVATILIFVQVWSPLPLFGLDSAYISPAEAVLYSPDTKVPRTGELALRRAIPANPSMKIIQASLEDISYLLRIPQRKPYGTMESNVKKALKVAIDDKDKILASIPVDLKDKGSELYTTLIDGKGGLQALITSIKKQDPDKVSLGLAASLDTVADLELLQASGLSFLLPQQYLNYPRLAGRGTVEITIEKADGSTFSAEAGGDQRKSATVQIVIDGYSAPLTAGNFAKLVTSGAYDGAKLNTVNQAVITEDGSGKVESVSVPLEVMPSGQFEPLYRTPLSVQDGELPVLPLSVYGAVAMAHSENSEEYSSPYQFFFYLYDKRNSGLGGLSFDEGQFSVFGYTIAGKDILGQIKTGDIIKSAKLIEGQDRLSLPVQNNNINEST

SEQ ID NO: 97763 - protein, 342 aa, Arabidopsis thaliana
  peptide (1)..(342): Ceres Seq. ID no. 13509392
  misc_feature (175)..(315): Pfam Name: Chalcone and stilbene synthases, C-terminal domain Pfam Description: Chalcone and stilbene synthases, C-terminal
  misc_feature (1)..(342): Homolog of NCBI NO: 15222592 NR Description: very-long-chain fatty acid condensing enzyme putative [Arabidopsis thaliana] >gi|25403020|pir||F86384 probable
  misc_feature (1)..(342): Homolog of NCBI NO: 21618184 NR Description: fatty acid condensing enzyme CUT1, putative
  misc_feature (1)..(342): Homolog of NCBI NO: 28393607 NR Description: putative fatty acid condensing enzyme CUT1
  misc_feature (1)..(342): Homolog of NCBI NO: 15221431 NR Description: very-long-chain fatty acid condensing enzyme
  misc_feature (1)..(342): Homolog of NCBI NO: 21593111 NR Description: very-long-chain fatty acid condensing enzyme CUT1
  misc_feature (1)..(342): Homolog of NCBI NO: 17979464 NR Description: At1g68530/T26J14_10 [Arabidopsis thaliana]
  misc_feature (1)..(334): Homolog of NCBI NO: 15223556 NR Description: very-long-chain fatty acid condensing enzyme putative [Arabidopsis thaliana] >gi|25402889|pir||F86327 protein
  misc_feature (1)..(334): Homolog of NCBI NO: 15226724 NR Description: very-long-chain fatty acid condensing enzyme
  misc_feature (1)..(337): Homolog of NCBI NO: 29417540 NR Description: beta-ketoacyl-CoA-synthase [Marchantia polymorpha]
  misc_feature (1)..(342): Homolog of NCBI NO: 9714501 NR Description: putative fatty acid elongase [Zea mays]
MESARNEAQMVIFTAMEDLFKNTGLKPKDIDILIVNCSLFSPTPSLSAMIINKYKLRSNIKSYNLSGMGCSASLISVDVARDLLQVHPNSNAIIISTEIITPNYYKGNERAMLLPNCLFRMGGAAILLSNRRSDRWRAKYKLCHLVRTHRGADDKSYNCVMEQEDKNGNVGINLSKDLMTIAGEALKANITTIGPLVLPASEQLLFLSSLIGRKIFNPKWKPYIPDFKQAFEHFCIHAGGRAVIDELQKNLQLSGEHVEASRMTLHRFGNTSSSSLWYELSYIEAQGRMKRNDRVWQIAFGSGFKCNSAVWKCNRTIKTPTDGAWSDCIERYPVFIPEVVKL

SEQ ID NO: 97764 - DNA, 1423 bp, Arabidopsis thaliana
  misc_feature (1)..(1423): Ceres Seq. ID no. 13509490
  misc_feature: MA Experiment ID: 108435 Result: Up-regulated in Transcription
  misc_feature: MA Experiment 108435 PARAMETER Experiment Name: At_stm_Mutants_cDNA_P Parameter: Plant Line Value: wt Landsburg vs stm
  misc_feature: MA Experiment 108435 PARAMETER Experiment Name: At_stm_Mutants_cDNA_P Parameter: Tissue Value: Shoot Apical Meristem Region
  misc_feature: MA Experiment ID: 108462 Result: Up-regulated in Transcription
  misc_feature: MA Experiment 108462 PARAMETER Experiment Name: At_Germinating_Seeds_cDNA_P Parameter: Age (day) Value: 2 vs. 0
  misc_feature: MA Experiment 108462 PARAMETER Experiment Name: At_Germinating_Seeds_cDNA_P Parameter: Tissue Value: Germinating Seeds
  misc_feature: MA Experiment ID: 108463 Result: Up-regulated in Transcription
  misc_feature: MA Experiment 108463 PARAMETER Experiment Name: At_Germinating_Seeds_cDNA_P Parameter: Age (day) Value: 3 vs. 0
  misc_feature: MA Experiment 108463 PARAMETER Experiment Name: At_Germinating_Seeds_cDNA_P Parameter: Tissue Value: Germinating Seeds
  misc_feature: MA Experiment ID: 108464 Result: Up-regulated in Transcription
  misc_feature: MA Experiment 108464 PARAMETER Experiment Name: At_Germinating_Seeds_cDNA_P Parameter: Age (day) Value: 4 vs. 0
  misc_feature: MA Experiment 108464 PARAMETER Experiment Name: At_Germinating_Seeds_cDNA_P Parameter: Tissue Value: Germinating Seeds
  misc_feature: MA Experiment ID: 108573 Result: Up-regulated in Transcription
  misc_feature: MA Experiment 108573 PARAMETER Experiment Name: At_Drought_cDNA_P Parameter: Timepoint (hr) Value: 6
  misc_feature: MA Experiment 108573 PARAMETER Experiment Name: At_Drought_cDNA_P Parameter: Tissue Value: Aerial
  misc_feature: MA Experiment 108573 PARAMETER Experiment Name: At_Drought_cDNA_P Parameter: Treatment Value: Drought vs. No Drought
  misc_feature: MA Experiment ID: 108667 Result: Up-regulated in Transcription
  misc_feature: MA Experiment 108667 PARAMETER Experiment Name: At_2mM_SA_cDNA_P Parameter: Plant Line Value: WS
  misc_feature: MA Experiment 108667 PARAMETER Experiment Name: At_2mM_SA_cDNA_P Parameter: Timepoint (hr) Value: 1
  misc_feature: MA Experiment 108667 PARAMETER Experiment Name: At_2mM_SA_cDNA_P Parameter: Treatment Value: 2mM SA vs. No Treatment
  misc_feature: MA Experiment ID: 20000113 Result: Down-regulated in Transcription
  misc_feature: MA Experiment 20000113 PARAMETER Experiment Name: At_42deg_Heat_cDNA_P Parameter: Temperature (deg C) Value: 42 vs. 22
  misc_feature: MA Experiment 20000113 PARAMETER Experiment Name: At_42deg_Heat_cDNA_P Parameter: Timepoint (hr) Value: 8
  misc_feature: MA Experiment 20000113 PARAMETER Experiment Name: At_42deg_Heat_cDNA_P Parameter: Tissue Value: Aerial
  misc_feature: MA Experiment ID: 20000184 Result: Down-regulated in Transcription
  misc_feature: MA Experiment 20000184 PARAMETER Experiment Name: At_Shoots__P Parameter: Age (day) Value: 7
  misc_feature: MA Experiment 20000184 PARAMETER Experiment Name: At_Shoots__P Parameter: Tissue Value: Shoots vs. Whole Plant
  misc_feature: MA Experiment ID: 20000185 Result: Down-regulated in Transcription
  misc_feature: MA Experiment 20000185 PARAMETER Experiment Name: At_Roots__P Parameter: Age (day) Value: 7 vs. 21
  misc_feature: MA Experiment 20000185 PARAMETER Experiment Name: At_Roots__P Parameter: Organism Value: A. thaliana
  misc_feature: MA Experiment 20000185 PARAMETER Experiment Name: At_Roots__P Parameter: Tissue Value: Roots vs. Whole Plant
  misc_feature: MA Experiment ID: 20000234 Result: Down-regulated in Transcription
  misc_feature: MA Experiment 20000234 PARAMETER Experiment Name: At_Siliques_P Parameter: Age (day) Value: 21
  misc_feature: MA Experiment 20000234 PARAMETER Experiment Name: At_Siliques_P Parameter: Organism Value: A. thaliana
  misc_feature: MA Experiment 20000234 PARAMETER Experiment Name: At_Siliques_P Parameter: Plant Line Value: WS
  misc_feature: MA Experiment 20000234 PARAMETER Experiment Name: At_Siliques_P Parameter: Tissue Value: Less Than 5mm Siliques vs. Whole Plant
  misc_feature: MA Experiment ID: 20000235 Result: Down-regulated in Transcription
  misc_feature: MA Experiment 20000235 PARAMETER Experiment Name: At_Siliques_P Parameter: Age (day) Value: 21
  misc_feature: MA Experiment 20000235 PARAMETER Experiment Name: At_Siliques_P Parameter: Organism Value: A. thaliana
  misc_feature: MA Experiment 20000235 PARAMETER Experiment Name: At_Siliques_P Parameter: Plant Line Value: WS
  misc_feature: MA Experiment 20000235 PARAMETER Experiment Name: At_Siliques_P Parameter: Tissue Value: 5-10mm Siliques vs. Whole Plant
  misc_feature: MA Experiment ID: 20000264 Result: Down-regulated in Transcription
  misc_feature: MA Experiment 20000264 PARAMETER Experiment Name: At_Open_Flower_P Parameter: Age (day) Value: 21
  misc_feature: MA Experiment 20000264 PARAMETER Experiment Name: At_Open_Flower_P Parameter: Plant Line Value: WS
  misc_feature: MA Experiment 20000264 PARAMETER Experiment Name: At_Open_Flower_P Parameter: Tissue Value: Open Flower vs. Whole Plant
  misc_feature: MA Experiment ID: 20000265 Result: Down-regulated in Transcription
  misc_feature: MA Experiment 20000265 PARAMETER Experiment Name: At_Open_Flower_P Parameter: Age (day) Value: 21
  misc_feature: MA Experiment 20000265 PARAMETER Experiment Name: At_Open_Flower_P Parameter: Plant Line Value: WS
  misc_feature: MA Experiment 20000265 PARAMETER Experiment Name: At_Open_Flower_P Parameter: Tissue Value: Closed Flower vs. Whole Plant
  misc_feature: MA Experiment ID: 20000286 Result: Down-regulated in Transcription
  misc_feature: MA Experiment 20000286 PARAMETER Experiment Name: At_Open_Flower_P Parameter: Age (day) Value: 21
  misc_feature: MA Experiment 20000286 PARAMETER Experiment Name: At_Open_Flower_P Parameter: Plant Line Value: WS
  misc_feature: MA Experiment 20000286 PARAMETER Experiment Name: At_Open_Flower_P Parameter: Tissue Value: Half Open vs. Whole Plant
  misc_feature: MA Experiment ID: 20000438 Result: Down-regulated in Transcription
  misc_feature: MA Experiment 20000438 PARAMETER Experiment Name: At_Shoots__P Parameter: Age (day) Value: 14
  misc_feature: MA Experiment 20000438 PARAMETER Experiment Name: At_Shoots__P Parameter: Tissue Value: Shoots vs. Whole Plant
  misc_feature: MA Experiment ID: 20000439 Result: Down-regulated in Transcription
  misc_feature: MA Experiment 20000439 PARAMETER Experiment Name: At_Roots__P Parameter: Age (day) Value: 14 vs. 21
  misc_feature: MA Experiment 20000439 PARAMETER Experiment Name: At_Roots__P Parameter: Organism Value: A. thaliana
  misc_feature: MA Experiment 20000439 PARAMETER Experiment Name: At_Roots__P Parameter: Tissue Value: Roots vs. Whole Plant
  misc_feature: MA Experiment ID: 20000573 Result: Down-regulated in Transcription
  misc_feature: MA Experiment 20000573 PARAMETER Experiment Name: At_100uM_ABA_Mutants__P Parameter: Organism Value: A. thaliana
  misc_feature: MA Experiment 20000573 PARAMETER Experiment Name: At_100uM_ABA_Mutants__P Parameter: Plant Line Value: CS22 vs. Ler wt
  misc_feature: MA Experiment 20000573 PARAMETER Experiment Name: At_100uM_ABA_Mutants__P Parameter: Timepoint (hr) Value: N/A
  misc_feature: MA Experiment 20000573 PARAMETER Experiment Name: At_100uM_ABA_Mutants__P Parameter: Tissue Value: Whole Plant
  misc_feature: MA Experiment 20000573 PARAMETER Experiment Name: At_100uM_ABA_Mutants__P Parameter: Treatment Value: None
  misc_feature: MA Experiment ID: 20000574 Result: Down-regulated in Transcription
  misc_feature: MA Experiment 20000574 PARAMETER Experiment Name: At_100uM_ABA_Mutants__P Parameter: Organism Value: A. thaliana
  misc_feature: MA Experiment 20000574 PARAMETER Experiment Name: At_100uM_ABA_Mutants__P Parameter: Plant Line Value: CS23 vs. Ler wt
  misc_feature: MA Experiment 20000574 PARAMETER Experiment Name: At_100uM_ABA_Mutants__P Parameter: Timepoint (hr) Value: N/A
  misc_feature: MA Experiment 20000574 PARAMETER Experiment Name: At_100uM_ABA_Mutants__P Parameter: Tissue Value: Whole Plant
  misc_feature: MA Experiment 20000574 PARAMETER Experiment Name: At_100uM_ABA_Mutants__P Parameter: Treatment Value: None
  misc_feature: MA Experiment ID: 20001247 Result: Up-regulated in Transcription
  misc_feature: MA Experiment 20001247 PARAMETER Experiment Name: At_Far-red-induction_P Parameter: Age (day) Value: 7
  misc_feature: MA Experiment 20001247 PARAMETER Experiment Name: At_Far-red-induction_P Parameter: Light Value: Far-red vs. White
  misc_feature: MA Experiment 20001247 PARAMETER Experiment Name: At_Far-red-induction_P Parameter: Organism Value: A. thaliana
  misc_feature: MA Experiment 20001247 PARAMETER Experiment Name: At_Far-red-induction_P Parameter: Plant Line Value: Columbia
  misc_feature: MA Experiment 20001247 PARAMETER Experiment Name: At_Far-red-induction_P Parameter: Timepoint (hr) Value: 1
  misc_feature: MA Experiment 20001247 PARAMETER Experiment Name: At_Far-red-induction_P Parameter: Tissue Value: Whole Plant
  misc_feature: MA Experiment ID: 20001248 Result: Up-regulated in Transcription
  misc_feature: MA Experiment 20001248 PARAMETER Experiment Name: At_Far-red-induction_P Parameter: Age (day) Value: 7
  misc_feature: MA Experiment 20001248 PARAMETER Experiment Name: At_Far-red-induction_P Parameter: Light Value: Far-red vs. White
  misc_feature: MA Experiment 20001248 PARAMETER Experiment Name: At_Far-red-induction_P Parameter: Organism Value: A. thaliana
  misc_feature: MA Experiment 20001248 PARAMETER Experiment Name: At_Far-red-induction_P Parameter: Plant Line Value: Columbia
  misc_feature: MA Experiment 20001248 PARAMETER Experiment Name: At_Far-red-induction_P Parameter: Timepoint (hr) Value: 4
  misc_feature: MA Experiment 20001248 PARAMETER Experiment Name: At_Far-red-induction_P Parameter: Tissue Value: Whole Plant
atgggttttatgtttactagttgtttttgctgtttgttcttaaatttagagtaacaatatcaaaaaggacaaatcttgatattgctttgattgctgttgtgtatgtatgtgtttttatagtgagagaagaaaaaaaagcacaatctttgaatggactggaatttcaaacttagctctggttatttatctggattcgatcaagaaccagatttatcaccaatggatggttcgatctcgtttggtgggtcgtcacagtcaaaagcggatttttcatttgatctaaaacttggaagaaacattggaaactcttcctctgtttttggtgatacagagcaagtgattagtcttagtaagtggaaagatagtgctttagctaaaccagaaggttcaagaagctcgagttcaaagagaacaagagggaatggtgttggaaccaaccagatgccgatttgtcttgttgatggatgtgattctgattttagtaattgtagagagtatcataagagacataaagtttgtgatgttcattcaaaaactcctgtggttactattaatggtcataaacagaggttttgtcaacaatgcagcaggtttcatgctttggaggagtttgatgaagggaagagaagttgtaggaaacgtcttgatggacataatcgaagacgacggaagccgcagcctgaacatatcggtcgtcctgccaacttctttacgggttttcaaggtagcaaattgctagagttttctggtggttcacatgtgtttccaactacatctgtgttgaacccgagctggggaaatagtcttgtaagcgttgctgtagccgccaatggttcgagttatgggcagagccagagctatgttgttggttcttctcctgcaaagacagggataatgtttccaatctcttcttctccaaacagtaccagaagcatagcaaaacaattccctttcttgcaagaagaagaaagctcgagaaccgcatcgttgtgtgagagaatgacgagttgcatccatgactctgattgtgctctctctcttctgtcatcctcctcgtcgtcagtccctcatttgcttcaaccaccactttctttgtcccaagaagcagttgagacagttttttacgggtcgggattgtttgagaatgcgagtgcagtctctgatggatcggttatatccggtaacgaggctgtccgtcttccgcagacattcccgtttcattgggagtagtagaagaagaagtaggtagatagatagaatcagaaagatctatttgtgtctcttctcttctccctcatttttcaatgttctttatcatcatcattgttcttgttaacactacaagaaatatggacattcttaacacaccgaaaacgctataataacgtttacatagcggattcataaacgctgtgtttgccgg

SEQ ID NO: 97765 - protein, 359 aa, Arabidopsis thaliana; identical to SEQ ID NO: 74454
  peptide (1)..(359): Ceres Seq. ID no. 13509491
  misc_feature (100)..(178): Pfam Name: SBP domain Pfam Description: SBP domain
  misc_feature (1)..(359): Homolog of NCBI NO: 18423163 NR Description: expressed protein [Arabidopsis thaliana] expressed protein [Arabidopsis thaliana] expressed protein [Arabidopsis thaliana]
  misc_feature (24)..(359): Homolog of NCBI NO: 21536841 NR Description: unknown [Arabidopsis thaliana]
  misc_feature (190)..(359): Homolog of NCBI NO: 20260414 NR Description: unknown protein [Arabidopsis thaliana]
  misc_feature (85)..(312): Homolog of NCBI NO: 13877707 NR Description: similar to squamosa-promoter binding protein 1
  misc_feature (85)..(312): Homolog of NCBI NO: 30697804 NR Description: squamosa-promoter binding protein -related
  misc_feature (79)..(177): Homolog of NCBI NO: 15028115 NR Description: putative squamosa-promoter binding protein
  misc_feature (79)..(177): Homolog of NCBI NO: 25352586 NR Description: squamosa promoter binding protein homolog 9 - Arabidopsis thaliana >gi|5931675|emb|CAB56591.1| squamosa
  misc_feature (79)..(177): Homolog of NCBI NO: 30688933 NR Description: squamosa-promoter binding protein -related
  misc_feature (79)..(177): Homolog of NCBI NO: 15227896 NR Description: squamosa-promoter binding protein -related
  misc_feature (34)..(311): Homolog of NCBI NO: 18396302 NR Description: squamosa-promoter binding protein 2 -related

SEQ ID NO: 97766 - protein, 336 aa, Arabidopsis thaliana; identical to SEQ ID NO: 74455
  peptide (1)..(336): Ceres Seq. ID no. 13509492
  misc_feature (77)..(155): Pfam Name: SBP domain Pfam Description: SBP domain
  misc_feature (1)..(336): Homolog of NCBI NO: 18423163 NR Description: expressed protein [Arabidopsis thaliana] expressed protein [Arabidopsis thaliana] expressed protein [Arabidopsis thaliana]
  misc_feature (1)..(336): Homolog of NCBI NO: 21536841 NR Description: unknown [Arabidopsis thaliana]
  misc_feature (167)..(336): Homolog of NCBI NO: 20260414 NR Description: unknown protein [Arabidopsis thaliana]
  misc_feature (62)..(289): Homolog of NCBI NO: 13877707 NR Description: similar to squamosa-promoter binding protein 1
  misc_feature (62)..(289): Homolog of NCBI NO: 30697804 NR Description: squamosa-promoter binding protein -related
  misc_feature (56)..(154): Homolog of NCBI NO: 15028115 NR Description: putative squamosa-promoter binding protein
  misc_feature (56)..(154): Homolog of NCBI NO: 15227896 NR Description: squamosa-promoter binding protein -related
  misc_feature (56)..(154): Homolog of NCBI NO: 30688933 NR Description: squamosa-promoter binding protein -related
  misc_feature (56)..(154): Homolog of NCBI NO: 25352586 NR Description: squamosa promoter binding protein homolog 9 - Arabidopsis thaliana >gi|5931675|emb|CAB56591.1| squamosa
  misc_feature (11)..(288): Homolog of NCBI NO: 18396302 NR Description: squamosa-promoter binding protein 2 -related

SEQ ID NO: 97767 - protein, 262 aa, Arabidopsis thaliana; identical to SEQ ID NO: 74456
  peptide (1)..(262): Ceres Seq. ID no. 13509493
  misc_feature (3)..(81): Pfam Name: SBP domain Pfam Description: SBP domain
  misc_feature (1)..(262): Homolog of NCBI NO: 18423163 NR Description: expressed protein [Arabidopsis thaliana] expressed protein [Arabidopsis thaliana] expressed protein [Arabidopsis thaliana]
  misc_feature (1)..(262): Homolog of NCBI NO: 21536841 NR Description: unknown [Arabidopsis thaliana]
  misc_feature (93)..(262): Homolog of NCBI NO: 20260414 NR Description: unknown protein [Arabidopsis thaliana]
  misc_feature (1)..(215): Homolog of NCBI NO: 13877707 NR Description: similar to squamosa-promoter binding protein 1
  misc_feature (1)..(215): Homolog of NCBI NO: 30697804 NR Description: squamosa-promoter binding protein -related
  misc_feature (1)..(80): Homolog of NCBI NO: 15028115 NR Description: putative squamosa-promoter binding protein
  misc_feature (1)..(80): Homolog of NCBI NO: 30688933 NR Description: squamosa-promoter binding protein -related
  misc_feature (1)..(80): Homolog of NCBI NO: 25352586 NR Description: squamosa promoter binding protein homolog 9 - Arabidopsis thaliana >gi|5931675|emb|CAB56591.1| squamosa
  misc_feature (1)..(80): Homolog of NCBI NO: 15227896 NR Description: squamosa-promoter binding protein -related
  misc_feature (1)..(214): Homolog of NCBI NO: 18396302 NR Description: squamosa-promoter binding protein 2 -related

SEQ ID NO: 97768 - DNA, 1416 bp, Arabidopsis thaliana
  misc_feature (1)..(1416): Ceres Seq. ID no. 13509655
  misc_feature: MA Experiment ID: 20000184 Result: Up-regulated in Transcription
  misc_feature: MA Experiment 20000184 PARAMETER Experiment Name: At_Shoots__P Parameter: Age (day) Value: 7
  misc_feature: MA Experiment 20000184 PARAMETER Experiment Name: At_Shoots__P Parameter: Tissue Value: Shoots vs. Whole Plant
  misc_feature: MA Experiment ID: 20000211 Result: Up-regulated in Transcription
  misc_feature: MA Experiment 20000211 PARAMETER Experiment Name: At_0.001percent_MeJA__P Parameter: Age (day) Value: 14
  misc_feature: MA Experiment 20000211 PARAMETER Experiment Name: At_0.001percent_MeJA__P Parameter: Organism Value: A. thaliana
  misc_feature: MA Experiment 20000211 PARAMETER Experiment Name: At_0.001percent_MeJA__P Parameter: Plant Line Value: WS
  misc_feature: MA Experiment 20000211 PARAMETER Experiment Name: At_0.001percent_MeJA__P Parameter: Timepoint (hr) Value: 1
  misc_feature: MA Experiment 20000211 PARAMETER Experiment Name: At_0.001percent_MeJA__P Parameter: Tissue Value: Aerial
  misc_feature: MA Experiment 20000211 PARAMETER Experiment Name: At_0.001percent_MeJA__P Parameter: Treatment Value: 0.001percent MeJA vs. No Treatment
  misc_feature: MA Experiment ID: 20000452 Result: Down-regulated in Transcription
  misc_feature: MA Experiment 20000452 PARAMETER Experiment Name: At_CS6879_Shoots-Roots_P Parameter: Age (day) Value: 14
  misc_feature: MA Experiment 20000452 PARAMETER Experiment Name: At_CS6879_Shoots-Roots_P Parameter: Organism Value: A. thaliana
  misc_feature: MA Experiment 20000452 PARAMETER Experiment Name: At_CS6879_Shoots-Roots_P Parameter: Plant Line Value: CS6879 vs. WS
  misc_feature: MA Experiment 20000452 PARAMETER Experiment Name: At_CS6879_Shoots-Roots_P Parameter: Tissue Value: Shoots
  misc_feature: MA Experiment ID: 20000460 Result: Down-regulated in Transcription
  misc_feature: MA Experiment 20000460 PARAMETER Experiment Name: At_10percent_PEG_P Parameter: Age (day) Value: 12
  misc_feature: MA Experiment 20000460 PARAMETER Experiment Name: At_10percent_PEG_P Parameter: Organism Value: A. thaliana
  misc_feature: MA Experiment 20000460 PARAMETER Experiment Name: At_10percent_PEG_P Parameter: Plant Line Value: WS
  misc_feature: MA Experiment 20000460 PARAMETER Experiment Name: At_10percent_PEG_P Parameter: Timepoint (day) Value: 12
  misc_feature: MA Experiment 20000460 PARAMETER Experiment Name: At_10percent_PEG_P Parameter: Tissue Value: Whole Plant
  misc_feature: MA Experiment 20000460 PARAMETER Experiment Name: At_10percent_PEG_P Parameter: Treatment Value: 10percent PEG vs. No Treatment
  misc_feature: MA Experiment ID: 20000495 Result: Up-regulated in Transcription
  misc_feature: MA Experiment 20000495 PARAMETER Experiment Name: At_Guard_Cells_P Parameter: Harvest Date Value: 8/2/2002
  misc_feature: MA Experiment 20000495 PARAMETER Experiment Name: At_Guard_Cells_P Parameter: Organism Value: A. thaliana
  misc_feature: MA Experiment 20000495 PARAMETER Experiment Name: At_Guard_Cells_P Parameter: Tissue Value: Guard Cells vs. Leaves
  misc_feature: MA Experiment ID: 20000527 Result: Down-regulated in Transcription
  misc_feature: MA Experiment 20000527 PARAMETER Experiment Name: At_10percent_PEG_P Parameter: Age (day) Value: 20
  misc_feature: MA Experiment 20000527 PARAMETER Experiment Name: At_10percent_PEG_P Parameter: Organism Value: A. thaliana
  misc_feature: MA Experiment 20000527 PARAMETER Experiment Name: At_10percent_PEG_P Parameter: Plant Line Value: WS
  misc_feature: MA Experiment 20000527 PARAMETER Experiment Name: At_10percent_PEG_P Parameter: Timepoint (day) Value: 20
  misc_feature: MA Experiment 20000527 PARAMETER Experiment Name: At_10percent_PEG_P Parameter: Tissue Value: Whole Plant
  misc_feature: MA Experiment 20000527 PARAMETER Experiment Name: At_10percent_PEG_P Parameter: Treatment Value: 10percent PEG vs. No Treatment
  misc_feature: MA Experiment ID: 20001247 Result: Up-regulated in Transcription
  misc_feature: MA Experiment 20001247 PARAMETER Experiment Name: At_Far-red-induction_P Parameter: Age (day) Value: 7
  misc_feature: MA Experiment 20001247 PARAMETER Experiment Name: At_Far-red-induction_P Parameter: Light Value: Far-red vs. White
  misc_feature: MA Experiment 20001247 PARAMETER Experiment Name: At_Far-red-induction_P Parameter: Organism Value: A. thaliana
  misc_feature: MA Experiment 20001247 PARAMETER Experiment Name: At_Far-red-induction_P Parameter: Plant Line Value: Columbia
  misc_feature: MA Experiment 20001247 PARAMETER Experiment Name: At_Far-red-induction_P Parameter: Timepoint (hr) Value: 1
  misc_feature: MA Experiment 20001247 PARAMETER Experiment Name: At_Far-red-induction_P Parameter: Tissue Value: Whole Plant
  misc_feature: MA Experiment ID: 20001248 Result: Up-regulated in Transcription
  misc_feature: MA Experiment 20001248 PARAMETER Experiment Name: At_Far-red-induction_P Parameter: Age (day) Value: 7
  misc_feature: MA Experiment 20001248 PARAMETER Experiment Name: At_Far-red-induction_P Parameter: Light Value: Far-red vs. White
  misc_feature: MA Experiment 20001248 PARAMETER Experiment Name: At_Far-red-induction_P Parameter: Organism Value: A. thaliana
  misc_feature: MA Experiment 20001248 PARAMETER Experiment Name: At_Far-red-induction_P Parameter: Plant Line Value: Columbia
  misc_feature: MA Experiment 20001248 PARAMETER Experiment Name: At_Far-red-induction_P Parameter: Timepoint (hr) Value: 4
  misc_feature: MA Experiment 20001248 PARAMETER Experiment Name: At_Far-red-induction_P Parameter: Tissue Value: Whole Plant
  misc_feature: MA Experiment ID: 20001906 Result: Up-regulated in Transcription
  misc_feature: MA Experiment 20001906 PARAMETER Experiment Name: At_Drought_Reproduction_P Parameter: Age (day) Value: 35
  misc_feature: MA Experiment 20001906 PARAMETER Experiment Name: At_Drought_Reproduction_P Parameter: Organism Value: A. thaliana
  misc_feature: MA Experiment 20001906 PARAMETER Experiment Name: At_Drought_Reproduction_P Parameter: Plant Line Value: WS
  misc_feature: MA Experiment 20001906 PARAMETER Experiment Name: At_Drought_Reproduction_P Parameter: Timepoint (day) Value: 5
  misc_feature: MA Experiment 20001906 PARAMETER Experiment Name: At_Drought_Reproduction_P Parameter: Tissue Value: Siliques
  misc_feature: MA Experiment 20001906 PARAMETER Experiment Name: At_Drought_Reproduction_P Parameter: Treatment Value: Drought vs. No Drought
agaaaccaaatgtcgttgataataatagaacactttctttctctctctaaaaagcaaaagtagtctagtcactgatttcttctaatcctccggtggagtgagagatgatatctccgacgttgtttcctctcctctgcgctttatttctatgtcttccagtggctgttatcttcacagtccagcgagaactcacctgcgttatctcgccggagtttggtttccgctctctttccgtcttctctctttactctcgaaatgtccccgactcttcttcttcttctccggcggttcggattcgacagccgattcccaaagaagacgaccctcttcttcgactatcttctcgggttaacccgaatctacctcccggttcgacccggaaaatagcttttatgtacttaacgacgtcgcctcttccgttcgcgcctctttgggagatgttcttcgacggaatctccaagaatctttacaatgtctacgttcacgcggatccgacccgagaatacgacccgccgttctccggcgtgttcttgaaccgggtcattcactctaaaccctcgctgagacacactcccactctaactgcggcggcgcgtagactactagcacacgcgcttctcgacgatccattgaattacatgtttgcggttatatcaccttcatgcgtaccaattcgctcctttgacttcacttacaagacattagtctcgtcgcgcaagagcttcatcgagatacttaaagacgagccgtggcagttcgataggtggacggcgattgggagacacgcgatgcttccggaggtgaagctcgaggagtttcggatcgggtctcagttttgggttttgaaacggagacacgcgcgtgtggtggcgcgtgatcggcgtatatgggtgaagtttaaccagacgtgcgtgcgggaagactcgtgttatcctgaagaaagttactttcctacccttcttaatatgcgggatccacgtggatgtgtccccgccacgcttactcacgtggactggactgttaacgacggtggtcacccgaggatgtacgagccggaggaagtcgtgcctgagctggtcttgcggcttagaaagactagaccaagatatggtgaggatggaatcaacggttcggagtggtctaaggttgagcggatggatccgtttctgtttgctaggaagttttcaccgcaggctcttgagccgttgctgggtatggctcgaaccgtcttgttcaatgactcagccggtggtgtgtgaatggtttctctaatggtattgttgtaaattcagttttagttttagtttttttttttttcttttttgtggggaaataataattgtaatttaaatgggtagctgggaaaaacaaaaacccgagtataccattatcgtgagtaaaaaagtaaactcgtcc

SEQ ID NO: 97769 - protein, 384 aa, Arabidopsis thaliana
  peptide (1)..(384): Ceres Seq. ID no. 13509656
  misc_feature (130)..(245): Pfam Name: Arabidopsis protein of unknown function, DUF266 Pfam Description: Arabidopsis protein of unknown function, DUF266
  misc_feature (1)..(384): Homolog of NCBI NO: 15236739 NR Description: expressed protein [Arabidopsis thaliana]
  misc_feature (6)..(381): Homolog of NCBI NO: 15239393 NR Description: hypothetical protein [Arabidopsis thaliana]
  misc_feature (75)..(203): Homolog of NCBI NO: 30688302 NR Description: expressed protein [Arabidopsis thaliana] putative protein [Arabidopsis thaliana] unknown protein [Arabidopsis thaliana]
  misc_feature (205)..(331): Homolog of NCBI NO: 30688302 NR Description: expressed protein [Arabidopsis thaliana] putative protein [Arabidopsis thaliana] unknown protein [Arabidopsis thaliana]
  misc_feature (354)..(379): Homolog of NCBI NO: 30688302 NR Description: expressed protein [Arabidopsis thaliana] putative protein [Arabidopsis thaliana] unknown protein [Arabidopsis thaliana]
  misc_feature (77)..(331): Homolog of NCBI NO: 15231121 NR Description: expressed protein [Arabidopsis thaliana]
  misc_feature (354)..(379): Homolog of NCBI NO: 15231121 NR Description: expressed protein [Arabidopsis thaliana]
  misc_feature (93)..(379): Homolog of NCBI NO: 34394888 NR Description: unknown protein [Oryza sativa (japonica
  misc_feature (85)..(369): Homolog of NCBI NO: 26452247 NR Description: unknown protein [Arabidopsis thaliana] Unknown protein [Arabidopsis thaliana]
  misc_feature (71)..(369): Homolog of NCBI NO: 38637182 NR Description: unknown protein [Oryza sativa (japonica
MISPTLFPLLCALFLCLPVAVIFTVQRELTCVISPEFGFRSLSVFSLYSRNVPDSSSSSPAVRIRQPIPKEDDPLLRLSSRVNPNLPPGSTRKIAFMYLTTSPLPFAPLWEMFFDGISKNLYNVYVHADPTREYDPPFSGVFLNRVIHSKPSLRHTPTLTAAARRLLAHALLDDPLNYMFAVISPSCVPIRSFDFTYKTLVSSRKSFIEILKDEPWQFDRWTAIGRHAMLPEVKLEEFRIGSQFWVLKRRHARVVARDRRIWVKFNQTCVREDSCYPEESYFPTLLNMRDPRGCVPATLTHVDWTVNDGGHPRMYEPEEVVPELVLRLRKTRPRYGEDGINGSEWSKVERMDPFLFARKFSPQALEPLLGMARTVLFNDSAGGV

SEQ ID NO: 97770 - protein, 288 aa, Arabidopsis thaliana; identical to SEQ ID NO: 44477
  peptide (1)..(288): Ceres Seq. ID no. 13509657
  misc_feature (34)..(149): Pfam Name: Arabidopsis protein of unknown function, DUF266 Pfam Description: Arabidopsis protein of unknown function, DUF266
  misc_feature (1)..(288): Homolog of NCBI NO: 15236739 NR Description: expressed protein [Arabidopsis thaliana]
  misc_feature (1)..(285): Homolog of NCBI NO: 15239393 NR Description: hypothetical protein [Arabidopsis thaliana]
  misc_feature (1)..(107): Homolog of NCBI NO: 30688302 NR Description: expressed protein [Arabidopsis thaliana] putative protein [Arabidopsis thaliana] unknown protein [Arabidopsis thaliana]
  misc_feature (109)..(235): Homolog of NCBI NO: 30688302 NR Description: expressed protein [Arabidopsis thaliana] putative protein [Arabidopsis thaliana] unknown protein [Arabidopsis thaliana]
  misc_feature (258)..(283): Homolog of NCBI NO: 30688302 NR Description: expressed protein [Arabidopsis thaliana] putative protein [Arabidopsis thaliana] unknown protein [Arabidopsis thaliana]
  misc_feature (1)..(235): Homolog of NCBI NO: 15231121 NR Description: expressed protein [Arabidopsis thaliana]
  misc_feature (258)..(283): Homolog of NCBI NO: 15231121 NR Description: expressed protein [Arabidopsis thaliana]
  misc_feature (1)..(283): Homolog of NCBI NO: 34394888 NR Description: unknown protein [Oryza sativa (japonica
  misc_feature (1)..(273): Homolog of NCBI NO: 26452247 NR Description: unknown protein [Arabidopsis thaliana] Unknown protein [Arabidopsis thaliana]
  misc_feature (1)..(273): Homolog of NCBI NO: 38637182 NR Description: unknown protein [Oryza sativa (japonica

SEQ ID NO: 97771 - protein, 273 aa, Arabidopsis thaliana; identical to SEQ ID NO: 44478
  peptide (1)..(273): Ceres Seq. ID no. 13509658
  misc_feature (19)..(134): Pfam Name: Arabidopsis protein of unknown function, DUF266 Pfam Description: Arabidopsis protein of unknown function, DUF266
  misc_feature (1)..(273): Homolog of NCBI NO: 15236739 NR Description: expressed protein [Arabidopsis thaliana]
  misc_feature (1)..(270): Homolog of NCBI NO: 15239393 NR Description: hypothetical protein [Arabidopsis thaliana]
  misc_feature (1)..(92): Homolog of NCBI NO: 30688302 NR Description: expressed protein [Arabidopsis thaliana] putative protein [Arabidopsis thaliana] unknown protein [Arabidopsis thaliana]
  misc_feature (94)..(220): Homolog of NCBI NO: 30688302 NR Description: expressed protein [Arabidopsis thaliana] putative protein [Arabidopsis thaliana] unknown protein [Arabidopsis thaliana]
  misc_feature (243)..(268): Homolog of NCBI NO: 30688302 NR Description: expressed protein [Arabidopsis thaliana] putative protein [Arabidopsis thaliana] unknown protein [Arabidopsis thaliana]
  misc_feature (1)..(220): Homolog of NCBI NO: 15231121 NR Description: expressed protein [Arabidopsis thaliana]
  misc_feature (243)..(268): Homolog of NCBI NO: 15231121 NR Description: expressed protein [Arabidopsis thaliana]
  misc_feature (1)..(268): Homolog of NCBI NO: 34394888 NR Description: unknown protein [Oryza sativa (japonica
  misc_feature (1)..(258): Homolog of NCBI NO: 26452247 NR Description: unknown protein [Arabidopsis thaliana] Unknown protein [Arabidopsis thaliana]
  misc_feature (1)..(258): Homolog of NCBI NO: 38637182 NR Description: unknown protein [Oryza sativa (japonica

SEQ ID NO: 97772 - DNA, 1581 bp, Arabidopsis thaliana
  misc_feature (1)..(1581): Ceres Seq. ID no. 13509924
  misc_feature: MA Experiment ID: 20000171 Result: Down-regulated in Transcription
  misc_feature: MA Experiment 20000171 PARAMETER Experiment Name: At_42deg_Heat_P Parameter: Age (day) Value: 14
  misc_feature: MA Experiment 20000171 PARAMETER Experiment Name: At_42deg_Heat_P Parameter: Organism Value: A. thaliana
  misc_feature: MA Experiment 20000171 PARAMETER Experiment Name: At_42deg_Heat_P Parameter: Plant Line Value: WS
  misc_feature: MA Experiment 20000171 PARAMETER Experiment Name: At_42deg_Heat_P Parameter: Temperature (deg C) Value: 42 vs. 22
  misc_feature: MA Experiment 20000171 PARAMETER Experiment Name: At_42deg_Heat_P Parameter: Timepoint (hr) Value: 1
  misc_feature: MA Experiment 20000171 PARAMETER Experiment Name: At_42deg_Heat_P Parameter: Tissue Value: Aerial
  misc_feature: MA Experiment ID: 20000173 Result: Down-regulated in Transcription
  misc_feature: MA Experiment 20000173 PARAMETER Experiment Name: At_42deg_Heat_P Parameter: Age (day) Value: 14
  misc_feature: MA Experiment 20000173 PARAMETER Experiment Name: At_42deg_Heat_P Parameter: Organism Value: A. thaliana
  misc_feature: MA Experiment 20000173 PARAMETER Experiment Name: At_42deg_Heat_P Parameter: Plant Line Value: WS
  misc_feature: MA Experiment 20000173 PARAMETER Experiment Name: At_42deg_Heat_P Parameter: Temperature (deg C) Value: 42 vs. 22
  misc_feature: MA Experiment 20000173 PARAMETER Experiment Name: At_42deg_Heat_P Parameter: Timepoint (hr) Value: 6
  misc_feature: MA Experiment 20000173 PARAMETER Experiment Name: At_42deg_Heat_P Parameter: Tissue Value: Aerial
  misc_feature: MA Experiment ID: 20000179 Result: Down-regulated in Transcription
  misc_feature: MA Experiment 20000179 PARAMETER Experiment Name: At_Germinating_Seeds_P Parameter: Age (hr) Value: 6 vs. 0
  misc_feature: MA Experiment 20000179 PARAMETER Experiment Name: At_Germinating_Seeds_P Parameter: Tissue Value: Germinating Seeds
  misc_feature: MA Experiment ID: 20000184 Result: Down-regulated in Transcription
  misc_feature: MA Experiment 20000184 PARAMETER Experiment Name: At_Shoots__P Parameter: Age (day) Value: 7
  misc_feature: MA Experiment 20000184 PARAMETER Experiment Name: At_Shoots__P Parameter: Tissue Value: Shoots vs. Whole Plant
  misc_feature: MA Experiment ID: 20000437 Result: Up-regulated in Transcription
  misc_feature: MA Experiment 20000437 PARAMETER Experiment Name: At_Drought_P Parameter: Age (day) Value: 8
  misc_feature: MA Experiment 20000437 PARAMETER Experiment Name: At_Drought_P Parameter: Organism Value: A. thaliana
  misc_feature: MA Experiment 20000437 PARAMETER Experiment Name: At_Drought_P Parameter: Plant Line Value: WS
  misc_feature: MA Experiment 20000437 PARAMETER Experiment Name: At_Drought_P Parameter: Timepoint (hr) Value: 24
  misc_feature: MA Experiment 20000437 PARAMETER Experiment Name: At_Drought_P Parameter: Tissue Value: Whole Plant
  misc_feature: MA Experiment 20000437 PARAMETER Experiment Name: At_Drought_P Parameter: Treatment Value: Drought vs. No Drought
  misc_feature: MA Experiment ID: 20000439 Result: Up-regulated in Transcription
  misc_feature: MA Experiment 20000439 PARAMETER Experiment Name: At_Roots__P Parameter: Age (day) Value: 14 vs. 21
  misc_feature: MA Experiment 20000439 PARAMETER Experiment Name: At_Roots__P Parameter: Organism Value: A. thaliana
  misc_feature: MA Experiment 20000439 PARAMETER Experiment Name: At_Roots__P Parameter: Tissue Value: Roots vs. Whole Plant
  misc_feature: MA Experiment ID: 20001247 Result: Down-regulated in Transcription
  misc_feature: MA Experiment 20001247 PARAMETER Experiment Name: At_Far-red-induction_P Parameter: Age (day) Value: 7
  misc_feature: MA Experiment 20001247 PARAMETER Experiment Name: At_Far-red-induction_P Parameter: Light Value: Far-red vs. White
  misc_feature: MA Experiment 20001247 PARAMETER Experiment Name: At_Far-red-induction_P Parameter: Organism Value: A. thaliana
  misc_feature: MA Experiment 20001247 PARAMETER Experiment Name: At_Far-red-induction_P Parameter: Plant Line Value: Columbia
  misc_feature: MA Experiment 20001247 PARAMETER Experiment Name: At_Far-red-induction_P Parameter: Timepoint (hr) Value: 1
  misc_feature: MA Experiment 20001247 PARAMETER Experiment Name: At_Far-red-induction_P Parameter: Tissue Value: Whole Plant
atgcatccgattaatgcggtggttgcggcgaggatgttagccggaatcagtcaatctaacgccttacaaagcgaggcgattccgtttggatcgcttgagtggatcacttacgccggaatctcttgtttccttgttctcttcgccggaattatgtctggtctcactttagggcttatgtctctcggtctcgttgagctcgagattctccaacggagtggtactccaaaagagaagaaacaatctgctgcgatttttccggttgttcagaaacagcatcagcttttagtgactctgcttctgtttaatgctcttgctatggaggggcttcctatatacttggataagatattcaatgagtatgttgctattattctatccgtcactttcgttctattcgttggagaggttattcctcaagctatatgtactagatatggactagcagtgggagctaatttggtctggcttatgttggattgggtgttgggacacaatgaccctttatttaggcgagctcagttaaaagctcttgtgtccattcacggtgaagctgctggaaagggaggtgaacttacacatgatgagactacaattataagtggagcacttgatttgactgaaaagaccgctcaagaagccatgacaccaattgaatcaacgttttccttggatgtaaattcaaagttggaccgggaagctatggataagattcaagcacgaggtcatagccgcgttcctgtctactccgataatccaaaaaatgttattggacttctcttggtgaagagtctccttacagttcgccctgaaacagggactcttgtcagcgcagttggtatacgccgaattccaagggttccggctaatatgcctctgtatgatattctgaatgagtttcaaaaagggagcagtcacatggctgcagttgtgaaggttaaggggaaaagcaaaggtcatccttcaactttgcatgaagaaaatagcggtgaaagcaacgtctcaagtaacaactccgagttgactgcacctcttttactaaagcgagaaggaaaccacgacagtgtcattgtccgcatcgacaaggctaatggacaatcgttcatcagcgaggccggcagacaggggttctcacatacttcagaggagattgaggatggagacgtaattggtatcatcacattagaagatgtgtttgaagaacttttgcaggaggagattgtggatgaaacagatgagtatatagacgtgcataaaaggattcgtgtggcaactgtagcagcagtggccatttcatcattagcgagagcaccttcaggccggaggttacttggcccaaaaggaagtggaggaccaaaaacgccaaaggcatcttctactcccaaaccggatgataaactgatgggaaccatgaccggtcctcctcaaggaaacaactgattaggtgagtgttgagtttttgcttgagatgtgaaaaataaataaggttttgaaacttcgatcagtttagagcaccttctctctttcactgcttaactacatatgtataatacatgtcgatataatctacaattctttcaactt

SEQ ID NO: 97773 - protein, 478 aa, Arabidopsis thaliana
  peptide (1)..(478): Ceres Seq. ID no. 13509925
  misc_feature (36)..(195): Pfam Name: Domain of unknown function DUF21 Pfam Description: Domain of unknown function DUF21
  misc_feature (1)..(231): Homolog of NCBI NO: 30682755 NR Description: expressed protein [Arabidopsis thaliana]
  misc_feature (282)..(478): Homolog of NCBI NO: 30682755 NR Description: expressed protein [Arabidopsis thaliana]
  misc_feature (1)..(231): Homolog of NCBI NO: 7485191 NR Description: hypothetical protein - Arabidopsis thaliana hypothetical protein [Arabidopsis thaliana]
  misc_feature (282)..(478): Homolog of NCBI NO: 7485191 NR Description: hypothetical protein - Arabidopsis thaliana hypothetical protein [Arabidopsis thaliana]
  misc_feature (156)..(478): Homolog of NCBI NO: 15236442 NR Description: hypothetical protein [Arabidopsis thaliana]
  misc_feature (1)..(157): Homolog of NCBI NO: 15236442 NR Description: hypothetical protein [Arabidopsis thaliana]
  misc_feature (157)..(436): Homolog of NCBI NO: 15218765 NR Description: hypothetical protein [Arabidopsis thaliana]
  misc_feature (19)..(157): Homolog of NCBI NO: 15218765 NR Description: hypothetical protein [Arabidopsis thaliana]
  misc_feature (157)..(365): Homolog of NCBI NO: 15237264 NR Description: hypothetical protein [Arabidopsis thaliana] gene_id:F6N7.28~pir||T04987~similar to unknown protein
  misc_feature (34)..(157): Homolog of NCBI NO: 15237264 NR Description: hypothetical protein [Arabidopsis thaliana] gene_id:F6N7.28~pir||T04987~similar to unknown protein
MHPINAVVAARMLAGISQSNALQSEAIPFGSLEWITYAGISCFLVLFAGIMSGLTLGLMSLGLVELEILQRSGTPKEKKQSAAIFPVVQKQHQLLVTLLLFNALAMEGLPIYLDKIFNEYVAIILSVTFVLFVGEVIPQAICTRYGLAVGANLVWLMLDWVLGHNDPLFRRAQLKALVSIHGEAAGKGGELTHDETTIISGALDLTEKTAQEAMTPIESTFSLDVNSKLDREAMDKIQARGHSRVPVYSDNPKNVIGLLLVKSLLTVRPETGTLVSAVGIRRIPRVPANMPLYDILNEFQKGSSHMAAVVKVKGKSKGHPSTLHEENSGESNVSSNNSELTAPLLLKREGNHDSVIVRIDKANGQSFISEAGRQGFSHTSEEIEDGDVIGIITLEDVFEELLQEEIVDETDEYIDVHKRIRVATVAAVAISSLARAPSGRRLLGPKGSGGPKTPKASSTPKPDDKLMGTMTGPPQGNN

SEQ ID NO: 97774 - protein, 467 aa, Arabidopsis thaliana
  peptide (1)..(467): Ceres Seq. ID no. 13509926
  misc_feature (25)..(184): Pfam Name: Domain of unknown function DUF21 Pfam Description: Domain of unknown function DUF21
  misc_feature (1)..(220): Homolog of NCBI NO: 30682755 NR Description: expressed protein [Arabidopsis thaliana]
  misc_feature (271)..(467): Homolog of NCBI NO: 30682755 NR Description: expressed protein [Arabidopsis thaliana]
  misc_feature (1)..(220): Homolog of NCBI NO: 7485191 NR Description: hypothetical protein - Arabidopsis thaliana hypothetical protein [Arabidopsis thaliana]
  misc_feature (271)..(467): Homolog of NCBI NO: 7485191 NR Description: hypothetical protein - Arabidopsis thaliana hypothetical protein [Arabidopsis thaliana]
  misc_feature (145)..(467): Homolog of NCBI NO: 15236442 NR Description: hypothetical protein [Arabidopsis thaliana]
  misc_feature (1)..(146): Homolog of NCBI NO: 15236442 NR Description: hypothetical protein [Arabidopsis thaliana]
  misc_feature (146)..(425): Homolog of NCBI NO: 15218765 NR Description: hypothetical protein [Arabidopsis thaliana]
  misc_feature (8)..(146): Homolog of NCBI NO: 15218765 NR Description: hypothetical protein [Arabidopsis thaliana]
  misc_feature (146)..(354): Homolog of NCBI NO: 15237264 NR Description: hypothetical protein [Arabidopsis thaliana] gene_id:F6N7.28~pir||T04987~similar to unknown protein
  misc_feature (23)..(146): Homolog of NCBI NO: 15237264 NR Description: hypothetical protein [Arabidopsis thaliana] gene_id:F6N7.28~pir||T04987~similar to unknown protein
MLAGISQSNALQSEAIPFGSLEWITYAGISCFLVLFAGIMSGLTLGLMSLGLVELEILQRSGTPKEKKQSAAIFPVVQKQHQLLVTLLLFNALAMEGLPIYLDKIFNEYVAIILSVTFVLFVGEVIPQAICTRYGLAVGANLVWLMLDWVLGHNDPLFRRAQLKALVSIHGEAAGKGGELTHDETTIISGALDLTEKTAQEAMTPIESTFSLDVNSKLDREAMDKIQARGHSRVPVYSDNPKNVIGLLLVKSLLTVRPETGTLVSAVGIRRIPRVPANMPLYDILNEFQKGSSHMAAVVKVKGKSKGHPSTLHEENSGESNVSSNNSELTAPLLLKREGNHDSVIVRIDKANGQSFISEAGRQGFSHTSEEIEDGDVIGIITLEDVFEELLQEEIVDETDEYIDVHKRIRVATVAAVAISSLARAPSGRRLLGPKGSGGPKTPKASSTPKPDDKLMGTMTGPPQGNN

SEQ ID NO: 97775 - protein, 428 aa, Arabidopsis thaliana
  peptide (1)..(428): Ceres Seq. ID no. 13509927
  misc_feature (1)..(145): Pfam Name: Domain of unknown function DUF21 Pfam Description: Domain of unknown function DUF21
  misc_feature (1)..(181): Homolog of NCBI NO: 30682755 NR Description: expressed protein [Arabidopsis thaliana]
  misc_feature (232)..(428): Homolog of NCBI NO: 30682755 NR Description: expressed protein [Arabidopsis thaliana]
  misc_feature (1)..(181): Homolog of NCBI NO: 7485191 NR Description: hypothetical protein - Arabidopsis thaliana hypothetical protein [Arabidopsis thaliana]
  misc_feature (232)..(428): Homolog of NCBI NO: 7485191 NR Description: hypothetical protein - Arabidopsis thaliana hypothetical protein [Arabidopsis thaliana]
  misc_feature (106)..(428): Homolog of NCBI NO: 15236442 NR Description: hypothetical protein [Arabidopsis thaliana]
  misc_feature (1)..(107): Homolog of NCBI NO: 15236442 NR Description: hypothetical protein [Arabidopsis thaliana]
  misc_feature (107)..(386): Homolog of NCBI NO: 15218765 NR Description: hypothetical protein [Arabidopsis thaliana]
  misc_feature (1)..(107): Homolog of NCBI NO: 15218765 NR Description: hypothetical protein [Arabidopsis thaliana]
  misc_feature (107)..(315): Homolog of NCBI NO: 15237264 NR Description: hypothetical protein [Arabidopsis thaliana] gene_id:F6N7.28~pir||T04987~similar to unknown protein
  misc_feature (1)..(107): Homolog of NCBI NO: 15237264 NR Description: hypothetical protein [Arabidopsis thaliana] gene_id:F6N7.28~pir||T04987~similar to unknown protein
MSGLTLGLMSLGLVELEILQRSGTPKEKKQSAAIFPVVQKQHQLLVTLLLFNALAMEGLPIYLDKIFNEYVAIILSVTFVLFVGEVIPQAICTRYGLAVGANLVWLMLDWVLGHNDPLFRRAQLKALVSIHGEAAGKGGELTHDETTIISGALDLTEKTAQEAMTPIESTFSLDVNSKLDREAMDKIQARGHSRVPVYSDNPKNVIGLLLVKSLLTVRPETGTLVSAVGIRRIPRVPANMPLYDILNEFQKGSSHMAAVVKVKGKSKGHPSTLHEENSGESNVSSNNSELTAPLLLKREGNHDSVIVRIDKANGQSFISEAGRQGFSHTSEEIEDGDVIGIITLEDVFEELLQEEIVDETDEYIDVHKRIRVATVAAVAISSLARAPSGRRLLGPKGSGGPKTPKASSTPKPDDKLMGTMTGPPQGNN

SEQ ID NO: 97776 - DNA, 1168 bp, Arabidopsis thaliana
  misc_feature (1)..(1168): Ceres Seq. ID no. 13575737
  misc_feature: MA Experiment ID: 20000315 Result: Down-regulated in Transcription
  misc_feature: MA Experiment 20000315 PARAMETER Experiment Name: At_14day_Shoots-Roots_Sub_P Parameter: Age (day) Value: 14
  misc_feature: MA Experiment 20000315 PARAMETER Experiment Name: At_14day_Shoots-Roots_Sub_P Parameter: Organism Value: A. thaliana
  misc_feature: MA Experiment 20000315 PARAMETER Experiment Name: At_14day_Shoots-Roots_Sub_P Parameter: Plant Line Value: WS
  misc_feature: MA Experiment 20000315 PARAMETER Experiment Name: At_14day_Shoots-Roots_Sub_P Parameter: Tissue Value: Shoots vs. Whole Plant
  misc_feature: MA Experiment ID: 20000329 Result: Up-regulated in Transcription
  misc_feature: MA Experiment 20000329 PARAMETER Experiment Name: At_4deg_Cold_Sub_P Parameter: Age (day) Value: 14
  misc_feature: MA Experiment 20000329 PARAMETER Experiment Name: At_4deg_Cold_Sub_P Parameter: Organism Value: A. thaliana
  misc_feature: MA Experiment 20000329 PARAMETER Experiment Name: At_4deg_Cold_Sub_P Parameter: Plant Line Value: WS
  misc_feature: MA Experiment 20000329 PARAMETER Experiment Name: At_4deg_Cold_Sub_P Parameter: Temperature (deg C) Value: 4 vs. 22
  misc_feature: MA Experiment 20000329 PARAMETER Experiment Name: At_4deg_Cold_Sub_P Parameter: Timepoint (hr) Value: 6
  misc_feature: MA Experiment 20000329 PARAMETER Experiment Name: At_4deg_Cold_Sub_P Parameter: Tissue Value: Aerial
  misc_feature: MA Experiment ID: 20000355 Result: Down-regulated in Transcription
  misc_feature: MA Experiment 20000355 PARAMETER Experiment Name: At_Siliques_Sub_P Parameter: Age (day) Value: 21
  misc_feature: MA Experiment 20000355 PARAMETER Experiment Name: At_Siliques_Sub_P Parameter: Organism Value: A. thaliana
  misc_feature: MA Experiment 20000355 PARAMETER Experiment Name: At_Siliques_Sub_P Parameter: Plant Line Value: WS
  misc_feature: MA Experiment 20000355 PARAMETER Experiment Name: At_Siliques_Sub_P Parameter: Tissue Value: Less Than 5mm Siliques vs. Whole Plant
ggtttttctgaagatccaaggcacacaaaaaaacagctttttttgtttcttcaatcaaggattttccagggttttgataaccccatgggttcagggttctctctgtttcaaaagaatttatcgtcttgttatggagatcgagatctgttgcagcctggtttaggagatttgcctgaaagttgtgtggctttgattctccagaatttggatcccgttgagatctgtagattctccaagctaaacacggcttttcatggcgcttcttgggctgatttcgtttgggaatcgaaacttcctccagattataaattgattctcgagaaaatccttggtagtttccctgataatttgcgtaaaagagacatctttacttttctctctcgagttaattccttcgacgagggcaacaagaaagcttgggtagataaacgaacaggtgggctctgtttatgcacatcagccaagggcttatccataaccggaattgatgatcggagatactggagtcatattccgtctgatgattctcgatttgcttcagtagcttatgttcaacagatctggtggtttcaagttgatggagaaattgatttcccatttccagctggaacctacagtgtttacttcaggcttcagctaggcaaaccaggcaagcggtttggttggaaggttgttgacaccgaacaggttcatggctggaacattaaacctgttcgttttcaactctcgactgaagatggtcaacattcttcatctcaatgtatgttaaccgaagcaggaaactggagtcattaccatgctggagactttgtggtcggtaaatcgaaaagttcatcgacgaagattaagttctcgatgactcagattgattgcacgcatactaaaggcgggttatgtgtagattctgtagttgtgtatccgagctcgtgtaaggaccggttgatgcagatttaagttgcaaaccggagtttgggtgtagtttagaggtttaaaaaagctgttttttttttttaaagtggttttaaaaccttttgtagaatctttgagggggtaattagaaaactcagtgtaaagagaaaaagagggtaattactaattagggttgttgttttattgtttaggtcaaatgtaaactttaagtttgaagttattaaagagttcttgagtt

SEQ ID NO: 97777 - protein, 317 aa, Arabidopsis thaliana
  peptide (1)..(317): Ceres Seq. ID no. 13575738
  misc_feature (29)..(317): Homolog of NCBI NO: 15221677 NR Description: F-box protein (SKP1 interacting partner 3-related)
  misc_feature (29)..(314): Homolog of NCBI NO: 15222051 NR Description: F-box protein (SKP1 interacting partner [Arabidopsis thaliana] >gi|9502385|gb|AAF88092.1|AC025417_20 [Arabidopsis thaliana] >gi|26450401|dbj|BAC42315.1| unknown
  misc_feature (130)..(317): Homolog of NCBI NO: 27754673 NR Description: unknown protein [Arabidopsis thaliana]
  misc_feature (54)..(310): Homolog of NCBI NO: 30695337 NR Description: F-box protein (lectin-related) [Arabidopsis
  misc_feature (54)..(310): Homolog of NCBI NO: 23397334 NR Description: unknown protein [Arabidopsis thaliana]
  misc_feature (53)..(315): Homolog of NCBI NO: 37536186 NR Description: unknown protein [Oryza sativa (japonica
  misc_feature (119)..(307): Homolog of NCBI NO: 38567911 NR Description: OSJNBa0088I22.7 [Oryza sativa (japonica
  misc_feature (57)..(105): Homolog of NCBI NO: 38567911 NR Description: OSJNBa0088I22.7 [Oryza sativa (japonica
  misc_feature (53)..(307): Homolog of NCBI NO: 15242282 NR Description: F-box protein (SKP1 interacting partner [Arabidopsis thaliana] >gi|18175688|gb|AAL59911.1| unknown [Arabidopsis thaliana] >gi|20465821|gb|AAM20015.1| unknown
  misc_feature (29)..(307): Homolog of NCBI NO: 15231726 NR Description: F-box protein (SKP1 interacting partner 3-related)
GFSEDPRHTKKQLFLFLQSRIFQGFDNPMGSGFSLFQKNLSSCYGDRDLLQPGLGDLPESCVALILQNLDPVEICRFSKLNTAFHGASWADFVWESKLPPDYKLILEKILGSFPDNLRKRDIFTFLSRVNSFDEGNKKAWVDKRTGGLCLCTSAKGLSITGIDDRRYWSHIPSDDSRFASVAYVQQIWWFQVDGEIDFPFPAGTYSVYFRLQLGKPGKRFGWKVVDTEQVHGWNIKPVRFQLSTEDGQHSSSQCMLTEAGNWSHYHAGDFVVGKSKSSSTKIKFSMTQIDCTHTKGGLCVDSVVVYPSSCKDRLMQI

SEQ ID NO: 97778 - protein, 289 aa, Arabidopsis thaliana
  peptide (1)..(289): Ceres Seq. ID no. 13575739
  misc_feature (1)..(289): Homolog of NCBI NO: 15221677 NR Description: F-box protein (SKP1 interacting partner 3-related)
  misc_feature (1)..(286): Homolog of NCBI NO: 15222051 NR Description: F-box protein (SKP1 interacting partner [Arabidopsis thaliana] >gi|9502385|gb|AAF88092.1|AC025417_20 [Arabidopsis thaliana] >gi|26450401|dbj|BAC42315.1| unknown
  misc_feature (102)..(289): Homolog of NCBI NO: 27754673 NR Description: unknown protein [Arabidopsis thaliana]
  misc_feature (26)..(282): Homolog of NCBI NO: 30695337 NR Description: F-box protein (lectin-related) [Arabidopsis
  misc_feature (26)..(282): Homolog of NCBI NO: 23397334 NR Description: unknown protein [Arabidopsis thaliana]
  misc_feature (25)..(287): Homolog of NCBI NO: 37536186 NR Description: unknown protein [Oryza sativa (japonica
  misc_feature (91)..(279): Homolog of NCBI NO: 38567911 NR Description: OSJNBa0088I22.7 [Oryza sativa (japonica
  misc_feature (29)..(77): Homolog of NCBI NO: 38567911 NR Description: OSJNBa0088I22.7 [Oryza sativa (japonica
  misc_feature (25)..(279): Homolog of NCBI NO: 15242282 NR Description: F-box protein (SKP1 interacting partner [Arabidopsis thaliana] >gi|18175688|gb|AAL59911.1| unknown [Arabidopsis thaliana] >gi|20465821|gb|AAM20015.1| unknown
  misc_feature (1)..(279): Homolog of NCBI NO: 15231726 NR Description: F-box protein (SKP1 interacting partner 3-related)
MGSGFSLFQKNLSSCYGDRDLLQPGLGDLPESCVALILQNLDPVEICRFSKLNTAFHGASWADFVWESKLPPDYKLILEKILGSFPDNLRKRDIFTFLSRVNSFDEGNKKAWVDKRTGGLCLCTSAKGLSITGIDDRRYWSHIPSDDSRFASVAYVQQIWWFQVDGEIDFPFPAGTYSVYFRLQLGKPGKRFGWKVVDTEQVHGWNIKPVRFQLSTEDGQHSSSQCMLTEAGNWSHYHAGDFVVGKSKSSSTKIKFSMTQIDCTHTKGGLCVDSVVVYPSSCKDRLMQI

SEQ ID NO: 97779 - DNA, 2823 bp, Arabidopsis thaliana
  misc_feature (1)..(2823): Ceres Seq. ID no. 13575926
  misc_feature: MA Experiment ID: 20000169 Result: Down-regulated in Transcription
  misc_feature: MA Experiment 20000169 PARAMETER Experiment Name: At_100uM_ABA_P Parameter: Age (day) Value: 14
  misc_feature: MA Experiment 20000169 PARAMETER Experiment Name: At_100uM_ABA_P Parameter: Organism Value: A. thaliana
  misc_feature: MA Experiment 20000169 PARAMETER Experiment Name: At_100uM_ABA_P Parameter: Plant Line Value: WS
  misc_feature: MA Experiment 20000169 PARAMETER Experiment Name: At_100uM_ABA_P Parameter: Timepoint (hr) Value: 6
  misc_feature: MA Experiment 20000169 PARAMETER Experiment Name: At_100uM_ABA_P Parameter: Tissue Value: Aerial
  misc_feature: MA Experiment 20000169 PARAMETER Experiment Name: At_100uM_ABA_P Parameter: Treatment Value: 100uM ABA vs. No Treatment
  misc_feature: MA Experiment ID: 20000185 Result: Down-regulated in Transcription
  misc_feature: MA Experiment 20000185 PARAMETER Experiment Name: At_Roots__P Parameter: Age (day) Value: 7 vs. 21
  misc_feature: MA Experiment 20000185 PARAMETER Experiment Name: At_Roots__P Parameter: Organism Value: A. thaliana
  misc_feature: MA Experiment 20000185 PARAMETER Experiment Name: At_Roots__P Parameter: Tissue Value: Roots vs. Whole Plant
  misc_feature: MA Experiment ID: 20000234 Result: Down-regulated in Transcription
  misc_feature: MA Experiment 20000234 PARAMETER Experiment Name: At_Siliques_P Parameter: Age (day) Value: 21
  misc_feature: MA Experiment 20000234 PARAMETER Experiment Name: At_Siliques_P Parameter: Organism Value: A. thaliana
  misc_feature: MA Experiment 20000234 PARAMETER Experiment Name: At_Siliques_P Parameter: Plant Line Value: WS
  misc_feature: MA Experiment 20000234 PARAMETER Experiment Name: At_Siliques_P Parameter: Tissue Value: Less Than 5mm Siliques vs. Whole Plant
  misc_feature: MA Experiment ID: 20000264 Result: Down-regulated in Transcription
  misc_feature: MA Experiment 20000264 PARAMETER Experiment Name: At_Open_Flower_P Parameter: Age (day) Value: 21
  misc_feature: MA Experiment 20000264 PARAMETER Experiment Name: At_Open_Flower_P Parameter: Plant Line Value: WS
  misc_feature: MA Experiment 20000264 PARAMETER Experiment Name: At_Open_Flower_P Parameter: Tissue Value: Open Flower vs. Whole Plant
  misc_feature: MA Experiment ID: 20000437 Result: Down-regulated in Transcription
  misc_feature: MA Experiment 20000437 PARAMETER Experiment Name: At_Drought_P Parameter: Age (day) Value: 8
  misc_feature: MA Experiment 20000437 PARAMETER Experiment Name: At_Drought_P Parameter: Organism Value: A. thaliana
  misc_feature: MA Experiment 20000437 PARAMETER Experiment Name: At_Drought_P Parameter: Plant Line Value: WS
  misc_feature: MA Experiment 20000437 PARAMETER Experiment Name: At_Drought_P Parameter: Timepoint (hr) Value: 24
  misc_feature: MA Experiment 20000437 PARAMETER Experiment Name: At_Drought_P Parameter: Tissue Value: Whole Plant
  misc_feature: MA Experiment 20000437 PARAMETER Experiment Name: At_Drought_P Parameter: Treatment Value: Drought vs. No Drought
  misc_feature: MA Experiment ID: 20000439 Result: Down-regulated in Transcription
  misc_feature: MA Experiment 20000439 PARAMETER Experiment Name: At_Roots__P Parameter: Age (day) Value: 14 vs. 21
  misc_feature: MA Experiment 20000439 PARAMETER Experiment Name: At_Roots__P Parameter: Organism Value: A. thaliana
  misc_feature: MA Experiment 20000439 PARAMETER Experiment Name: At_Roots__P Parameter: Tissue Value: Roots vs. Whole Plant
  misc_feature: MA Experiment ID: 20000455 Result: Up-regulated in Transcription
  misc_feature: MA Experiment 20000455 PARAMETER Experiment Name: At_100uM_ABA_P Parameter: Age (day) Value: 16
  misc_feature: MA Experiment 20000455 PARAMETER Experiment Name: At_100uM_ABA_P Parameter: Organism Value: A. thaliana
  misc_feature: MA Experiment 20000455 PARAMETER Experiment Name: At_100uM_ABA_P Parameter: Plant Line Value: WS
  misc_feature: MA Experiment 20000455 PARAMETER Experiment Name: At_100uM_ABA_P Parameter: Timepoint (hr) Value: 48
  misc_feature: MA Experiment 20000455 PARAMETER Experiment Name: At_100uM_ABA_P Parameter: Tissue Value: Aerial
  misc_feature: MA Experiment 20000455 PARAMETER Experiment Name: At_100uM_ABA_P Parameter: Treatment Value: 100uM ABA vs. No Treatment
  misc_feature: MA Experiment ID: 20000495 Result: Down-regulated in Transcription
  misc_feature: MA Experiment 20000495 PARAMETER Experiment Name: At_Guard_Cells_P Parameter: Harvest Date Value: 8/2/2002
  misc_feature: MA Experiment 20000495 PARAMETER Experiment Name: At_Guard_Cells_P Parameter: Organism Value: A. thaliana
  misc_feature: MA Experiment 20000495 PARAMETER Experiment Name: At_Guard_Cells_P Parameter: Tissue Value: Guard Cells vs. Leaves
  misc_feature: MA Experiment ID: 20000496 Result: Down-regulated in Transcription
  misc_feature: MA Experiment 20000496 PARAMETER Experiment Name: At_Guard_Cells_P Parameter: Harvest Date Value: 7/19/2002
  misc_feature: MA Experiment 20000496 PARAMETER Experiment Name: At_Guard_Cells_P Parameter: Organism Value: Canola
  misc_feature: MA Experiment 20000496 PARAMETER Experiment Name: At_Guard_Cells_P Parameter: Tissue Value: Guard Cells vs. Leaves
  misc_feature: MA Experiment ID: 20000794 Result: Down-regulated in Transcription
  misc_feature: MA Experiment 20000794 PARAMETER Experiment Name: At_Petals_P Parameter: Age (day) Value: 23-25 days
  misc_feature: MA Experiment 20000794 PARAMETER Experiment Name: At_Petals_P Parameter: Plant Line Value: WS
  misc_feature: MA Experiment 20000794 PARAMETER Experiment Name: At_Petals_P Parameter: Tissue Value: Petals vs. Whole plant
  misc_feature: MA Experiment ID: 20001450 Result: Down-regulated in Transcription
  misc_feature: MA Experiment 20001450 PARAMETER Experiment Name: At_Far-red-induction_P Parameter: Age (day) Value: 7
  misc_feature: MA Experiment 20001450 PARAMETER Experiment Name: At_Far-red-induction_P Parameter: Light Value: Far-red vs. White
  misc_feature: MA Experiment 20001450 PARAMETER Experiment Name: At_Far-red-induction_P Parameter: Organism Value: A. thaliana
  misc_feature: MA Experiment 20001450 PARAMETER Experiment Name: At_Far-red-induction_P Parameter: Plant Line Value: Columbia
  misc_feature: MA Experiment 20001450 PARAMETER Experiment Name: At_Far-red-induction_P Parameter: Timepoint (hr) Value: 8
  misc_feature: MA Experiment 20001450 PARAMETER Experiment Name: At_Far-red-induction_P Parameter: Tissue Value: Whole Plant
  misc_feature: MA Experiment ID: 20001451 Result: Down-regulated in Transcription
  misc_feature: MA Experiment 20001451 PARAMETER Experiment Name: At_Far-red-induction_P Parameter: Age (day) Value: 7
  misc_feature: MA Experiment 20001451 PARAMETER Experiment Name: At_Far-red-induction_P Parameter: Light Value: Far-red vs. White
  misc_feature: MA Experiment 20001451 PARAMETER Experiment Name: At_Far-red-induction_P Parameter: Organism Value: A. thaliana
  misc_feature: MA Experiment 20001451 PARAMETER Experiment Name: At_Far-red-induction_P Parameter: Plant Line Value: Columbia
  misc_feature: MA Experiment 20001451 PARAMETER Experiment Name: At_Far-red-induction_P Parameter: Timepoint (hr) Value: 24
  misc_feature: MA Experiment 20001451 PARAMETER Experiment Name: At_Far-red-induction_P Parameter: Tissue Value: Whole Plant
  misc_feature: MA Experiment ID: 20001458 Result: Up-regulated in Transcription
  misc_feature: MA Experiment 20001458 PARAMETER Experiment Name: At_50mM_NH4NO3_L-to-H_P Parameter: Age (day) Value: Undefined
  misc_feature: MA Experiment 20001458 PARAMETER Experiment Name: At_50mM_NH4NO3_L-to-H_P Parameter: Organism Value: Undefined
  misc_feature: MA Experiment 20001458 PARAMETER Experiment Name: At_50mM_NH4NO3_L-to-H_P Parameter: Plant Line Value: Undefined
  misc_feature: MA Experiment 20001458 PARAMETER Experiment Name: At_50mM_NH4NO3_L-to-H_P Parameter: Timepoint (hr) Value: 2
  misc_feature: MA Experiment 20001458 PARAMETER Experiment Name: At_50mM_NH4NO3_L-to-H_P Parameter: Tissue Value: Siliques
  misc_feature: MA Experiment 20001458 PARAMETER Experiment Name: At_50mM_NH4NO3_L-to-H_P Parameter: Treatment Value: 50mM NH4NO3 vs. 100mM Manitol
  misc_feature: MA Experiment ID: 20001556 Result: Up-regulated in Transcription
  misc_feature: MA Experiment 20001556 PARAMETER Experiment Name: At_Drought_Soil_Dry_P Parameter: Age (day) Value: 26
  misc_feature: MA Experiment 20001556 PARAMETER Experiment Name: At_Drought_Soil_Dry_P Parameter: Organism Value: A. thaliana
  misc_feature: MA Experiment 20001556 PARAMETER Experiment Name: At_Drought_Soil_Dry_P Parameter: Plant Line Value: WS
  misc_feature: MA Experiment 20001556 PARAMETER Experiment Name: At_Drought_Soil_Dry_P Parameter: Post Timepoint (hr) Value: None
  misc_feature: MA Experiment 20001556 PARAMETER Experiment Name: At_Drought_Soil_Dry_P Parameter: Post-Treatment Value: None
  misc_feature: MA Experiment 20001556 PARAMETER Experiment Name: At_Drought_Soil_Dry_P Parameter: Timepoint (day) Value: 12
  misc_feature: MA Experiment 20001556 PARAMETER Experiment Name: At_Drought_Soil_Dry_P Parameter: Treatment Value: Drought vs. No Drought
  misc_feature: MA Experiment ID: 20001557 Result: Up-regulated in Transcription
  misc_feature: MA Experiment 20001557 PARAMETER Experiment Name: At_Drought_Soil_Dry_P Parameter: Age (day) Value: 27
  misc_feature: MA Experiment 20001557 PARAMETER Experiment Name: At_Drought_Soil_Dry_P Parameter: Organism Value: A. thaliana
  misc_feature: MA Experiment 20001557 PARAMETER Experiment Name: At_Drought_Soil_Dry_P Parameter: Plant Line Value: WS
  misc_feature: MA Experiment 20001557 PARAMETER Experiment Name: At_Drought_Soil_Dry_P Parameter: Post Timepoint (hr) Value: 3
  misc_feature: MA Experiment 20001557 PARAMETER Experiment Name: At_Drought_Soil_Dry_P Parameter: Post-Treatment Value: Re-Water vs. No Drought
  misc_feature: MA Experiment 20001557 PARAMETER Experiment Name: At_Drought_Soil_Dry_P Parameter: Timepoint (day) Value: 13
  misc_feature: MA Experiment 20001557 PARAMETER Experiment Name: At_Drought_Soil_Dry_P Parameter: Treatment Value: Drought vs. No Drought
  misc_feature: MA Experiment ID: 20001757 Result: Up-regulated in Transcription
  misc_feature: MA Experiment 20001757 PARAMETER Experiment Name: At_50mM_NH4NO3_L-to-H_P Parameter: Timepoint (hr) Value: 6
  misc_feature: MA Experiment 20001757 PARAMETER Experiment Name: At_50mM_NH4NO3_L-to-H_P Parameter: Tissue Value: Leaf
  misc_feature: MA Experiment 20001757 PARAMETER Experiment Name: At_50mM_NH4NO3_L-to-H_P Parameter: Treatment Value: 50mM NH4NO3 vs 100mM Mannitol
aaaatcgtggaaggttacaaagcctttcaaaaacctcactctctcaactctcaaaccttatctccttccttctcttctcctctcctctccgtcgagcttactatctccacaaaatggcgtcgacggtaggagttccatcactataccaagttcctcaccttgaaatctccaaacccaattccaaaaagaggtctaattgtttatctttatctctcgataagcctttcttcactcccttatctcttgttcgtagaactcgtcgtatccattcctcttctcttcttgttccttctgctgttgctactcctaattctgttctcagtgaagaagctttcaaaagtcttggtctttctgaccatgacgaatatgaccttgacggcgacaacaacaacgttgaagctgatgatggtgaagaactcgctatctctaaacttagtttgcctcaacgtcttgaagagtctcttgagaaacgtggtatcactcatctcttccccattcagagagctgtgttggtacctgcactgcaaggaagagatattatagctcgtgcaaagacaggaactggaaagactttggcttttggtattcctatcattaaacgtctcactgaagaagctggagactacactgctttcaggaggtctggtcgtcttcctaagttccttgtccttgcgccgacccgagagctggctaagcaagtggagaaggagattaaggagtctgcaccttatttgagcactgtttgtgtgtatgggggagtttcttataccattcagcagagtgctttaactcgtggtgttgatgttgttgttggaactcctggaagaatcattgatttgattgaaggaaggagtcttaaattgggagaagttgagtatttggtacttgatgaagctgatcagatgcttgctgttgggtttgaggaggccgtggaatcgattcttgagaatcttccaactaagcgacaaagtatgcttttctcagcaactatgcctacttgggttaagaagttggcgaggaagtaccttgacaatcccttgaatattgatctggttggagaccaagatgagaagctcgcagagggtatcaaactttatgcaatcgcaaccacatcgacatcaaaacgcactattctaagcgaccttattacagtgtatgcgaagggtggcaagaccattgtttttacccaaactaaaagagatgcagacgaagtttctcttgcattgtcaaacagtatagctaccgaagcacttcatggagatatatctcagcatcaaagagagagaacactcaatgctttccgtcaagggaaattcaccgtattagttgccactgatgttgcatctcgtggacttgacatcccgaacgtagatctagttatccactatgaacttcctaatgacccagaaacttttgtgcaccgttctggtcgtactgggcgtgcagggaaagaaggctctgccattctcatgcacaccagcagccaaaagagaacagtgaggtctctggagcgtgacgtaggctgccattttgaattcattagcccaccaactgttggagacttgttggaatcgtcagcagaccaagtggtggccactctaaatggtgttcaccctgactccataaagtttttctcagcaactgctcaaaaactatatgaggagaaaggaacagatgctttagctgcagctctagctcacctgagtggtttctctcagccgccttcatcaagatctctcctcagccatgagaagggatgggtgactttgcaattgatccgagatccaacgaacgctagaggctttctgtctgcgaggtctgttactggttttctttccgatctttaccgtacagctgcagatgaagttggaaaaatcttcttgatcgccgatgacaggatccaaggagctgtatttgatctaccagaggagatcgcgaaagagctcctagagaaagatgtccccgaaggcaacagtttatccatgataacaaagttacctccacttcaagatgacggaccatctagtgataactacggacggttctctagcagagacaggatgcctagaggaggaggaggttctagagggtcaagaggcggtagaggaggatcatcacgaggccgtgatagttggggaggtgatgatgacagaggtagtagaaggagcagtggtggaggaagcagctggtcccgaggtggtagtagttccagaggaagttctgatgattggttgatcggtggcagaagttcatcaagcagcagagctccttcgcgggagagaagttttggaggttcatgcttcatttgtgggaaatctggacacagggcaacagattgtcctgataagagaggattttagagttatcgtagcaaatggtttctgctcttgggagaaagatccttgtcctttttggtgttcttaatgcgaatcttttcgtgcttgcttcaacggtttgtttcagacggtagagaagcaatcagggaggaggatacatgcttcggacaaggtagagcagaaataaataagagagaggcaatagcaaaagtaaaggagaaggttttcctcaaattggcattttcagagtttgcgtgagaaacaagggaaagctgatggatctttttatgttagggttattataatagtcttaatgatcagtttccatgtttctaaggttttgtttgatttaagtggttattagtcagtctacttacactacttttattttcatttttgtacgttttctattgttatatgtgaattcggatcacatgtgtttggacagaagtaactatgtcattataatagaatcttatgccaagag

SEQ ID NO: 97780 - protein, 785 aa, Arabidopsis thaliana
  peptide (1)..(785): Ceres Seq. ID no. 13575927
  misc_feature (152)..(365): Pfam Name: DEAD/DEAH box helicase Pfam Description: DEAD/DEAH box helicase
  misc_feature (46)..(782): Homolog of NCBI NO: 34897326 NR Description: putative RNA helicase [Oryza sativa]
  misc_feature (38)..(512): Homolog of NCBI NO: 7488180 NR Description: probable RNA helicase F21E10.1 - Arabidopsis
  misc_feature (84)..(510): Homolog of NCBI NO: 15228722 NR Description: DEAD box RNA helicase, putative [Arabidopsis
  misc_feature (645)..(764): Homolog of NCBI NO: 15228722 NR Description: DEAD box RNA helicase, putative [Arabidopsis
  misc_feature (104)..(510): Homolog of NCBI NO: 22331253 NR Description: DEAD box RNA helicase, putative [Arabidopsis
  misc_feature (674)..(735): Homolog of NCBI NO: 22331253 NR Description: DEAD box RNA helicase, putative [Arabidopsis
  misc_feature (156)..(520): Homolog of NCBI NO: 34899624 NR Description: putative RNA helicase [Oryza sativa (japonica
  misc_feature (102)..(740): Homolog of NCBI NO: 16716475 NR Description: DEAD/H (Asp-Glu-Ala-Asp/His) box polypeptide 50;
  misc_feature (102)..(737): Homolog of NCBI NO: 13129006 NR Description: nucleolar protein GU2; RNA helicase II/Gu beta sapiens] >gi|12653021|gb|AAH00272.1|AAH00272 Unknown (protein for [Homo sapiens] >gi|13540304|gb|AAK29402.1|AF334103_1 nucleolar
  misc_feature (128)..(738): Homolog of NCBI NO: 2135315 NR Description: RNA helicase Gu - human (fragment)
NRGRLQSLSKTSLSQLSNLISFLLFSSPLRRAYYLHKMASTVGVPSLYQVPHLEISKPNSKKRSNCLSLSLDKPFFTPLSLVRRTRRIHSSSLLVPSAVATPNSVLSEEAFKSLGLSDHDEYDLDGDNNNVEADDGEELAISKLSLPQRLEESLEKRGITHLFPIQRAVLVPALQGRDIIARAKTGTGKTLAFGIPIIKRLTEEAGDYTAFRRSGRLPKFLVLAPTRELAKQVEKEIKESAPYLSTVCVYGGVSYTIQQSALTRGVDVVVGTPGRIIDLIEGRSLKLGEVEYLVLDEADQMLAVGFEEAVESILENLPTKRQSMLFSATMPTWVKKLARKYLDNPLNIDLVGDQDEKLAEGIKLYAIATTSTSKRTILSDLITVYAKGGKTIVFTQTKRDADEVSLALSNSIATEALHGDISQHQRERTLNAFRQGKFTVLVATDVASRGLDIPNVDLVIHYELPNDPETFVHRSGRTGRAGKEGSAILMHTSSQKRTVRSLERDVGCHFEFISPPTVGDLLESSADQVVATLNGVHPDSIKFFSATAQKLYEEKGTDALAAALAHLSGFSQPPSSRSLLSHEKGWVTLQLIRDPTNARGFLSARSVTGFLSDLYRTAADEVGKIFLIADDRIQGAVFDLPEEIAKELLEKDVPEGNSLSMITKLPPLQDDGPSSDNYGRFSSRDRMPRGGGGSRGSRGGRGGSSRGRDSWGGDDDRGSRRSSGGGSSWSRGGSSSRGSSDDWLIGGRSSSSSRAPSRERSFGGSCFICGKSGHRATDCPDKRGF

SEQ ID NO: 97781 - protein, 748 aa, Arabidopsis thaliana
  peptide (1)..(748): Ceres Seq. ID no. 13575928
  misc_feature (115)..(328): Pfam Name: DEAD/DEAH box helicase Pfam Description: DEAD/DEAH box helicase
  misc_feature (9)..(745): Homolog of NCBI NO: 34897326 NR Description: putative RNA helicase [Oryza sativa]
  misc_feature (1)..(475): Homolog of NCBI NO: 7488180 NR Description: probable RNA helicase F21E10.1 - Arabidopsis
  misc_feature (47)..(473): Homolog of NCBI NO: 15228722 NR Description: DEAD box RNA helicase, putative [Arabidopsis
  misc_feature (608)..(727): Homolog of NCBI NO: 15228722 NR Description: DEAD box RNA helicase, putative [Arabidopsis
  misc_feature (67)..(473): Homolog of NCBI NO: 22331253 NR Description: DEAD box RNA helicase, putative [Arabidopsis
  misc_feature (637)..(698): Homolog of NCBI NO: 22331253 NR Description: DEAD box RNA helicase, putative [Arabidopsis
  misc_feature (119)..(483): Homolog of NCBI NO: 34899624 NR Description: putative RNA helicase [Oryza sativa (japonica
  misc_feature (65)..(703): Homolog of NCBI NO: 16716475 NR Description: DEAD/H (Asp-Glu-Ala-Asp/His) box polypeptide 50;
  misc_feature (65)..(700): Homolog of NCBI NO: 13129006 NR Description: nucleolar protein GU2; RNA helicase II/Gu beta sapiens] >gi|12653021|gb|AAH00272.1|AAH00272 Unknown (protein for [Homo sapiens] >gi|13540304|gb|AAK29402.1|AF334103_1 nucleolar
  misc_feature (91)..(701): Homolog of NCBI NO: 2135315 NR Description: RNA helicase Gu - human (fragment)
MASTVGVPSLYQVPHLEISKPNSKKRSNCLSLSLDKPFFTPLSLVRRTRRIHSSSLLVPSAVATPNSVLSEEAFKSLGLSDHDEYDLDGDNNNVEADDGEELAISKLSLPQRLEESLEKRGITHLFPIQRAVLVPALQGRDIIARAKTGTGKTLAFGIPIIKRLTEEAGDYTAFRRSGRLPKFLVLAPTRELAKQVEKEIKESAPYLSTVCVYGGVSYTIQQSALTRGVDVVVGTPGRIIDLIEGRSLKLGEVEYLVLDEADQMLAVGFEEAVESILENLPTKRQSMLFSATMPTWVKKLARKYLDNPLNIDLVGDQDEKLAEGIKLYAIATTSTSKRTILSDLITVYAKGGKTIVFTQTKRDADEVSLALSNSIATEALHGDISQHQRERTLNAFRQGKFTVLVATDVASRGLDIPNVDLVIHYELPNDPETFVHRSGRTGRAGKEGSAILMHTSSQKRTVRSLERDVGCHFEFISPPTVGDLLESSADQVVATLNGVHPDSIKFFSATAQKLYEEKGTDALAAALAHLSGFSQPPSSRSLLSHEKGWVTLQLIRDPTNARGFLSARSVTGFLSDLYRTAADEVGKIFLIADDRIQGAVFDLPEEIAKELLEKDVPEGNSLSMITKLPPLQDDGPSSDNYGRFSSRDRMPRGGGGSRGSRGGRGGSSRGRDSWGGDDDRGSRRSSGGGSSWSRGGSSSRGSSDDWLIGGRSSSSSRAPSRERSFGGSCFICGKSGHRATDCPDKRGF

SEQ ID NO: 97782 - protein, 485 aa, Arabidopsis thaliana
  peptide (1)..(485): Ceres Seq. ID no. 13575929
  misc_feature (1)..(65): Pfam Name: DEAD/DEAH box helicase Pfam Description: DEAD/DEAH box helicase
  misc_feature (1)..(482): Homolog of NCBI NO: 34897326 NR Description: putative RNA helicase [Oryza sativa]
  misc_feature (1)..(212): Homolog of NCBI NO: 7488180 NR Description: probable RNA helicase F21E10.1 - Arabidopsis
  misc_feature (1)..(210): Homolog of NCBI NO: 15228722 NR Description: DEAD box RNA helicase, putative [Arabidopsis
  misc_feature (345)..(464): Homolog of NCBI NO: 15228722 NR Description: DEAD box RNA helicase, putative [Arabidopsis
  misc_feature (1)..(210): Homolog of NCBI NO: 22331253 NR Description: DEAD box RNA helicase, putative [Arabidopsis
  misc_feature (374)..(435): Homolog of NCBI NO: 22331253 NR Description: DEAD box RNA helicase, putative [Arabidopsis
  misc_feature (1)..(220): Homolog of NCBI NO: 34899624 NR Description: putative RNA helicase [Oryza sativa (japonica
  misc_feature (1)..(440): Homolog of NCBI NO: 16716475 NR Description: DEAD/H (Asp-Glu-Ala-Asp/His) box polypeptide 50;
  misc_feature (1)..(437): Homolog of NCBI NO: 13129006 NR Description: nucleolar protein GU2; RNA helicase II/Gu beta sapiens] >gi|12653021|gb|AAH00272.1|AAH00272 Unknown (protein for [Homo sapiens] >gi|13540304|gb|AAK29402.1|AF334103_1 nucleolar
  misc_feature (1)..(438): Homolog of NCBI NO: 2135315 NR Description: RNA helicase Gu - human (fragment)
MLAVGFEEAVESILENLPTKRQSMLFSATMPTWVKKLARKYLDNPLNIDLVGDQDEKLAEGIKLYAIATTSTSKRTILSDLITVYAKGGKTIVFTQTKRDADEVSLALSNSIATEALHGDISQHQRERTLNAFRQGKFTVLVATDVASRGLDIPNVDLVIHYELPNDPETFVHRSGRTGRAGKEGSAILMHTSSQKRTVRSLERDVGCHFEFISPPTVGDLLESSADQVVATLNGVHPDSIKFFSATAQKLYEEKGTDALAAALAHLSGFSQPPSSRSLLSHEKGWVTLQLIRDPTNARGFLSARSVTGFLSDLYRTAADEVGKIFLIADDRIQGAVFDLPEEIAKELLEKDVPEGNSLSMITKLPPLQDDGPSSDNYGRFSSRDRMPRGGGGSRGSRGGRGGSSRGRDSWGGDDDRGSRRSSGGGSSWSRGGSSSRGSSDDWLIGGRSSSSSRAPSRERSFGGSCFICGKSGHRATDCPDKRGF

SEQ ID NO: 97783 - DNA, 1521 bp, Arabidopsis thaliana
  misc_feature (1)..(1521): Ceres Seq. ID no. 13576051
  misc_feature: MA Experiment ID: 20000171 Result: Down-regulated in Transcription
  misc_feature: MA Experiment 20000171 PARAMETER Experiment Name: At_42deg_Heat_P Parameter: Age (day) Value: 14
  misc_feature: MA Experiment 20000171 PARAMETER Experiment Name: At_42deg_Heat_P Parameter: Organism Value: A. thaliana
  misc_feature: MA Experiment 20000171 PARAMETER Experiment Name: At_42deg_Heat_P Parameter: Plant Line Value: WS
  misc_feature: MA Experiment 20000171 PARAMETER Experiment Name: At_42deg_Heat_P Parameter: Temperature (deg C) Value: 42 vs. 22
  misc_feature: MA Experiment 20000171 PARAMETER Experiment Name: At_42deg_Heat_P Parameter: Timepoint (hr) Value: 1
  misc_feature: MA Experiment 20000171 PARAMETER Experiment Name: At_42deg_Heat_P Parameter: Tissue Value: Aerial
  misc_feature: MA Experiment ID: 20000173 Result: Down-regulated in Transcription
  misc_feature: MA Experiment 20000173 PARAMETER Experiment Name: At_42deg_Heat_P Parameter: Age (day) Value: 14
  misc_feature: MA Experiment 20000173 PARAMETER Experiment Name: At_42deg_Heat_P Parameter: Organism Value: A. thaliana
  misc_feature: MA Experiment 20000173 PARAMETER Experiment Name: At_42deg_Heat_P Parameter: Plant Line Value: WS
  misc_feature: MA Experiment 20000173 PARAMETER Experiment Name: At_42deg_Heat_P Parameter: Temperature (deg C) Value: 42 vs. 22
  misc_feature: MA Experiment 20000173 PARAMETER Experiment Name: At_42deg_Heat_P Parameter: Timepoint (hr) Value: 6
  misc_feature: MA Experiment 20000173 PARAMETER Experiment Name: At_42deg_Heat_P Parameter: Tissue Value: Aerial
  misc_feature: MA Experiment ID: 20000235 Result: Up-regulated in Transcription
  misc_feature: MA Experiment 20000235 PARAMETER Experiment Name: At_Siliques_P Parameter: Age (day) Value: 21
  misc_feature: MA Experiment 20000235 PARAMETER Experiment Name: At_Siliques_P Parameter: Organism Value: A. thaliana
  misc_feature: MA Experiment 20000235 PARAMETER Experiment Name: At_Siliques_P Parameter: Plant Line Value: WS
  misc_feature: MA Experiment 20000235 PARAMETER Experiment Name: At_Siliques_P Parameter: Tissue Value: 5-10mm Siliques vs. Whole Plant
  misc_feature: MA Experiment ID: 20000496 Result: Up-regulated in Transcription
  misc_feature: MA Experiment 20000496 PARAMETER Experiment Name: At_Guard_Cells_P Parameter: Harvest Date Value: 7/19/2002
  misc_feature: MA Experiment 20000496 PARAMETER Experiment Name: At_Guard_Cells_P Parameter: Organism Value: Canola
  misc_feature: MA Experiment 20000496 PARAMETER Experiment Name: At_Guard_Cells_P Parameter: Tissue Value: Guard Cells vs. Leaves
ggtcggacttgtaaattttcgctcagcgatctgcttccaatggcgatctacttcattctctatacacttctcacgatcatcttcgccgtatctctgagtttatttctttccgtgatcaatgcaagaaagagcagaaaacgtgcggtaggattcttccatccgtacacgaacgacggtggcggcggcgagagagtgctctggtgcgccgttaaagccattcaagaggaaaatcccgatcttgactgtgtcatcttcaccggagatcatgactcttcttctgatagcttagctcgtcgcgccgttgatcgattcggtgttcaccttcagtctcctcctaaggtgattcatctaaacaaaaggaaatggattgaagagagtacttacccacattttacaatgataggtcagagtcttggttcggtttacttagcgtgggaagcattacgcatgttcactcctttgtatttccttgacactagtggatatgcgtttacatatcctcttgctcggatctttggttgcaaagttgtttgctatactcattatccaactattagtttggatatgatttctcgtgttcgtcagaggaactctatgtataacaatgatgcttccattgctaagagcaattggttatctacttgcaaattagtctattacagagcttttagctggatgtatgggatggttgggtcatgtactcatttagctatggttaactcttcgtggactaagtcccatatcgaagtgctttggagaattccagaacggattacacgggtctacccgccctgtgatacttcaggacttcaggtgataaccttcagacagctcgaatcttatgatttttgtctgttttctggttacatctcagtatttgctgacatcttgggcttattgcaggcgtttcctcttgaacgatcatctgatcctcctaaaatcatatcagttgctcaatttcgtcctgagaaggctcatatgcttcagcttgaggccttttcactagccttagagaagctagatgcagacgtccctagacccaagctccaatttgtgggaagttgtagaaacaattcagatgaagaacgtctgcagaaattgaaagacagagcagtggaactaaaagtagatggagacgtgcaattctataaaaatgccatgtacagagaactagtggaactgttaggaaatgcagttgcaggactgcatgggatgatagatgaacactttggtataagtgttgttgagtacatggctgctggtgcaatcccaatagctcacaactcagctggacctaaaatggacattgtgttggaagaagacggacaaaaaaccgggtttcttgctgagactgtggaggaatacgctgaagcgatccttgagattgtgaagatgaatgaaacagagaggcttaaaatggctgaatctgctagaaaacgagcggcaaggttctctgaacaacggttttgtgaggacttcaaaactgcgattcgacccattttcacaggtcctcttaaatga

SEQ ID NO: 97784 - protein, 506 aa, Arabidopsis thaliana
  peptide (1)..(506): Ceres Seq. ID no. 13576052
  misc_feature (300)..(480): Pfam Name: Glycosyl transferases group 1 Pfam Description: Glycosyl transferases group 1
  misc_feature (222)..(506): Homolog of NCBI NO: 4587993 NR Description: hypothetical protein [Arabidopsis thaliana]
  misc_feature (14)..(320): Homolog of NCBI NO: 4587993 NR Description: hypothetical protein [Arabidopsis thaliana]
  misc_feature (45)..(277): Homolog of NCBI NO: 39795589 NR Description: Unknown (protein for MGC:76133) [Silurana
  misc_feature (290)..(501): Homolog of NCBI NO: 39795589 NR Description: Unknown (protein for MGC:76133) [Silurana
  misc_feature (12)..(266): Homolog of NCBI NO: 28374203 NR Description: Unknown (protein for IMAGE:2601678) [Danio rerio]
  misc_feature (314)..(502): Homolog of NCBI NO: 28374203 NR Description: Unknown (protein for IMAGE:2601678) [Danio rerio]
  misc_feature (18)..(287): Homolog of NCBI NO: 21358031 NR Description: CG11306-PA [Drosophila melanogaster]
  misc_feature (314)..(502): Homolog of NCBI NO: 21358031 NR Description: CG11306-PA [Drosophila melanogaster]
  misc_feature (49)..(266): Homolog of NCBI NO: 34879128 NR Description: similar to CG11306-PA [Rattus norvegicus]
  misc_feature (304)..(502): Homolog of NCBI NO: 34879128 NR Description: similar to CG11306-PA [Rattus norvegicus]
GRTCKFSLSDLLPMAIYFILYTLLTIIFAVSLSLFLSVINARKSRKRAVGFFHPYTNDGGGGERVLWCAVKAIQEENPDLDCVIFTGDHDSSSDSLARRAVDRFGVHLQSPPKVIHLNKRKWIEESTYPHFTMIGQSLGSVYLAWEALRMFTPLYFLDTSGYAFTYPLARIFGCKVVCYTHYPTISLDMISRVRQRNSMYNNDASIAKSNWLSTCKLVYYRAFSWMYGMVGSCTHLAMVNSSWTKSHIEVLWRIPERITRVYPPCDTSGLQVITFRQLESYDFCLFSGYISVFADILGLLQAFPLERSSDPPKIISVAQFRPEKAHMLQLEAFSLALEKLDADVPRPKLQFVGSCRNNSDEERLQKLKDRAVELKVDGDVQFYKNAMYRELVELLGNAVAGLHGMIDEHFGISVVEYMAAGAIPIAHNSAGPKMDIVLEEDGQKTGFLAETVEEYAEAILEIVKMNETERLKMAESARKRAARFSEQRFCEDFKTAIRPIFTGPLK

SEQ ID NO: 97785 - protein, 493 aa, Arabidopsis thaliana
  peptide (1)..(493): Ceres Seq. ID no. 13576053
  misc_feature (287)..(467): Pfam Name: Glycosyl transferases group 1 Pfam Description: Glycosyl transferases group 1
  misc_feature (209)..(493): Homolog of NCBI NO: 4587993 NR Description: hypothetical protein [Arabidopsis thaliana]
  misc_feature (1)..(307): Homolog of NCBI NO: 4587993 NR Description: hypothetical protein [Arabidopsis thaliana]
  misc_feature (32)..(264): Homolog of NCBI NO: 39795589 NR Description: Unknown (protein for MGC:76133) [Silurana
  misc_feature (277)..(488): Homolog of NCBI NO: 39795589 NR Description: Unknown (protein for MGC:76133) [Silurana
  misc_feature (1)..(253): Homolog of NCBI NO: 28374203 NR Description: Unknown (protein for IMAGE:2601678) [Danio rerio]
  misc_feature (301)..(489): Homolog of NCBI NO: 28374203 NR Description: Unknown (protein for IMAGE:2601678) [Danio rerio]
  misc_feature (5)..(274): Homolog of NCBI NO: 21358031 NR Description: CG11306-PA [Drosophila melanogaster]
  misc_feature (301)..(489): Homolog of NCBI NO: 21358031 NR Description: CG11306-PA [Drosophila melanogaster]
  misc_feature (36)..(253): Homolog of NCBI NO: 34879128 NR Description: similar to CG11306-PA [Rattus norvegicus]
  misc_feature (291)..(489): Homolog of NCBI NO: 34879128 NR Description: similar to CG11306-PA [Rattus norvegicus]
MAIYFILYTLLTIIFAVSLSLFLSVINARKSRKRAVGFFHPYTNDGGGGERVLWCAVKAIQEENPDLDCVIFTGDHDSSSDSLARRAVDRFGVHLQSPPKVIHLNKRKWIEESTYPHFTMIGQSLGSVYLAWEALRMFTPLYFLDTSGYAFTYPLARIFGCKVVCYTHYPTISLDMISRVRQRNSMYNNDASIAKSNWLSTCKLVYYRAFSWMYGMVGSCTHLAMVNSSWTKSHIEVLWRIPERITRVYPPCDTSGLQVITFRQLESYDFCLFSGYISVFADILGLLQAFPLERSSDPPKIISVAQFRPEKAHMLQLEAFSLALEKLDADVPRPKLQFVGSCRNNSDEERLQKLKDRAVELKVDGDVQFYKNAMYRELVELLGNAVAGLHGMIDEHFGISVVEYMAAGAIPIAHNSAGPKMDIVLEEDGQKTGFLAETVEEYAEAILEIVKMNETERLKMAESARKRAARFSEQRFCEDFKTAIRPIFTGPLK

SEQ ID NO: 97786 - protein, 374 aa, Arabidopsis thaliana
  peptide (1)..(374): Ceres Seq. ID no. 13576054
  misc_feature (168)..(348): Pfam Name: Glycosyl transferases group 1 Pfam Description: Glycosyl transferases group 1
  misc_feature (90)..(374): Homolog of NCBI NO: 4587993 NR Description: hypothetical protein [Arabidopsis thaliana]
  misc_feature (1)..(188): Homolog of NCBI NO: 4587993 NR Description: hypothetical protein [Arabidopsis thaliana]
  misc_feature (1)..(145): Homolog of NCBI NO: 39795589 NR Description: Unknown (protein for MGC:76133) [Silurana
  misc_feature (158)..(369): Homolog of NCBI NO: 39795589 NR Description: Unknown (protein for MGC:76133) [Silurana
  misc_feature (1)..(134): Homolog of NCBI NO: 28374203 NR Description: Unknown (protein for IMAGE:2601678) [Danio rerio]
  misc_feature (182)..(370): Homolog of NCBI NO: 28374203 NR Description: Unknown (protein for IMAGE:2601678) [Danio rerio]
  misc_feature (1)..(155): Homolog of NCBI NO: 21358031 NR Description: CG11306-PA [Drosophila melanogaster]
  misc_feature (182)..(370): Homolog of NCBI NO: 21358031 NR Description: CG11306-PA [Drosophila melanogaster]
  misc_feature (1)..(134): Homolog of NCBI NO: 34879128 NR Description: similar to CG11306-PA [Rattus norvegicus]
  misc_feature (172)..(370): Homolog of NCBI NO: 34879128 NR Description: similar to CG11306-PA [Rattus norvegicus]
MIGQSLGSVYLAWEALRMFTPLYFLDTSGYAFTYPLARIFGCKVVCYTHYPTISLDMISRVRQRNSMYNNDASIAKSNWLSTCKLVYYRAFSWMYGMVGSCTHLAMVNSSWTKSHIEVLWRIPERITRVYPPCDTSGLQVITFRQLESYDFCLFSGYISVFADILGLLQAFPLERSSDPPKIISVAQFRPEKAHMLQLEAFSLALEKLDADVPRPKLQFVGSCRNNSDEERLQKLKDRAVELKVDGDVQFYKNAMYRELVELLGNAVAGLHGMIDEHFGISVVEYMAAGAIPIAHNSAGPKMDIVLEEDGQKTGFLAETVEEYAEAILEIVKMNETERLKMAESARKRAARFSEQRFCEDFKTAIRPIFTGPLK

SEQ ID NO: 97787 - DNA, 1597 bp, Arabidopsis thaliana
  misc_feature (1)..(1597): Ceres Seq. ID no. 13576067
  misc_feature: MA Experiment ID: 20000171 Result: Down-regulated in Transcription
  misc_feature: MA Experiment 20000171 PARAMETER Experiment Name: At_42deg_Heat_P Parameter: Age (day) Value: 14
  misc_feature: MA Experiment 20000171 PARAMETER Experiment Name: At_42deg_Heat_P Parameter: Organism Value: A. thaliana
  misc_feature: MA Experiment 20000171 PARAMETER Experiment Name: At_42deg_Heat_P Parameter: Plant Line Value: WS
  misc_feature: MA Experiment 20000171 PARAMETER Experiment Name: At_42deg_Heat_P Parameter: Temperature (deg C) Value: 42 vs. 22
  misc_feature: MA Experiment 20000171 PARAMETER Experiment Name: At_42deg_Heat_P Parameter: Timepoint (hr) Value: 1
  misc_feature: MA Experiment 20000171 PARAMETER Experiment Name: At_42deg_Heat_P Parameter: Tissue Value: Aerial
  misc_feature: MA Experiment ID: 20000173 Result: Down-regulated in Transcription
  misc_feature: MA Experiment 20000173 PARAMETER Experiment Name: At_42deg_Heat_P Parameter: Age (day) Value: 14
  misc_feature: MA Experiment 20000173 PARAMETER Experiment Name: At_42deg_Heat_P Parameter: Organism Value: A. thaliana
  misc_feature: MA Experiment 20000173 PARAMETER Experiment Name: At_42deg_Heat_P Parameter: Plant Line Value: WS
  misc_feature: MA Experiment 20000173 PARAMETER Experiment Name: At_42deg_Heat_P Parameter: Temperature (deg C) Value: 42 vs. 22
  misc_feature: MA Experiment 20000173 PARAMETER Experiment Name: At_42deg_Heat_P Parameter: Timepoint (hr) Value: 6
  misc_feature: MA Experiment 20000173 PARAMETER Experiment Name: At_42deg_Heat_P Parameter: Tissue Value: Aerial
  misc_feature: MA Experiment ID: 20000437 Result: Down-regulated in Transcription
  misc_feature: MA Experiment 20000437 PARAMETER Experiment Name: At_Drought_P Parameter: Age (day) Value: 8
  misc_feature: MA Experiment 20000437 PARAMETER Experiment Name: At_Drought_P Parameter: Organism Value: A. thaliana
  misc_feature: MA Experiment 20000437 PARAMETER Experiment Name: At_Drought_P Parameter: Plant Line Value: WS
  misc_feature: MA Experiment 20000437 PARAMETER Experiment Name: At_Drought_P Parameter: Timepoint (hr) Value: 24
  misc_feature: MA Experiment 20000437 PARAMETER Experiment Name: At_Drought_P Parameter: Tissue Value: Whole Plant
  misc_feature: MA Experiment 20000437 PARAMETER Experiment Name: At_Drought_P Parameter: Treatment Value: Drought vs. No Drought
  misc_feature: MA Experiment ID: 20000495 Result: Down-regulated in Transcription
  misc_feature: MA Experiment 20000495 PARAMETER Experiment Name: At_Guard_Cells_P Parameter: Harvest Date Value: 8/2/2002
  misc_feature: MA Experiment 20000495 PARAMETER Experiment Name: At_Guard_Cells_P Parameter: Organism Value: A. thaliana
  misc_feature: MA Experiment 20000495 PARAMETER Experiment Name: At_Guard_Cells_P Parameter: Tissue Value: Guard Cells vs. Leaves
  misc_feature: MA Experiment ID: 20000527 Result: Down-regulated in Transcription
  misc_feature: MA Experiment 20000527 PARAMETER Experiment Name: At_10percent_PEG_P Parameter: Age (day) Value: 20
  misc_feature: MA Experiment 20000527 PARAMETER Experiment Name: At_10percent_PEG_P Parameter: Organism Value: A. thaliana
  misc_feature: MA Experiment 20000527 PARAMETER Experiment Name: At_10percent_PEG_P Parameter: Plant Line Value: WS
  misc_feature: MA Experiment 20000527 PARAMETER Experiment Name: At_10percent_PEG_P Parameter: Timepoint (day) Value: 20
  misc_feature: MA Experiment 20000527 PARAMETER Experiment Name: At_10percent_PEG_P Parameter: Tissue Value: Whole Plant
  misc_feature: MA Experiment 20000527 PARAMETER Experiment Name: At_10percent_PEG_P Parameter: Treatment Value: 10percent PEG vs. No Treatment
  misc_feature: MA Experiment ID: 20000794 Result: Down-regulated in Transcription
  misc_feature: MA Experiment 20000794 PARAMETER Experiment Name: At_Petals_P Parameter: Age (day) Value: 23-25 days
  misc_feature: MA Experiment 20000794 PARAMETER Experiment Name: At_Petals_P Parameter: Plant Line Value: WS
  misc_feature: MA Experiment 20000794 PARAMETER Experiment Name: At_Petals_P Parameter: Tissue Value: Petals vs. Whole plant
  misc_feature: MA Experiment ID: 20001247 Result: Up-regulated in Transcription
  misc_feature: MA Experiment 20001247 PARAMETER Experiment Name: At_Far-red-induction_P Parameter: Age (day) Value: 7
  misc_feature: MA Experiment 20001247 PARAMETER Experiment Name: At_Far-red-induction_P Parameter: Light Value: Far-red vs. White
  misc_feature: MA Experiment 20001247 PARAMETER Experiment Name: At_Far-red-induction_P Parameter: Organism Value: A. thaliana
  misc_feature: MA Experiment 20001247 PARAMETER Experiment Name: At_Far-red-induction_P Parameter: Plant Line Value: Columbia
  misc_feature: MA Experiment 20001247 PARAMETER Experiment Name: At_Far-red-induction_P Parameter: Timepoint (hr) Value: 1
  misc_feature: MA Experiment 20001247 PARAMETER Experiment Name: At_Far-red-induction_P Parameter: Tissue Value: Whole Plant
  misc_feature: MA Experiment ID: 20001248 Result: Down-regulated in Transcription
  misc_feature: MA Experiment 20001248 PARAMETER Experiment Name: At_Far-red-induction_P Parameter: Age (day) Value: 7
  misc_feature: MA Experiment 20001248 PARAMETER Experiment Name: At_Far-red-induction_P Parameter: Light Value: Far-red vs. White
  misc_feature: MA Experiment 20001248 PARAMETER Experiment Name: At_Far-red-induction_P Parameter: Organism Value: A. thaliana
  misc_feature: MA Experiment 20001248 PARAMETER Experiment Name: At_Far-red-induction_P Parameter: Plant Line Value: Columbia
  misc_feature: MA Experiment 20001248 PARAMETER Experiment Name: At_Far-red-induction_P Parameter: Timepoint (hr) Value: 4
  misc_feature: MA Experiment 20001248 PARAMETER Experiment Name: At_Far-red-induction_P Parameter: Tissue Value: Whole Plant
  misc_feature: MA Experiment ID: 20001451 Result: Down-regulated in Transcription
  misc_feature: MA Experiment 20001451 PARAMETER Experiment Name: At_Far-red-induction_P Parameter: Age (day) Value: 7
  misc_feature: MA Experiment 20001451 PARAMETER Experiment Name: At_Far-red-induction_P Parameter: Light Value: Far-red vs. White
  misc_feature: MA Experiment 20001451 PARAMETER Experiment Name: At_Far-red-induction_P Parameter: Organism Value: A. thaliana
  misc_feature: MA Experiment 20001451 PARAMETER Experiment Name: At_Far-red-induction_P Parameter: Plant Line Value: Columbia
  misc_feature: MA Experiment 20001451 PARAMETER Experiment Name: At_Far-red-induction_P Parameter: Timepoint (hr) Value: 24
  misc_feature: MA Experiment 20001451 PARAMETER Experiment Name: At_Far-red-induction_P Parameter: Tissue Value: Whole Plant
  misc_feature: MA Experiment ID: 20001554 Result: Down-regulated in Transcription
  misc_feature: MA Experiment 20001554 PARAMETER Experiment Name: At_Drought_Soil_Dry_P Parameter: Age (day) Value: 21
  misc_feature: MA Experiment 20001554 PARAMETER Experiment Name: At_Drought_Soil_Dry_P Parameter: Organism Value: A. thaliana
  misc_feature: MA Experiment 20001554 PARAMETER Experiment Name: At_Drought_Soil_Dry_P Parameter: Plant Line Value: WS
  misc_feature: MA Experiment 20001554 PARAMETER Experiment Name: At_Drought_Soil_Dry_P Parameter: Post Timepoint (hr) Value: None
  misc_feature: MA Experiment 20001554 PARAMETER Experiment Name: At_Drought_Soil_Dry_P Parameter: Post-Treatment Value: None
  misc_feature: MA Experiment 20001554 PARAMETER Experiment Name: At_Drought_Soil_Dry_P Parameter: Timepoint (day) Value: 7
  misc_feature: MA Experiment 20001554 PARAMETER Experiment Name: At_Drought_Soil_Dry_P Parameter: Treatment Value: Drought vs. No Drought
  misc_feature: MA Experiment ID: 20001555 Result: Down-regulated in Transcription
  misc_feature: MA Experiment 20001555 PARAMETER Experiment Name: At_Drought_Soil_Dry_P Parameter: Age (day) Value: 24
  misc_feature: MA Experiment 20001555 PARAMETER Experiment Name: At_Drought_Soil_Dry_P Parameter: Organism Value: A. thaliana
  misc_feature: MA Experiment 20001555 PARAMETER Experiment Name: At_Drought_Soil_Dry_P Parameter: Plant Line Value: WS
  misc_feature: MA Experiment 20001555 PARAMETER Experiment Name: At_Drought_Soil_Dry_P Parameter: Post Timepoint (hr) Value: None
  misc_feature: MA Experiment 20001555 PARAMETER Experiment Name: At_Drought_Soil_Dry_P Parameter: Post-Treatment Value: None
  misc_feature: MA Experiment 20001555 PARAMETER Experiment Name: At_Drought_Soil_Dry_P Parameter: Timepoint (day) Value: 10
  misc_feature: MA Experiment 20001555 PARAMETER Experiment Name: At_Drought_Soil_Dry_P Parameter: Treatment Value: Drought vs. No Drought
  misc_feature: MA Experiment ID: 20001556 Result: Down-regulated in Transcription
  misc_feature: MA Experiment 20001556 PARAMETER Experiment Name: At_Drought_Soil_Dry_P Parameter: Age (day) Value: 26
  misc_feature: MA Experiment 20001556 PARAMETER Experiment Name: At_Drought_Soil_Dry_P Parameter: Organism Value: A. thaliana
  misc_feature: MA Experiment 20001556 PARAMETER Experiment Name: At_Drought_Soil_Dry_P Parameter: Plant Line Value: WS
  misc_feature: MA Experiment 20001556 PARAMETER Experiment Name: At_Drought_Soil_Dry_P Parameter: Post Timepoint (hr) Value: None
  misc_feature: MA Experiment 20001556 PARAMETER Experiment Name: At_Drought_Soil_Dry_P Parameter: Post-Treatment Value: None
  misc_feature: MA Experiment 20001556 PARAMETER Experiment Name: At_Drought_Soil_Dry_P Parameter: Timepoint (day) Value: 12
  misc_feature: MA Experiment 20001556 PARAMETER Experiment Name: At_Drought_Soil_Dry_P Parameter: Treatment Value: Drought vs. No Drought
  misc_feature: MA Experiment ID: 20001560 Result: Down-regulated in Transcription
  misc_feature: MA Experiment 20001560 PARAMETER Experiment Name: At_Drought_Soil_Dry_P Parameter: Age (day) Value: 28
  misc_feature: MA Experiment 20001560 PARAMETER Experiment Name: At_Drought_Soil_Dry_P Parameter: Organism Value: A. thaliana
  misc_feature: MA Experiment 20001560 PARAMETER Experiment Name: At_Drought_Soil_Dry_P Parameter: Plant Line Value: WS
  misc_feature: MA Experiment 20001560 PARAMETER Experiment Name: At_Drought_Soil_Dry_P Parameter: Post Timepoint (hr) Value: None
  misc_feature: MA Experiment 20001560 PARAMETER Experiment Name: At_Drought_Soil_Dry_P Parameter: Post-Treatment Value: None
  misc_feature: MA Experiment 20001560 PARAMETER Experiment Name: At_Drought_Soil_Dry_P Parameter: Timepoint (day) Value: 14
  misc_feature: MA Experiment 20001560 PARAMETER Experiment Name: At_Drought_Soil_Dry_P Parameter: Treatment Value: Drought vs. No Drought
  misc_feature: MA Experiment ID: 20001904 Result: Down-regulated in Transcription
  misc_feature: MA Experiment 20001904 PARAMETER Experiment Name: At_Drought_Reproduction_P Parameter: Age (day) Value: 37
  misc_feature: MA Experiment 20001904 PARAMETER Experiment Name: At_Drought_Reproduction_P Parameter: Organism Value: A. thaliana
  misc_feature: MA Experiment 20001904 PARAMETER Experiment Name: At_Drought_Reproduction_P Parameter: Plant Line Value: WS
  misc_feature: MA Experiment 20001904 PARAMETER Experiment Name: At_Drought_Reproduction_P Parameter: Timepoint (day) Value: 7
  misc_feature: MA Experiment 20001904 PARAMETER Experiment Name: At_Drought_Reproduction_P Parameter: Tissue Value: Rosettes
  misc_feature: MA Experiment 20001904 PARAMETER Experiment Name: At_Drought_Reproduction_P Parameter: Treatment Value: Drought vs. No Drought
ttccgccatgagaaaaacctgcacacacgcctgaaaaaccaaatcatcctcatcatcttctgatctaatgtctaccgacactatcccttccctctcatctccaccggcgccggagtttccttccaccacaccagacacggcgacgtcaccagctccgtctcagccatccatcatcggaccttcttcgttggctccgtttccggagacaacaacaaacattgatggaggctcgagaaatgtagcattaactggacttattactggagtagttctcggagctacgtttgtcctactcggagtttgtatctttgtctgtttctataaaagaaagaagaggaagttaaagaagaagaagaaagaagatatcgaagcttctattaacagagactcactagatcccaaagatgatagcaataatcttcagcaatggagttcatcagagattggacaaaacttgtttacatatgaagatttgtctaaagcaactagtaacttctccaacactaaccttcttggacaaggtgggtttggttatgttcatagaggagttcttgttgatggaactttggttgctattaagcagcttaaatctggaagtggacaaggtgaacgagagtttcaagctgagatacagactattagtagagttcatcataggcatcttgtttctcttcttggttattgtatcactggtgctcaaagattgcttgtttatgagtttgtgcctaataagactctcgaatttcatttacacgagaaagagagaccggtaatggagtggtcaaagaggatgaagattgctttgggtgcagctaaaggattggcatacttacatgaagattgtaatcctaagacaatacaccgcgatgtcaaggctgcaaatattctaattgacgatagctatgaggcgaagttagcagattttggacttgccaggtcttctttagacactgatactcatgtctccactcggattatgggaaccttcggttacttggctcctgaatatgcttcttcagggaaacttactgagaaatcagatgtcttctcaattggagtggtgcttcttgaactgataaccggacgccgtcctgttgataaatcacagccttttgctgatgatgatagcatcgttgattgggcaaaacctctgatgatacaagcgttaaacgatggaaactttgacggtcttgttgacccgcggttagagaatgattttgatatcaacgaaatgacgagaatggttgcttgcgctgctgctagtgtccgtcattcagctaaacgtcgcccaaaaatgagccagatagttcgagcattcgaaggaaatatatctatagatgacctaacagaaggagctgccccaggacaaagtactatttacagcttagacgggagctcagattatagctcaacacaatacaaagaagacttgaagaaattcaagaaaatggcgttcgaaagcaaaacatttggtagcagcgaatgcagtggtttgactagcgacaatggtcagaacccatcaggctcgtctagtatcaccgaaggccaacgtacaacgcaggagatcgaaccggagaagaataccaaggacacatga

SEQ ID NO: 97788 - protein, 509 aa, Arabidopsis thaliana
  peptide (1)..(509): Ceres Seq. ID no. 13576068
  misc_feature (1)..(509): Homolog of NCBI NO: 15218207 NR Description: protein kinase -related [Arabidopsis thaliana]
  misc_feature (131)..(508): Homolog of NCBI NO: 34904234 NR Description: putative receptor protein kinase PERK1 [Oryza
  misc_feature (1)..(90): Homolog of NCBI NO: 34904234 NR Description: putative receptor protein kinase PERK1 [Oryza
  misc_feature (128)..(507): Homolog of NCBI NO: 29367569 NR Description: putative receptor protein kinase [Oryza sativa
  misc_feature (128)..(491): Homolog of NCBI NO: 15224182 NR Description: protein kinase -related [Arabidopsis thaliana]
  misc_feature (4)..(129): Homolog of NCBI NO: 15224182 NR Description: protein kinase -related [Arabidopsis thaliana]
  misc_feature (128)..(504): Homolog of NCBI NO: 13447449 NR Description: receptor protein kinase PERK1 [Brassica napus]
  misc_feature (128)..(507): Homolog of NCBI NO: 13877617 NR Description: protein kinase-like protein [Arabidopsis
  misc_feature (128)..(507): Homolog of NCBI NO: 15230130 NR Description: protein kinase -related [Arabidopsis thaliana]
  misc_feature (128)..(503): Homolog of NCBI NO: 30690042 NR Description: serine threonine protein kinase -related thaliana] >gi|26452004|dbj|BAC43092.1| putative serine/threonine kinase [Arabidopsis thaliana] >gi|29029022|gb|AAO64890.1|
MSTDTIPSLSSPPAPEFPSTTPDTATSPAPSQPSIIGPSSLAPFPETTTNIDGGSRNVALTGLITGVVLGATFVLLGVCIFVCFYKRKKRKLKKKKKEDIEASINRDSLDPKDDSNNLQQWSSSEIGQNLFTYEDLSKATSNFSNTNLLGQGGFGYVHRGVLVDGTLVAIKQLKSGSGQGEREFQAEIQTISRVHHRHLVSLLGYCITGAQRLLVYEFVPNKTLEFHLHEKERPVMEWSKRMKIALGAAKGLAYLHEDCNPKTIHRDVKAANILIDDSYEAKLADFGLARSSLDTDTHVSTRIMGTFGYLAPEYASSGKLTEKSDVFSIGVVLLELITGRRPVDKSQPFADDDSIVDWAKPLMIQALNDGNFDGLVDPRLENDFDINEMTRMVACAAASVRHSAKRRPKMSQIVRAFEGNISIDDLTEGAAPGQSTIYSLDGSSDYSSTQYKEDLKKFKKMAFESKTFGSSECSGLTSDNGQNPSGSSSITEGQRTTQEIEPEKNTKDT

SEQ ID NO: 97789 - protein, 274 aa, Arabidopsis thaliana
  peptide (1)..(274): Ceres Seq. ID no. 13576069
  misc_feature (1)..(274): Homolog of NCBI NO: 15218207 NR Description: protein kinase -related [Arabidopsis thaliana]
  misc_feature (1)..(273): Homolog of NCBI NO: 34904234 NR Description: putative receptor protein kinase PERK1 [Oryza
  misc_feature (1)..(272): Homolog of NCBI NO: 29367569 NR Description: putative receptor protein kinase [Oryza sativa
  misc_feature (1)..(256): Homolog of NCBI NO: 15224182 NR Description: protein kinase -related [Arabidopsis thaliana]
  misc_feature (1)..(269): Homolog of NCBI NO: 13447449 NR Description: receptor protein kinase PERK1 [Brassica napus]
  misc_feature (1)..(272): Homolog of NCBI NO: 13877617 NR Description: protein kinase-like protein [Arabidopsis
  misc_feature (1)..(272): Homolog of NCBI NO: 15230130 NR Description: protein kinase -related [Arabidopsis thaliana]
  misc_feature (1)..(268): Homolog of NCBI NO: 30690042 NR Description: serine threonine protein kinase -related thaliana] >gi|26452004|dbj|BAC43092.1| putative serine/threonine kinase [Arabidopsis thaliana] >gi|29029022|gb|AAO64890.1|
  misc_feature (1)..(270): Homolog of NCBI NO: 15230209 NR Description: protein kinase -related [Arabidopsis thaliana]
  misc_feature (1)..(254): Homolog of NCBI NO: 15222081 NR Description: hypothetical protein [Arabidopsis thaliana]
MEWSKRMKIALGAAKGLAYLHEDCNPKTIHRDVKAANILIDDSYEAKLADFGLARSSLDTDTHVSTRIMGTFGYLAPEYASSGKLTEKSDVFSIGVVLLELITGRRPVDKSQPFADDDSIVDWAKPLMIQALNDGNFDGLVDPRLENDFDINEMTRMVACAAASVRHSAKRRPKMSQIVRAFEGNISIDDLTEGAAPGQSTIYSLDGSSDYSSTQYKEDLKKFKKMAFESKTFGSSECSGLTSDNGQNPSGSSSITEGQRTTQEIEPEKNTKDT

SEQ ID NO: 97790 - protein, 268 aa, Arabidopsis thaliana
  peptide (1)..(268): Ceres Seq. ID no. 13576070
  misc_feature (1)..(268): Homolog of NCBI NO: 15218207 NR Description: protein kinase -related [Arabidopsis thaliana]
  misc_feature (1)..(267): Homolog of NCBI NO: 34904234 NR Description: putative receptor protein kinase PERK1 [Oryza
  misc_feature (1)..(266): Homolog of NCBI NO: 29367569 NR Description: putative receptor protein kinase [Oryza sativa
  misc_feature (1)..(250): Homolog of NCBI NO: 15224182 NR Description: protein kinase -related [Arabidopsis thaliana]
  misc_feature (1)..(263): Homolog of NCBI NO: 13447449 NR Description: receptor protein kinase PERK1 [Brassica napus]
  misc_feature (1)..(266): Homolog of NCBI NO: 13877617 NR Description: protein kinase-like protein [Arabidopsis
  misc_feature (1)..(266): Homolog of NCBI NO: 15230130 NR Description: protein kinase -related [Arabidopsis thaliana]
  misc_feature (1)..(262): Homolog of NCBI NO: 30690042 NR Description: serine threonine protein kinase -related thaliana] >gi|26452004|dbj|BAC43092.1| putative serine/threonine kinase [Arabidopsis thaliana] >gi|29029022|gb|AAO64890.1|
  misc_feature (1)..(264): Homolog of NCBI NO: 15230209 NR Description: protein kinase -related [Arabidopsis thaliana]
  misc_feature (1)..(248): Homolog of NCBI NO: 15222081 NR Description: hypothetical protein [Arabidopsis thaliana]
MKIALGAAKGLAYLHEDCNPKTIHRDVKAANILIDDSYEAKLADFGLARSSLDTDTHVSTRIMGTFGYLAPEYASSGKLTEKSDVFSIGVVLLELITGRRPVDKSQPFADDDSIVDWAKPLMIQALNDGNFDGLVDPRLENDFDINEMTRMVACAAASVRHSAKRRPKMSQIVRAFEGNISIDDLTEGAAPGQSTIYSLDGSSDYSSTQYKEDLKKFKKMAFESKTFGSSECSGLTSDNGQNPSGSSSITEGQRTTQEIEPEKNTKDT

SEQ ID NO: 97791 - DNA, 1789 bp, Arabidopsis thaliana
  misc_feature (1)..(1789): Ceres Seq. ID no. 13576087
  misc_feature: MA Experiment ID: 20000171 Result: Up-regulated in Transcription
  misc_feature: MA Experiment 20000171 PARAMETER Experiment Name: At_42deg_Heat_P Parameter: Age (day) Value: 14
  misc_feature: MA Experiment 20000171 PARAMETER Experiment Name: At_42deg_Heat_P Parameter: Organism Value: A. thaliana
  misc_feature: MA Experiment 20000171 PARAMETER Experiment Name: At_42deg_Heat_P Parameter: Plant Line Value: WS
  misc_feature: MA Experiment 20000171 PARAMETER Experiment Name: At_42deg_Heat_P Parameter: Temperature (deg C) Value: 42 vs. 22
  misc_feature: MA Experiment 20000171 PARAMETER Experiment Name: At_42deg_Heat_P Parameter: Timepoint (hr) Value: 1
  misc_feature: MA Experiment 20000171 PARAMETER Experiment Name: At_42deg_Heat_P Parameter: Tissue Value: Aerial
  misc_feature: MA Experiment ID: 20000182 Result: Up-regulated in Transcription
  misc_feature: MA Experiment 20000182 PARAMETER Experiment Name: At_2mM_SA_P Parameter: Age (day) Value: 14
  misc_feature: MA Experiment 20000182 PARAMETER Experiment Name: At_2mM_SA_P Parameter: Organism Value: A. thaliana
  misc_feature: MA Experiment 20000182 PARAMETER Experiment Name: At_2mM_SA_P Parameter: Plant Line Value: WS
  misc_feature: MA Experiment 20000182 PARAMETER Experiment Name: At_2mM_SA_P Parameter: Timepoint (hr) Value: 6
  misc_feature: MA Experiment 20000182 PARAMETER Experiment Name: At_2mM_SA_P Parameter: Tissue Value: Aerial
  misc_feature: MA Experiment 20000182 PARAMETER Experiment Name: At_2mM_SA_P Parameter: Treatment Value: 2mM SA vs. No Treatment
  misc_feature: MA Experiment ID: 20001905 Result: Up-regulated in Transcription
  misc_feature: MA Experiment 20001905 PARAMETER Experiment Name: At_Drought_Reproduction_P Parameter: Age (day) Value: 40
  misc_feature: MA Experiment 20001905 PARAMETER Experiment Name: At_Drought_Reproduction_P Parameter: Organism Value: A. thaliana
  misc_feature: MA Experiment 20001905 PARAMETER Experiment Name: At_Drought_Reproduction_P Parameter: Plant Line Value: WS
  misc_feature: MA Experiment 20001905 PARAMETER Experiment Name: At_Drought_Reproduction_P Parameter: Timepoint (day) Value: 10
  misc_feature: MA Experiment 20001905 PARAMETER Experiment Name: At_Drought_Reproduction_P Parameter: Tissue Value: Rosettes
  misc_feature: MA Experiment 20001905 PARAMETER Experiment Name: At_Drought_Reproduction_P Parameter: Treatment Value: Drought vs. No Drought
gggaggatcctgcgaagaccaaccagtctgttaattttgtataaacaatgaaacgaagaagatcttccgagaatattctctccttctcacgcataccctagaatattgtttcgtctctcttccttctacgtttgcttatttgccccaactcgacgcgaatcatcagcttttataaattctgtcaactcaaagattgtttctgaattggaatcttacagaggtttagcttgagatgatatgactaatcagcaggagcaacacattgcgatatttacaacagctagtattccatggcttacgggaactgctgttaatcctctcttccgtgctgcctaccttgcaaatgatggggaaagacgggtcacgttggtgattccatggctgactttgaagcaccaaaagcttgtctacccaaatagcatcacttttagttccccgtcagagcaagaagcttatgtccgccagtggcttgaggagagagtctcttttcgtttagcctttgagatacgtttctatcctggaaagtttgctattgacaaaaggagtattcttcctgttggggatatatctgatgccattcctgatgaagaggcagacattgctgtcctcgaggagcctgagcatctcacatggtttcatcatggccaaaaatggaaaactaagttcaactacgtcataggaatcgtacacactaactacttggaatacgttaaaagagagaaacaaggccgtgtcaaagcatttttcctcaaatacttaaatagttgggttgttggcatttactgccacaaggtaatcaggttatctgctgcgactcaagaataccctaaatctatagtctgcaatgttcatggcgtcaaccctaaatttctcgaaattgggttgagaaaactagaacagcagaagctccaggagcagcccttcactaaaggcgcatactacattggtaagatggtctggagcaaagggtacaaggagcttcttaaactacttgagaaacaccaaaaggaacttgccgagttagaggttgatttatacggtgatggagaggactctgaagagatcaaagaagcagcccgaaaactcgacttgacggttaatgtttacccaggacgtgatcacgctgactcgctatttcacaactataaagtgtttctcaaccccagcacgacagacgttgtgtgtacaacaactgcagaagccttggcgatgggaaaaatagtagtatgcgcgaatcacatatcgaacaagttcttcaaacagtttcccaactgcagaacctatgacgatggacaaggttttgtaagagccacgctcaaggctcttggggaacaaccatcgcaacttacagagcaacaaaggcatgaactatcatgggaagctgctacacaacggtttataaaagtctctgatctgaaccggttatcaagagctgattcgaacttgtcaaagagaagtgtgtttgcgtcatcttcgattagtgtggggaaaaacttggaggatatgtcagcgtatattcatttcttggcgtctggatttgaagcttccagaacagcttttggtgctatacctggaagcttgcagcccgatgaagagttatgtagagatcttggtttgtctctcaacactccttccccaaatactcgcaagcaagattgacctgttttttaatttatctttgtctgcatatcattgggatatttttgtgtataaatcaatgtatactatctgaatcattctatagcagctttggtgtaatattgatgatgaaagttagatttttcatctt

SEQ ID NO: 97792 - protein, 473 aa, Arabidopsis thaliana; identical to SEQ ID NO: 76118
  peptide (1)..(473): Ceres Seq. ID no. 13576088
  misc_feature (216)..(377): Pfam Name: Glycosyl transferases group 1 Pfam Description: Glycosyl transferases group 1
  misc_feature (1)..(473): Homolog of NCBI NO: 22328179 NR Description: UDP-galactose:MGDG galactosyltransferase synthase 2) (DGD2) [Arabidopsis thaliana]
  misc_feature (302)..(473): Homolog of NCBI NO: 7486557 NR Description: hypothetical protein F6N23.24 - Arabidopsis >gi|3047114|gb|AAC13625.1| F6N23.24 gene product [Arabidopsis >gi|7267394|emb|CAB80864.1| predicted protein of unknown function
  misc_feature (96)..(266): Homolog of NCBI NO: 7486557 NR Description: hypothetical protein F6N23.24 - Arabidopsis >gi|3047114|gb|AAC13625.1| F6N23.24 gene product [Arabidopsis >gi|7267394|emb|CAB80864.1| predicted protein of unknown function
  misc_feature (1)..(24): Homolog of NCBI NO: 7486557 NR Description: hypothetical protein F6N23.24 - Arabidopsis >gi|3047114|gb|AAC13625.1| F6N23.24 gene product [Arabidopsis >gi|7267394|emb|CAB80864.1| predicted protein of unknown function
  misc_feature (5)..(462): Homolog of NCBI NO: 34902044 NR Description: name [Oryza sativa (japonica cultivar-group)]
  misc_feature (3)..(460): Homolog of NCBI NO: 38344037 NR Description: OJ991214_12.18 [Oryza sativa (japonica
  misc_feature (13)..(460): Homolog of NCBI NO: 27542603 NR Description: digalactosyldiacylglycerol synthase [Xerophyta
  misc_feature (2)..(473): Homolog of NCBI NO: 15229824 NR Description: digalactosyldiacylglycerol synthase 1 (MGDG:MGDG (galactolipid galactosyltransferase) (DGD1) [Arabidopsis >gi|5354158|gb|AAD42378.1|AF149841_1 digalactosyldiacylglycerol
  misc_feature (239)..(473): Homolog of NCBI NO: 18141114 NR Description: digalactosyldiacylglycerol synthase [Arabidopsis
  misc_feature (2)..(301): Homolog of NCBI NO: 30681840 NR Description: digalactosyldiacylglycerol synthase 1 (MGDG:MGDG (galactolipid galactosyltransferase) (DGD1) [Arabidopsis

SEQ ID NO: 97793 - DNA, 2040 bp, Arabidopsis thaliana
  misc_feature (1)..(2040): Ceres Seq. ID no. 13576137
  misc_feature: MA Experiment ID: 20000496 Result: Down-regulated in Transcription
  misc_feature: MA Experiment 20000496 PARAMETER Experiment Name: At_Guard_Cells_P Parameter: Harvest Date Value: 7/19/2002
  misc_feature: MA Experiment 20000496 PARAMETER Experiment Name: At_Guard_Cells_P Parameter: Organism Value: Canola
  misc_feature: MA Experiment 20000496 PARAMETER Experiment Name: At_Guard_Cells_P Parameter: Tissue Value: Guard Cells vs. Leaves
gatagattgaagcgtatactctaatttgaccaatctagggtttctagtcacttgaagcttctcttaaaaaacctgtctcactcctcgtcaacctcttcctctcccgctgtcgccaagattgaatcttttttcagttgtggcttcaccggataataaggaattcagtaagagataagttcatcctgacaacatggagaccaagaatgagaattctgatgtttcacgggcagaggagtttaaaagtcaggccaacgaagcttttaaaggtcacaaatactccagtgctattgatctatatacaaaagctattgaactcaacagcaacaacgctgtgtattgggcaaatcgtgcatttgctcacacaaaactggaggaatatggcagtgcaatacaggatgcatcgaaggccattgaagttgattcaagatactctaagggctattacaggcgtggtgctgcgtatcttgccatgggaaaatttaaggatgccttgaaggacttccaacaggtaaaaaggctttctcctaatgaccctgatgccacaagaaagctaaaggaatgtgagaaagcagtgatgaaactcaaatttgaagaagcaatctctgtgccagtatctgaaaggcgttcagtagctgagtccattgacttccatacaatagaggttgagccacaatattctggtgctagaattgagggagaggaagttaccttagattttgtgaaaacgatgatggaggattttaagaaccaaaaaacattgcataaacggtatgcctatcaaatcgtcttacagactaggcaaatcttgctagcactgccttctcttgttgatataagtgttccacatggcaaacatatcactgtttgcggtgacgttcatggtcagttctacgatcttctcaatatctttgagcttaatggcctcccttcggaggagaacccatacctatttaatggcgactttgtggacagaggctcattctccgttgagatcatcctcactttgtttgctttcaagtgcatgtgcccatcatccatatatctagccagaggaaaccatgaaagcaagagcatgaacaaaatttatggttttgagggtgaggttcggtccaagttgagtgaaaaattcgtggatctctttgctgaagttttctgttacctcccgttggctcatgttataaatgggaaggtcttcgtggtacatggaggtcttttcagtgttgacggcgtgaaactctcagacatcagagccattgacagattctgtgagccaccagaggaaggactaatgtgtgaactattgtggagtgatcctcaacctctccctggaagaggcccaagcaagcgaggagttggtctatcatttggtggagatgtgacaaagaggtttttgcaagataacaatttagatttgttggtccggtcacatgaagtaaaagatgaaggttatgaggttgaacatgacggtaaactcataactgtcttctctgcgccaaattactgtgatcagatgggtaataagggagccttcattcgttttgaagctcctgatatgaagccaaacattgttacattctcagcagtgcctcatccggatgtgaagcctatggcatatgcaaacaactttctcaggatgttcaactaaccagcaaaaagcttcttctactcaaaatgctattctaaagactcaagaccagaagtggttcagaaacataatgatataagtttttttttccctttatcttctgcagttttttcatgttgttccagaaaagggaggccatgataattaaaggtacagtatccggatttgatcgttttttttcttcttccttcttttctgataaagattttcactcttcctttaagcttatccagcaacttttgtcccttttgtcttatgttgtaagagggggtaatgtatcattcttattttagatgaaaatcttgtgattactcaacaaaagagtgaccaaatgaccccccaaaactttgtacttaaaatggtttcttgaatcaaaaatcaaaaggtgtttcttt

SEQ ID NO: 97794 - protein, 484 aa, Arabidopsis thaliana; identical to SEQ ID NO: 76043
  peptide (1)..(484): Ceres Seq. ID no. 13576138
  misc_feature (221)..(417): Pfam Name: Calcineurin-like phosphoesterase Pfam Description: Calcineurin-like phosphoesterase
  misc_feature (1)..(484): Homolog of NCBI NO: 18406066 NR Description: phospho protein phosphatase -related [Arabidopsis >gi|16930441|gb|AAL31906.1|AF419574_1 At2g42810/F7D19.19 thaliana] >gi|20197966|gb|AAD21727.2| putative phosphoprotein
  misc_feature (157)..(484): Homolog of NCBI NO: 28141302 NR Description: type 5 protein serine/threonine phosphatase 60
  misc_feature (1)..(163): Homolog of NCBI NO: 28141302 NR Description: type 5 protein serine/threonine phosphatase 60
  misc_feature (6)..(484): Homolog of NCBI NO: 24954813 NR Description: type 5 serine/threonine phosphatase 55 kDa [Lycopersicon esculentum] >gi|28141084|gb|AAO26214.1| type 5 serine/threonine phosphatase 55 kDa isoform [Lycopersicon
  misc_feature (156)..(484): Homolog of NCBI NO: 28141004 NR Description: type 5 protein serine/threonine phosphatase 62 isoform [Lycopersicon esculentum] >gi|28141085|gb|AAO26215.1|
  misc_feature (6)..(160): Homolog of NCBI NO: 28141004 NR Description: type 5 protein serine/threonine phosphatase 62 isoform [Lycopersicon esculentum] >gi|28141085|gb|AAO26215.1|
  misc_feature (1)..(484): Homolog of NCBI NO: 25289020 NR Description: phosphoprotein phosphatase (EC 3.1.3.16) At2g42810
  misc_feature (160)..(484): Homolog of NCBI NO: 19347799 NR Description: putative phosphoprotein phosphatase [Arabidopsis
  misc_feature (1)..(482): Homolog of NCBI NO: 1083755 NR Description: phosphoprotein phosphatase (EC 3.1.3.16) PPT - rat
  misc_feature (1)..(482): Homolog of NCBI NO: 13929024 NR Description: protein phosphatase 5, catalytic subunit [Rattus >gi|1709745|sp|P53042|PPP5_RAT Serine/threonine protein

SEQ ID NO: 97795 - protein, 391 aa, Arabidopsis thaliana; identical to SEQ ID NO: 76044
  peptide (1)..(391): Ceres Seq. ID no. 13576139
  misc_feature (128)..(324): Pfam Name: Calcineurin-like phosphoesterase Pfam Description: Calcineurin-like phosphoesterase
  misc_feature (1)..(391): Homolog of NCBI NO: 18406066 NR Description: phospho protein phosphatase -related [Arabidopsis >gi|16930441|gb|AAL31906.1|AF419574_1 At2g42810/F7D19.19 thaliana] >gi|20197966|gb|AAD21727.2| putative phosphoprotein
  misc_feature (64)..(391): Homolog of NCBI NO: 28141302 NR Description: type 5 protein serine/threonine phosphatase 60
  misc_feature (1)..(70): Homolog of NCBI NO: 28141302 NR Description: type 5 protein serine/threonine phosphatase 60
  misc_feature (1)..(391): Homolog of NCBI NO: 24954813 NR Description: type 5 serine/threonine phosphatase 55 kDa [Lycopersicon esculentum] >gi|28141084|gb|AAO26214.1| type 5 serine/threonine phosphatase 55 kDa isoform [Lycopersicon
  misc_feature (63)..(391): Homolog of NCBI NO: 28141004 NR Description: type 5 protein serine/threonine phosphatase 62 isoform [Lycopersicon esculentum] >gi|28141085|gb|AAO26215.1|
  misc_feature (1)..(67): Homolog of NCBI NO: 28141004 NR Description: type 5 protein serine/threonine phosphatase 62 isoform [Lycopersicon esculentum] >gi|28141085|gb|AAO26215.1|
  misc_feature (1)..(391): Homolog of NCBI NO: 25289020 NR Description: phosphoprotein phosphatase (EC 3.1.3.16) At2g42810
  misc_feature (67)..(391): Homolog of NCBI NO: 19347799 NR Description: putative phosphoprotein phosphatase [Arabidopsis
  misc_feature (1)..(389): Homolog of NCBI NO: 1083755 NR Description: phosphoprotein phosphatase (EC 3.1.3.16) PPT - rat
  misc_feature (1)..(389): Homolog of NCBI NO: 13929024 NR Description: protein phosphatase 5, catalytic subunit [Rattus >gi|1709745|sp|P53042|PPP5_RAT Serine/threonine protein

SEQ ID NO: 97796 - protein, 356 aa, Arabidopsis thaliana; identical to SEQ ID NO: 76045
  peptide (1)..(356): Ceres Seq. ID no. 13576140
  misc_feature (93)..(289): Pfam Name: Calcineurin-like phosphoesterase Pfam Description: Calcineurin-like phosphoesterase
  misc_feature (1)..(356): Homolog of NCBI NO: 18406066 NR Description: phospho protein phosphatase -related [Arabidopsis >gi|16930441|gb|AAL31906.1|AF419574_1 At2g42810/F7D19.19 thaliana] >gi|20197966|gb|AAD21727.2| putative phosphoprotein
  misc_feature (29)..(356): Homolog of NCBI NO: 28141302 NR Description: type 5 protein serine/threonine phosphatase 60
  misc_feature (1)..(35): Homolog of NCBI NO: 28141302 NR Description: type 5 protein serine/threonine phosphatase 60
  misc_feature (1)..(356): Homolog of NCBI NO: 24954813 NR Description: type 5 serine/threonine phosphatase 55 kDa [Lycopersicon esculentum] >gi|28141084|gb|AAO26214.1| type 5 serine/threonine phosphatase 55 kDa isoform [Lycopersicon
  misc_feature (28)..(356): Homolog of NCBI NO: 28141004 NR Description: type 5 protein serine/threonine phosphatase 62 isoform [Lycopersicon esculentum] >gi|28141085|gb|AAO26215.1|
  misc_feature (1)..(32): Homolog of NCBI NO: 28141004 NR Description: type 5 protein serine/threonine phosphatase 62 isoform [Lycopersicon esculentum] >gi|28141085|gb|AAO26215.1|
  misc_feature (1)..(356): Homolog of NCBI NO: 25289020 NR Description: phosphoprotein phosphatase (EC 3.1.3.16) At2g42810
  misc_feature (32)..(356): Homolog of NCBI NO: 19347799 NR Description: putative phosphoprotein phosphatase [Arabidopsis
  misc_feature (1)..(354): Homolog of NCBI NO: 1083755 NR Description: phosphoprotein phosphatase (EC 3.1.3.16) PPT - rat
  misc_feature (1)..(354): Homolog of NCBI NO: 13929024 NR Description: protein phosphatase 5, catalytic subunit [Rattus >gi|1709745|sp|P53042|PPP5_RAT Serine/threonine protein

SEQ ID NO: 97797 - DNA, 3545 bp, Arabidopsis thaliana
  misc_feature (1)..(3545): Ceres Seq. ID no. 13576172
  misc_feature: MA Experiment ID: 20000173 Result: Down-regulated in Transcription
  misc_feature: MA Experiment 20000173 PARAMETER Experiment Name: At_42deg_Heat_P Parameter: Age (day) Value: 14
  misc_feature: MA Experiment 20000173 PARAMETER Experiment Name: At_42deg_Heat_P Parameter: Organism Value: A. thaliana
  misc_feature: MA Experiment 20000173 PARAMETER Experiment Name: At_42deg_Heat_P Parameter: Plant Line Value: WS
  misc_feature: MA Experiment 20000173 PARAMETER Experiment Name: At_42deg_Heat_P Parameter: Temperature (deg C) Value: 42 vs. 22
  misc_feature: MA Experiment 20000173 PARAMETER Experiment Name: At_42deg_Heat_P Parameter: Timepoint (hr) Value: 6
  misc_feature: MA Experiment 20000173 PARAMETER Experiment Name: At_42deg_Heat_P Parameter: Tissue Value: Aerial
  misc_feature: MA Experiment ID: 20000184 Result: Down-regulated in Transcription
  misc_feature: MA Experiment 20000184 PARAMETER Experiment Name: At_Shoots__P Parameter: Age (day) Value: 7
  misc_feature: MA Experiment 20000184 PARAMETER Experiment Name: At_Shoots__P Parameter: Tissue Value: Shoots vs. Whole Plant
  misc_feature: MA Experiment ID: 20000794 Result: Up-regulated in Transcription
  misc_feature: MA Experiment 20000794 PARAMETER Experiment Name: At_Petals_P Parameter: Age (day) Value: 23-25 days
  misc_feature: MA Experiment 20000794 PARAMETER Experiment Name: At_Petals_P Parameter: Plant Line Value: WS
  misc_feature: MA Experiment 20000794 PARAMETER Experiment Name: At_Petals_P Parameter: Tissue Value: Petals vs. Whole plant
gcaggagagagtcaaagagaaggaagaggcttcgcttacttgctgagaaaaaagctccaaactttctcttattgggtttttgatcagctccggagataaaaaaaaaaagtattttcttgaaatcgaaatctgatctccattgagagtcttgctacttgatttggattccgatttaaggttttctcgagaattcttttgctgcagttattagattttgacgagccgttgatctggacggagttccagatctccgggtcgtggtaccaaggaattagggttttagcacaaagttctcgtttttctgtgtattcgagggatgaaggagttttcgggtcgatgttcgctgctctaacatttggagtatgaagatgaacatgaagaaatttctcaaaaagcttcgtatcacgcccaatcaacgagacgatggtgaaggttcagtctctaacagaagcaataagtctagtgatgcagaaccatctccttctgattcattgaggtctcaagataactctgaattcaaaccctttttgggtttatcaaattggttaagctctgttactcacaggaaaagcccttcttcttccaatgccaccaatagcaaagaggatgacactaccatggaacatggtggtcccgttgggtcggaatctgggatgcagggtttgggttctagtagtaattccaaggatccagaagttgaagaagaatatcagatacagttggctctagagttaagtgctagggaggatcctgaagctgctcagattgaggctatgaagcagttcagcttaggttctcgtccttctgctcccgagaatactccagctgaactcatggcatatagatattggaattataactgtcttggctatgatgacaagattgtggatggtttctatgacctgtgtggagtaatgaatgaatcttccttaaaaagaatacctcccttagttgatcttcaggggacacttgtgtcagatggtgtaacttgggatgctgttctagtgaacagcagcaaagattctaatctgttgagacttgaacaaatggctcttgatattgcagcaaaatcaaagtcagcgtcttcttcagggtttgtgaacagtgaattggtaaggcaactggcagttttagttgctgattacatgggtggaccagttttggatccagatagcacgttaagagcttggtggagtctgagctacagcttgaaagcaaccctccgtagcatggttctgcccctgggttctctaactattggattggctcgtcatcgtgccttgttattcaaagttttgtgtgatagtgtcggcgttccttgtcgaatagtcaaaggacagcaatataccggttcagatgatgtggcaatgaactccattaagactgatgatggcagggagtacattgttgatctcatgggagatccaggcacgcttatccccgctgatgcagctggactacaaatggactttgatgattctgtctactctgccagtcccagagatgttgattcatctcatgtagcttcttccagcagtggggtcgagagctcaattgaagaacacacagaatcttggtcagcggaacatcgttctaggaccaagggttcccgggaggaaaaccaatctgcaggtggaggggatctcatgattccaaatattagggaagctgtgggaagtcaaaaggctcctgttcaacatctttccagcaagcctactcattctttcactcatgccagatcaccttcgtggactgaaggtgttagctctccagctggacgcaggatgaaagtcaaagatgtttcacaatatatgattgatgctgccaaagagaatccacaactagctcagaagcttcatgatgtgttacttgaaagtggagttgtagctcctcgaaatttattttcggaagtctattcagagtcaatggaggcaacaggtgaaatcaaatctgtggctgaatccaatgatgagaaagggaaagattttggaacaatccagcaaggaagaaaccagagcaaccttggccctgtgaggtttttgcctcctcttccaagaccgcaatctaaagcaattacccatgacctacgtgaacattcaggatctggactcggtcatttgtctgaacattgcaatattgatggtcactctgattcctcacattctgaaacatctactgactatcccagaaatgttcctgttgccgtagctgcagcggctgttgttgcgtcttccatggttgttgctgccgccaagtcagcaaactcggattcctccactttagaactttctgctgcagctgctgctgcagttatggcgacagctgcagcagtgagcaggcagtttgaactagattcacttagcaacggggatgctggttctggtgggcttcatggggtagattcaggaggagaacgaatatccgacagatctattggcaatgaaagttcaaaatctgatgctgcaattgatgatgtagctgaatgcgagattttgtgggaggaaattactgtggctgagcgtatcggactgggatcatacggagaggtatataggggagattggcatggaactgcagtggctgtcaagaagttcattgaccaagatattactggagaggcactggaggaattcagaagtgaggtccggatgatgagaaggctcagacaccctaatattgttctcttcatgggagctgtaacccgcccaccaaatctctcaattgttacagaatttcttcctcgaggtagcttgtataggttaattcacaggcctaataaccaattagatgagcgaaagcgtctgaggatggctcttgatgctgctcgtggaatgaattatttacacagctgtaatccggtaattgtccatcgtgatcttaaatctccaaaccttctagttgacaaaaattgggttgtcaaggtgtgcgattttgggttgtctagaatgaaagtaagcacatacctctcttcaaagtcaacagcaggcacggctgaatggatggctccagaagtgcttagaaacgaacccgcagatgagaagtgtgatgtgtacagctacggggtcattctctgggaactctttacgttacagcaaccatggggaaaaatgaacccaatgcaagtggttggcgcggttggttttcaacatcgacgacttgatatccctgaatttgtggatcctggaattgcagatatcatcaggaaatgttggcagacggatccaaggttaagaccaagttttggagagatcatggattctttaaagcagctacagaaacctatccagagagcagcagttcccagttcttctgcattgaccactgatgagcaggaacaataacatcatgcttgatgaagaagatgactaaatgatgatgaaggtggggatcattctttacatattaatgttctgtggtgtgctgtccatgtgtattcaccatgttttgtttacaaattgtaaaaaaagatgaatgcaaaacaaaacaaacaaagaaaaaaagaaaaaagaagttattttgtcaatggtaaaaaaatcattgagaat

SEQ ID NO: 97798 - protein, 992 aa, Arabidopsis thaliana
  peptide (1)..(992): Ceres Seq. ID no. 13576173
  misc_feature (715)..(967): Pfam Name: Protein kinase domain Pfam Description: Protein kinase domain
  misc_feature (41)..(535): Homolog of NCBI NO: 22326737 NR Description: MAP3K delta-1 protein kinase [Arabidopsis >gi|18700075|gb|AAL77650.1| AT5g11850/F14F18_20 [Arabidopsis
  misc_feature (656)..(971): Homolog of NCBI NO: 22326737 NR Description: MAP3K delta-1 protein kinase [Arabidopsis >gi|18700075|gb|AAL77650.1| AT5g11850/F14F18_20 [Arabidopsis
  misc_feature (154)..(535): Homolog of NCBI NO: 11358502 NR Description: MAP3K delta-1 protein kinase - Arabidopsis
  misc_feature (656)..(952): Homolog of NCBI NO: 11358502 NR Description: MAP3K delta-1 protein kinase - Arabidopsis
  misc_feature (612)..(981): Homolog of NCBI NO: 7488198 NR Description: probable serine/threonine-specific protein kinase
  misc_feature (612)..(981): Homolog of NCBI NO: 18390931 NR Description: protein kinase -related [Arabidopsis thaliana]
  misc_feature (70)..(428): Homolog of NCBI NO: 7488198 NR Description: probable serine/threonine-specific protein kinase
  misc_feature (70)..(428): Homolog of NCBI NO: 18390931 NR Description: protein kinase -related [Arabidopsis thaliana]
  misc_feature (70)..(428): Homolog of NCBI NO: 9802560 NR Description: F22O13.20 [Arabidopsis thaliana]
  misc_feature (723)..(972): Homolog of NCBI NO: 9802560 NR Description: F22O13.20 [Arabidopsis thaliana]
MKMNMKKFLKKLRITPNQRDDGEGSVSNRSNKSSDAEPSPSDSLRSQDNSEFKPFLGLSNWLSSVTHRKSPSSSNATNSKEDDTTMEHGGPVGSESGMQGLGSSSNSKDPEVEEEYQIQLALELSAREDPEAAQIEAMKQFSLGSRPSAPENTPAELMAYRYWNYNCLGYDDKIVDGFYDLCGVMNESSLKRIPPLVDLQGTLVSDGVTWDAVLVNSSKDSNLLRLEQMALDIAAKSKSASSSGFVNSELVRQLAVLVADYMGGPVLDPDSTLRAWWSLSYSLKATLRSMVLPLGSLTIGLARHRALLFKVLCDSVGVPCRIVKGQQYTGSDDVAMNSIKTDDGREYIVDLMGDPGTLIPADAAGLQMDFDDSVYSASPRDVDSSHVASSSSGVESSIEEHTESWSAEHRSRTKGSREENQSAGGGDLMIPNIREAVGSQKAPVQHLSSKPTHSFTHARSPSWTEGVSSPAGRRMKVKDVSQYMIDAAKENPQLAQKLHDVLLESGVVAPRNLFSEVYSESMEATGEIKSVAESNDEKGKDFGTIQQGRNQSNLGPVRFLPPLPRPQSKAITHDLREHSGSGLGHLSEHCNIDGHSDSSHSETSTDYPRNVPVAVAAAAVVASSMVVAAAKSANSDSSTLELSAAAAAAVMATAAAVSRQFELDSLSNGDAGSGGLHGVDSGGERISDRSIGNESSKSDAAIDDVAECEILWEEITVAERIGLGSYGEVYRGDWHGTAVAVKKFIDQDITGEALEEFRSEVRMMRRLRHPNIVLFMGAVTRPPNLSIVTEFLPRGSLYRLIHRPNNQLDERKRLRMALDAARGMNYLHSCNPVIVHRDLKSPNLLVDKNWVVKVCDFGLSRMKVSTYLSSKSTAGTAEWMAPEVLRNEPADEKCDVYSYGVILWELFTLQQPWGKMNPMQVVGAVGFQHRRLDIPEFVDPGIADIIRKCWQTDPRLRPSFGEIMDSLKQLQKPIQRAAVPSSSALTTDEQEQ

SEQ ID NO: 97799 - protein, 990 aa, Arabidopsis thaliana
  peptide (1)..(990): Ceres Seq. ID no. 13576174
  misc_feature (713)..(965): Pfam Name: Protein kinase domain Pfam Description: Protein kinase domain
  misc_feature (39)..(533): Homolog of NCBI NO: 22326737 NR Description: MAP3K delta-1 protein kinase [Arabidopsis >gi|18700075|gb|AAL77650.1| AT5g11850/F14F18_20 [Arabidopsis
  misc_feature (654)..(969): Homolog of NCBI NO: 22326737 NR Description: MAP3K delta-1 protein kinase [Arabidopsis >gi|18700075|gb|AAL77650.1| AT5g11850/F14F18_20 [Arabidopsis
  misc_feature (152)..(533): Homolog of NCBI NO: 11358502 NR Description: MAP3K delta-1 protein kinase - Arabidopsis
  misc_feature (654)..(950): Homolog of NCBI NO: 11358502 NR Description: MAP3K delta-1 protein kinase - Arabidopsis
  misc_feature (610)..(979): Homolog of NCBI NO: 7488198 NR Description: probable serine/threonine-specific protein kinase
  misc_feature (610)..(979): Homolog of NCBI NO: 18390931 NR Description: protein kinase -related [Arabidopsis thaliana]
  misc_feature (68)..(426): Homolog of NCBI NO: 7488198 NR Description: probable serine/threonine-specific protein kinase
  misc_feature (68)..(426): Homolog of NCBI NO: 18390931 NR Description: protein kinase -related [Arabidopsis thaliana]
  misc_feature (68)..(426): Homolog of NCBI NO: 9802560 NR Description: F22O13.20 [Arabidopsis thaliana]
  misc_feature (721)..(970): Homolog of NCBI NO: 9802560 NR Description: F22O13.20 [Arabidopsis thaliana]
MNMKKFLKKLRITPNQRDDGEGSVSNRSNKSSDAEPSPSDSLRSQDNSEFKPFLGLSNWLSSVTHRKSPSSSNATNSKEDDTTMEHGGPVGSESGMQGLGSSSNSKDPEVEEEYQIQLALELSAREDPEAAQIEAMKQFSLGSRPSAPENTPAELMAYRYWNYNCLGYDDKIVDGFYDLCGVMNESSLKRIPPLVDLQGTLVSDGVTWDAVLVNSSKDSNLLRLEQMALDIAAKSKSASSSGFVNSELVRQLAVLVADYMGGPVLDPDSTLRAWWSLSYSLKATLRSMVLPLGSLTIGLARHRALLFKVLCDSVGVPCRIVKGQQYTGSDDVAMNSIKTDDGREYIVDLMGDPGTLIPADAAGLQMDFDDSVYSASPRDVDSSHVASSSSGVESSIEEHTESWSAEHRSRTKGSREENQSAGGGDLMIPNIREAVGSQKAPVQHLSSKPTHSFTHARSPSWTEGVSSPAGRRMKVKDVSQYMIDAAKENPQLAQKLHDVLLESGVVAPRNLFSEVYSESMEATGEIKSVAESNDEKGKDFGTIQQGRNQSNLGPVRFLPPLPRPQSKAITHDLREHSGSGLGHLSEHCNIDGHSDSSHSETSTDYPRNVPVAVAAAAVVASSMVVAAAKSANSDSSTLELSAAAAAAVMATAAAVSRQFELDSLSNGDAGSGGLHGVDSGGERISDRSIGNESSKSDAAIDDVAECEILWEEITVAERIGLGSYGEVYRGDWHGTAVAVKKFIDQDITGEALEEFRSEVRMMRRLRHPNIVLFMGAVTRPPNLSIVTEFLPRGSLYRLIHRPNNQLDERKRLRMALDAARGMNYLHSCNPVIVHRDLKSPNLLVDKNWVVKVCDFGLSRMKVSTYLSSKSTAGTAEWMAPEVLRNEPADEKCDVYSYGVILWELFTLQQPWGKMNPMQVVGAVGFQHRRLDIPEFVDPGIADIIRKCWQTDPRLRPSFGEIMDSLKQLQKPIQRAAVPSSSALTTDEQEQ

SEQ ID NO: 97800 - protein, 988 aa, Arabidopsis thaliana
  peptide (1)..(988): Ceres Seq. ID no. 13576175
  misc_feature (711)..(963): Pfam Name: Protein kinase domain Pfam Description: Protein kinase domain
  misc_feature (37)..(531): Homolog of NCBI NO: 22326737 NR Description: MAP3K delta-1 protein kinase [Arabidopsis >gi|18700075|gb|AAL77650.1| AT5g11850/F14F18_20 [Arabidopsis
  misc_feature (652)..(967): Homolog of NCBI NO: 22326737 NR Description: MAP3K delta-1 protein kinase [Arabidopsis >gi|18700075|gb|AAL77650.1| AT5g11850/F14F18_20 [Arabidopsis
  misc_feature (150)..(531): Homolog of NCBI NO: 11358502 NR Description: MAP3K delta-1 protein kinase - Arabidopsis
  misc_feature (652)..(948): Homolog of NCBI NO: 11358502 NR Description: MAP3K delta-1 protein kinase - Arabidopsis
  misc_feature (608)..(977): Homolog of NCBI NO: 7488198 NR Description: probable serine/threonine-specific protein kinase
  misc_feature (608)..(977): Homolog of NCBI NO: 18390931 NR Description: protein kinase -related [Arabidopsis thaliana]
  misc_feature (66)..(424): Homolog of NCBI NO: 7488198 NR Description: probable serine/threonine-specific protein kinase
  misc_feature (66)..(424): Homolog of NCBI NO: 18390931 NR Description: protein kinase -related [Arabidopsis thaliana]
  misc_feature (66)..(424): Homolog of NCBI NO: 9802560 NR Description: F22O13.20 [Arabidopsis thaliana]
  misc_feature (719)..(968): Homolog of NCBI NO: 9802560 NR Description: F22O13.20 [Arabidopsis thaliana]
MKKFLKKLRITPNQRDDGEGSVSNRSNKSSDAEPSPSDSLRSQDNSEFKPFLGLSNWLSSVTHRKSPSSSNATNSKEDDTTMEHGGPVGSESGMQGLGSSSNSKDPEVEEEYQIQLALELSAREDPEAAQIEAMKQFSLGSRPSAPENTPAELMAYRYWNYNCLGYDDKIVDGFYDLCGVMNESSLKRIPPLVDLQGTLVSDGVTWDAVLVNSSKDSNLLRLEQMALDIAAKSKSASSSGFVNSELVRQLAVLVADYMGGPVLDPDSTLRAWWSLSYSLKATLRSMVLPLGSLTIGLARHRALLFKVLCDSVGVPCRIVKGQQYTGSDDVAMNSIKTDDGREYIVDLMGDPGTLIPADAAGLQMDFDDSVYSASPRDVDSSHVASSSSGVESSIEEHTESWSAEHRSRTKGSREENQSAGGGDLMIPNIREAVGSQKAPVQHLSSKPTHSFTHARSPSWTEGVSSPAGRRMKVKDVSQYMIDAAKENPQLAQKLHDVLLESGVVAPRNLFSEVYSESMEATGEIKSVAESNDEKGKDFGTIQQGRNQSNLGPVRFLPPLPRPQSKAITHDLREHSGSGLGHLSEHCNIDGHSDSSHSETSTDYPRNVPVAVAAAAVVASSMVVAAAKSANSDSSTLELSAAAAAAVMATAAAVSRQFELDSLSNGDAGSGGLHGVDSGGERISDRSIGNESSKSDAAIDDVAECEILWEEITVAERIGLGSYGEVYRGDWHGTAVAVKKFIDQDITGEALEEFRSEVRMMRRLRHPNIVLFMGAVTRPPNLSIVTEFLPRGSLYRLIHRPNNQLDERKRLRMALDAARGMNYLHSCNPVIVHRDLKSPNLLVDKNWVVKVCDFGLSRMKVSTYLSSKSTAGTAEWMAPEVLRNEPADEKCDVYSYGVILWELFTLQQPWGKMNPMQVVGAVGFQHRRLDIPEFVDPGIADIIRKCWQTDPRLRPSFGEIMDSLKQLQKPIQRAAVPSSSALTTDEQEQ

SEQ ID NO: 97801 - DNA, 1901 bp, Arabidopsis thaliana
  misc_feature (1)..(1901): Ceres Seq. ID no. 13576325
  misc_feature: MA Experiment ID: 20000184 Result: Down-regulated in Transcription
  misc_feature: MA Experiment 20000184 PARAMETER Experiment Name: At_Shoots__P Parameter: Age (day) Value: 7
  misc_feature: MA Experiment 20000184 PARAMETER Experiment Name: At_Shoots__P Parameter: Tissue Value: Shoots vs. Whole Plant
  misc_feature: MA Experiment ID: 20000264 Result: Down-regulated in Transcription
  misc_feature: MA Experiment 20000264 PARAMETER Experiment Name: At_Open_Flower_P Parameter: Age (day) Value: 21
  misc_feature: MA Experiment 20000264 PARAMETER Experiment Name: At_Open_Flower_P Parameter: Plant Line Value: WS
  misc_feature: MA Experiment 20000264 PARAMETER Experiment Name: At_Open_Flower_P Parameter: Tissue Value: Open Flower vs. Whole Plant
  misc_feature: MA Experiment ID: 20000436 Result: Down-regulated in Transcription
  misc_feature: MA Experiment 20000436 PARAMETER Experiment Name: At_Drought_P Parameter: Age (day) Value: 7
  misc_feature: MA Experiment 20000436 PARAMETER Experiment Name: At_Drought_P Parameter: Organism Value: A. thaliana
  misc_feature: MA Experiment 20000436 PARAMETER Experiment Name: At_Drought_P Parameter: Plant Line Value: WS
  misc_feature: MA Experiment 20000436 PARAMETER Experiment Name: At_Drought_P Parameter: Timepoint (hr) Value: 12
  misc_feature: MA Experiment 20000436 PARAMETER Experiment Name: At_Drought_P Parameter: Tissue Value: Whole Plant
  misc_feature: MA Experiment 20000436 PARAMETER Experiment Name: At_Drought_P Parameter: Treatment Value: Drought vs. No Drought
  misc_feature: MA Experiment ID: 20000437 Result: Down-regulated in Transcription
  misc_feature: MA Experiment 20000437 PARAMETER Experiment Name: At_Drought_P Parameter: Age (day) Value: 8
  misc_feature: MA Experiment 20000437 PARAMETER Experiment Name: At_Drought_P Parameter: Organism Value: A. thaliana
  misc_feature: MA Experiment 20000437 PARAMETER Experiment Name: At_Drought_P Parameter: Plant Line Value: WS
  misc_feature: MA Experiment 20000437 PARAMETER Experiment Name: At_Drought_P Parameter: Timepoint (hr) Value: 24
  misc_feature: MA Experiment 20000437 PARAMETER Experiment Name: At_Drought_P Parameter: Tissue Value: Whole Plant
  misc_feature: MA Experiment 20000437 PARAMETER Experiment Name: At_Drought_P Parameter: Treatment Value: Drought vs. No Drought
  misc_feature: MA Experiment ID: 20000438 Result: Down-regulated in Transcription
  misc_feature: MA Experiment 20000438 PARAMETER Experiment Name: At_Shoots__P Parameter: Age (day) Value: 14
  misc_feature: MA Experiment 20000438 PARAMETER Experiment Name: At_Shoots__P Parameter: Tissue Value: Shoots vs. Whole Plant
  misc_feature: MA Experiment ID: 20000794 Result: Down-regulated in Transcription
  misc_feature: MA Experiment 20000794 PARAMETER Experiment Name: At_Petals_P Parameter: Age (day) Value: 23-25 days
  misc_feature: MA Experiment 20000794 PARAMETER Experiment Name: At_Petals_P Parameter: Plant Line Value: WS
  misc_feature: MA Experiment 20000794 PARAMETER Experiment Name: At_Petals_P Parameter: Tissue Value: Petals vs. Whole plant
  misc_feature: MA Experiment ID: 20001247 Result: Up-regulated in Transcription
  misc_feature: MA Experiment 20001247 PARAMETER Experiment Name: At_Far-red-induction_P Parameter: Age (day) Value: 7
  misc_feature: MA Experiment 20001247 PARAMETER Experiment Name: At_Far-red-induction_P Parameter: Light Value: Far-red vs. White
  misc_feature: MA Experiment 20001247 PARAMETER Experiment Name: At_Far-red-induction_P Parameter: Organism Value: A. thaliana
  misc_feature: MA Experiment 20001247 PARAMETER Experiment Name: At_Far-red-induction_P Parameter: Plant Line Value: Columbia
  misc_feature: MA Experiment 20001247 PARAMETER Experiment Name: At_Far-red-induction_P Parameter: Timepoint (hr) Value: 1
  misc_feature: MA Experiment 20001247 PARAMETER Experiment Name: At_Far-red-induction_P Parameter: Tissue Value: Whole Plant
  misc_feature: MA Experiment ID: 20001904 Result: Down-regulated in Transcription
  misc_feature: MA Experiment 20001904 PARAMETER Experiment Name: At_Drought_Reproduction_P Parameter: Age (day) Value: 37
  misc_feature: MA Experiment 20001904 PARAMETER Experiment Name: At_Drought_Reproduction_P Parameter: Organism Value: A. thaliana
  misc_feature: MA Experiment 20001904 PARAMETER Experiment Name: At_Drought_Reproduction_P Parameter: Plant Line Value: WS
  misc_feature: MA Experiment 20001904 PARAMETER Experiment Name: At_Drought_Reproduction_P Parameter: Timepoint (day) Value: 7
  misc_feature: MA Experiment 20001904 PARAMETER Experiment Name: At_Drought_Reproduction_P Parameter: Tissue Value: Rosettes
  misc_feature: MA Experiment 20001904 PARAMETER Experiment Name: At_Drought_Reproduction_P Parameter: Treatment Value: Drought vs. No Drought
  misc_feature: MA Experiment ID: 20001905 Result: Down-regulated in Transcription
  misc_feature: MA Experiment 20001905 PARAMETER Experiment Name: At_Drought_Reproduction_P Parameter: Age (day) Value: 40
  misc_feature: MA Experiment 20001905 PARAMETER Experiment Name: At_Drought_Reproduction_P Parameter: Organism Value: A. thaliana
  misc_feature: MA Experiment 20001905 PARAMETER Experiment Name: At_Drought_Reproduction_P Parameter: Plant Line Value: WS
  misc_feature: MA Experiment 20001905 PARAMETER Experiment Name: At_Drought_Reproduction_P Parameter: Timepoint (day) Value: 10
  misc_feature: MA Experiment 20001905 PARAMETER Experiment Name: At_Drought_Reproduction_P Parameter: Tissue Value: Rosettes
  misc_feature: MA Experiment 20001905 PARAMETER Experiment Name: At_Drought_Reproduction_P Parameter: Treatment Value: Drought vs. No Drought
  misc_feature: MA Experiment ID: 20001910 Result: Down-regulated in Transcription
  misc_feature: MA Experiment 20001910 PARAMETER Experiment Name: At_Drought_Reproduction_P Parameter: Age (day) Value: 37
  misc_feature: MA Experiment 20001910 PARAMETER Experiment Name: At_Drought_Reproduction_P Parameter: Organism Value: A. thaliana
  misc_feature: MA Experiment 20001910 PARAMETER Experiment Name: At_Drought_Reproduction_P Parameter: Plant Line Value: WS
  misc_feature: MA Experiment 20001910 PARAMETER Experiment Name: At_Drought_Reproduction_P Parameter: Timepoint (day) Value: 7
  misc_feature: MA Experiment 20001910 PARAMETER Experiment Name: At_Drought_Reproduction_P Parameter: Tissue Value: Flowers
  misc_feature: MA Experiment 20001910 PARAMETER Experiment Name: At_Drought_Reproduction_P Parameter: Treatment Value: Drought vs. No Drought
atggggagcttaatgatggaagagaagcaactggatttcaaccgtccgcttatatccattagacggcctacacaaacttcagaatctgagagcaaaacaagatcttttgattcagtaaccaacatgattcctccttctccaccagtttacaagtctgatatcaagtcaggtcctgtgagaaatccaggaactgttccttttcaatgggaacataagcctggaaagccaaaagacgaaaggaaaccggttttgcaaagttttgtagagccacattttgtgccaaagcttcctcctggtagagagcgagtagtagagttagggaggaaacctgaaagtactggagctgatcaccagaccaaaactgtatcgtcttcggataaatatcttgtggaggatgcaaagagtaatagttctcggtatgatgatgatgatgatgatagtgatggtacttatcttgatgcaactgatacactttcaagaactgagtcattcttctttaactgtagtgctgttagtggtgcgagtggtttggatggttcagggatactagtagagccatttggaactttatcgactgatcgacaaactcaggatctaatgatggggagattcttgcctgcagctaaagctttgacttcagaatcacctccacatcttgctaggaaaccacctaaaccagaagaaccggtgaagcagttgatgaagaagaaacagaacaaagtggagcaaaatccgtatcggtttcgtcattcgcctgatcaagaagaggaagatggaaatataagcagcatgatggcgtctggtgtttgtggattactccctcaactctgcttgagaagctctttgggactattgaatccggttccatctgtgagaatgcagcaacaaagagctgtttctgttcgtcgtatgcggtctaagtaccaagattctgcaccttctaatgaaactcataacaagcaaaatgaagataagaggaagttgaagctaattgaatcagttgcaaaagggtcttctcaaggtgagtcattatcagtatcttctataccacaaggaaaagagaaactcgagaacgttggcaccgcttcacgcagtaaaatcagtaaaaactttggtgagctcttggctagtgatgagaatacatgggaaccttcatccgagactcctgtggcagagaaaactctgtatgtagacattgtgcatctagtagataagaaggtacaagaagagtccaagaagcagcctatattgaaagagtctccttcactagacattgttcctgtaaaagatgaagaagctgatatctcgcagcctaaaagcattgagcaagagaatggtaacagagatgaggatttcactaaattctcaagtcagaaagttgaagaatgtcctgatcatcaagctattgttgcactgccagaatccgatgtggtagagattacaaaggagaagaagattgatcttgaagttcagttgcaagtaatcacaacaaatattgaaagttcaaggcttcatcatcgttcaagttatctcattgttcctccaccaccattaccaaaagctccttcagattcttggttaaagcgtacattaccaacaataccaccaaaaaacaactcattcgcatggttacagtctcttggcactgatgatgataatcactttaccaagactcaagctaatccaaagtgggaaactatggtcaaaacgtccaatacacagcaagggtttgtgtgcttctccaaggaaacactaaaccctataccagagtcatagcaagaccaaaacaaaattctcactggtggtaatgaagaaactgtaaaatttttcacaccaaattacatgtaaattttcaacaataaagaagggatgagccaataaagtttgggtattttgtctct

SEQ ID NO: 97802 - protein, 591 aa, Arabidopsis thaliana
  peptide (1)..(591): Ceres Seq. ID no. 13576326
  misc_feature (6)..(576): Pfam Name: Protein of unknown function (DUF688) Pfam Description: Protein of unknown function (DUF688)
  misc_feature (6)..(576): Homolog of NCBI NO: 15224594 NR Description: hypothetical protein [Arabidopsis thaliana]
  misc_feature (139)..(222): Homolog of NCBI NO: 34909706 NR Description: B1131G08.12 [Oryza sativa (japonica >gi|14587284|dbj|BAB61195.1| hypothetical protein [Oryza sativa
  misc_feature (48)..(80): Homolog of NCBI NO: 34909706 NR Description: B1131G08.12 [Oryza sativa (japonica >gi|14587284|dbj|BAB61195.1| hypothetical protein [Oryza sativa
  misc_feature (135)..(248): Homolog of NCBI NO: 30690644 NR Description: expressed protein [Arabidopsis thaliana]
  misc_feature (516)..(583): Homolog of NCBI NO: 30690644 NR Description: expressed protein [Arabidopsis thaliana]
  misc_feature (405)..(586): Homolog of NCBI NO: 15242527 NR Description: expressed protein [Arabidopsis thaliana] gene_id:K15I22.5~pir||T04855~similar to unknown protein
  misc_feature (6)..(86): Homolog of NCBI NO: 15242527 NR Description: expressed protein [Arabidopsis thaliana] gene_id:K15I22.5~pir||T04855~similar to unknown protein
MGSLMMEEKQLDFNRPLISIRRPTQTSESESKTRSFDSVTNMIPPSPPVYKSDIKSGPVRNPGTVPFQWEHKPGKPKDERKPVLQSFVEPHFVPKLPPGRERVVELGRKPESTGADHQTKTVSSSDKYLVEDAKSNSSRYDDDDDDSDGTYLDATDTLSRTESFFFNCSAVSGASGLDGSGILVEPFGTLSTDRQTQDLMMGRFLPAAKALTSESPPHLARKPPKPEEPVKQLMKKKQNKVEQNPYRFRHSPDQEEEDGNISSMMASGVCGLLPQLCLRSSLGLLNPVPSVRMQQQRAVSVRRMRSKYQDSAPSNETHNKQNEDKRKLKLIESVAKGSSQGESLSVSSIPQGKEKLENVGTASRSKISKNFGELLASDENTWEPSSETPVAEKTLYVDIVHLVDKKVQEESKKQPILKESPSLDIVPVKDEEADISQPKSIEQENGNRDEDFTKFSSQKVEECPDHQAIVALPESDVVEITKEKKIDLEVQLQVITTNIESSRLHHRSSYLIVPPPPLPKAPSDSWLKRTLPTIPPKNNSFAWLQSLGTDDDNHFTKTQANPKWETMVKTSNTQQGFVCFSKETLNPIPES

SEQ ID NO: 97803 - protein, 587 aa, Arabidopsis thaliana
  peptide (1)..(587): Ceres Seq. ID no. 13576327
  misc_feature (2)..(572): Pfam Name: Protein of unknown function (DUF688) Pfam Description: Protein of unknown function (DUF688)
  misc_feature (2)..(572): Homolog of NCBI NO: 15224594 NR Description: hypothetical protein [Arabidopsis thaliana]
  misc_feature (135)..(218): Homolog of NCBI NO: 34909706 NR Description: B1131G08.12 [Oryza sativa (japonica >gi|14587284|dbj|BAB61195.1| hypothetical protein [Oryza sativa
  misc_feature (44)..(76): Homolog of NCBI NO: 34909706 NR Description: B1131G08.12 [Oryza sativa (japonica >gi|14587284|dbj|BAB61195.1| hypothetical protein [Oryza sativa
  misc_feature (131)..(244): Homolog of NCBI NO: 30690644 NR Description: expressed protein [Arabidopsis thaliana]
  misc_feature (512)..(579): Homolog of NCBI NO: 30690644 NR Description: expressed protein [Arabidopsis thaliana]
  misc_feature (401)..(582): Homolog of NCBI NO: 15242527 NR Description: expressed protein [Arabidopsis thaliana] gene_id:K15I22.5~pir||T04855~similar to unknown protein
  misc_feature (2)..(82): Homolog of NCBI NO: 15242527 NR Description: expressed protein [Arabidopsis thaliana] gene_id:K15I22.5~pir||T04855~similar to unknown protein
MMEEKQLDFNRPLISIRRPTQTSESESKTRSFDSVTNMIPPSPPVYKSDIKSGPVRNPGTVPFQWEHKPGKPKDERKPVLQSFVEPHFVPKLPPGRERVVELGRKPESTGADHQTKTVSSSDKYLVEDAKSNSSRYDDDDDDSDGTYLDATDTLSRTESFFFNCSAVSGASGLDGSGILVEPFGTLSTDRQTQDLMMGRFLPAAKALTSESPPHLARKPPKPEEPVKQLMKKKQNKVEQNPYRFRHSPDQEEEDGNISSMMASGVCGLLPQLCLRSSLGLLNPVPSVRMQQQRAVSVRRMRSKYQDSAPSNETHNKQNEDKRKLKLIESVAKGSSQGESLSVSSIPQGKEKLENVGTASRSKISKNFGELLASDENTWEPSSETPVAEKTLYVDIVHLVDKKVQEESKKQPILKESPSLDIVPVKDEEADISQPKSIEQENGNRDEDFTKFSSQKVEECPDHQAIVALPESDVVEITKEKKIDLEVQLQVITTNIESSRLHHRSSYLIVPPPPLPKAPSDSWLKRTLPTIPPKNNSFAWLQSLGTDDDNHFTKTQANPKWETMVKTSNTQQGFVCFSKETLNPIPES

SEQ ID NO: 97804 - protein, 586 aa, Arabidopsis thaliana
  peptide (1)..(586): Ceres Seq. ID no. 13576328
  misc_feature (1)..(571): Pfam Name: Protein of unknown function (DUF688) Pfam Description: Protein of unknown function (DUF688)
  misc_feature (1)..(571): Homolog of NCBI NO: 15224594 NR Description: hypothetical protein [Arabidopsis thaliana]
  misc_feature (134)..(217): Homolog of NCBI NO: 34909706 NR Description: B1131G08.12 [Oryza sativa (japonica >gi|14587284|dbj|BAB61195.1| hypothetical protein [Oryza sativa
  misc_feature (43)..(75): Homolog of NCBI NO: 34909706 NR Description: B1131G08.12 [Oryza sativa (japonica >gi|14587284|dbj|BAB61195.1| hypothetical protein [Oryza sativa
  misc_feature (130)..(243): Homolog of NCBI NO: 30690644 NR Description: expressed protein [Arabidopsis thaliana]
  misc_feature (511)..(578): Homolog of NCBI NO: 30690644 NR Description: expressed protein [Arabidopsis thaliana]
  misc_feature (400)..(581): Homolog of NCBI NO: 15242527 NR Description: expressed protein [Arabidopsis thaliana] gene_id:K15I22.5~pir||T04855~similar to unknown protein
  misc_feature (1)..(81): Homolog of NCBI NO: 15242527 NR Description: expressed protein [Arabidopsis thaliana] gene_id:K15I22.5~pir||T04855~similar to unknown protein
MEEKQLDFNRPLISIRRPTQTSESESKTRSFDSVTNMIPPSPPVYKSDIKSGPVRNPGTVPFQWEHKPGKPKDERKPVLQSFVEPHFVPKLPPGRERVVELGRKPESTGADHQTKTVSSSDKYLVEDAKSNSSRYDDDDDDSDGTYLDATDTLSRTESFFFNCSAVSGASGLDGSGILVEPFGTLSTDRQTQDLMMGRFLPAAKALTSESPPHLARKPPKPEEPVKQLMKKKQNKVEQNPYRFRHSPDQEEEDGNISSMMASGVCGLLPQLCLRSSLGLLNPVPSVRMQQQRAVSVRRMRSKYQDSAPSNETHNKQNEDKRKLKLIESVAKGSSQGESLSVSSIPQGKEKLENVGTASRSKISKNFGELLASDENTWEPSSETPVAEKTLYVDIVHLVDKKVQEESKKQPILKESPSLDIVPVKDEEADISQPKSIEQENGNRDEDFTKFSSQKVEECPDHQAIVALPESDVVEITKEKKIDLEVQLQVITTNIESSRLHHRSSYLIVPPPPLPKAPSDSWLKRTLPTIPPKNNSFAWLQSLGTDDDNHFTKTQANPKWETMVKTSNTQQGFVCFSKETLNPIPES

SEQ ID NO: 97805 - DNA, 934 bp, Arabidopsis thaliana
  misc_feature (1)..(934): Ceres Seq. ID no. 13576339
  misc_feature: MA Experiment ID: 108433 Result: Up-regulated in Transcription
  misc_feature: MA Experiment 108433 PARAMETER Experiment Name: At_rhl_Mutant2_cDNA_P Parameter: Age (day) Value: 7
  misc_feature: MA Experiment 108433 PARAMETER Experiment Name: At_rhl_Mutant2_cDNA_P Parameter: Organism Value: A. thaliana
  misc_feature: MA Experiment 108433 PARAMETER Experiment Name: At_rhl_Mutant2_cDNA_P Parameter: Plant Line Value: rhl Mutant vs. wt landsburg
  misc_feature: MA Experiment 108433 PARAMETER Experiment Name: At_rhl_Mutant2_cDNA_P Parameter: Tissue Value: Roots
  misc_feature: MA Experiment ID: 108434 Result: Down-regulated in Transcription
  misc_feature: MA Experiment 108434 PARAMETER Experiment Name: At_Root_Tips_cDNA_P Parameter: Tissue Value: Root Tips
  misc_feature: MA Experiment ID: 108435 Result: Up-regulated in Transcription
  misc_feature: MA Experiment 108435 PARAMETER Experiment Name: At_stm_Mutants_cDNA_P Parameter: Plant Line Value: wt Landsburg vs stm
  misc_feature: MA Experiment 108435 PARAMETER Experiment Name: At_stm_Mutants_cDNA_P Parameter: Tissue Value: Shoot Apical Meristem Region
  misc_feature: MA Experiment ID: 108464 Result: Down-regulated in Transcription
  misc_feature: MA Experiment 108464 PARAMETER Experiment Name: At_Germinating_Seeds_cDNA_P Parameter: Age (day) Value: 4 vs. 0
  misc_feature: MA Experiment 108464 PARAMETER Experiment Name: At_Germinating_Seeds_cDNA_P Parameter: Tissue Value: Germinating Seeds
  misc_feature: MA Experiment ID: 108474 Result: Down-regulated in Transcription
  misc_feature: MA Experiment 108474 PARAMETER Experiment Name: At_Drought_Flowers_cDNA_P Parameter: Timepoint (hr) Value: null
  misc_feature: MA Experiment 108474 PARAMETER Experiment Name: At_Drought_Flowers_cDNA_P Parameter: Treatment Value: Drought vs. No Drought
  misc_feature: MA Experiment ID: 108489 Result: Down-regulated in Transcription
  misc_feature: MA Experiment ID: 108501 Result: Down-regulated in Transcription
  misc_feature: MA Experiment 108501 PARAMETER Experiment Name: At_ap2_floral_buds_cDNA_P Parameter: Plant Line Value: ap2 (Ler.)
  misc_feature: MA Experiment 108501 PARAMETER Experiment Name: At_ap2_floral_buds_cDNA_P Parameter: Tissue Value: Closed Flower
  misc_feature: MA Experiment ID: 108594 Result: Down-regulated in Transcription
  misc_feature: MA Experiment 108594 PARAMETER Experiment Name: At_Ler-rhl_Root_cDNA_P Parameter: Plant Line Value: null
  misc_feature: MA Experiment ID: 108668 Result: Up-regulated in Transcription
  misc_feature: MA Experiment 108668 PARAMETER Experiment Name: At_2mM_SA_cDNA_P Parameter: Plant Line Value: WS
  misc_feature: MA Experiment 108668 PARAMETER Experiment Name: At_2mM_SA_cDNA_P Parameter: Timepoint (hr) Value: 6
  misc_feature: MA Experiment 108668 PARAMETER Experiment Name: At_2mM_SA_cDNA_P Parameter: Treatment Value: 2mM SA vs. No Treatment
  misc_feature: MA Experiment ID: 20000069 Result: Up-regulated in Transcription
  misc_feature: MA Experiment 20000069 PARAMETER Experiment Name: At_100uM_ABA_Mutants_cDNA_P Parameter: Plant Line Value: CS23
  misc_feature: MA Experiment 20000069 PARAMETER Experiment Name: At_100uM_ABA_Mutants_cDNA_P Parameter: Timepoint (hr) Value: 6
  misc_feature: MA Experiment 20000069 PARAMETER Experiment Name: At_100uM_ABA_Mutants_cDNA_P Parameter: Tissue Value: Aerial
  misc_feature: MA Experiment 20000069 PARAMETER Experiment Name: At_100uM_ABA_Mutants_cDNA_P Parameter: Treatment Value: 100uM ABA vs. No Treatment
  misc_feature: MA Experiment ID: 20000070 Result: Up-regulated in Transcription
  misc_feature: MA Experiment 20000070 PARAMETER Experiment Name: At_100uM_ABA_Mutants_cDNA_P Parameter: Plant Line Value: CS24
  misc_feature: MA Experiment 20000070 PARAMETER Experiment Name: At_100uM_ABA_Mutants_cDNA_P Parameter: Timepoint (hr) Value: 6
  misc_feature: MA Experiment 20000070 PARAMETER Experiment Name: At_100uM_ABA_Mutants_cDNA_P Parameter: Tissue Value: Aerial
  misc_feature: MA Experiment 20000070 PARAMETER Experiment Name: At_100uM_ABA_Mutants_cDNA_P Parameter: Treatment Value: 100uM ABA vs. No Treatment
  misc_feature: MA Experiment ID: 20000087 Result: Up-regulated in Transcription
  misc_feature: MA Experiment 20000087 PARAMETER Experiment Name: At_100uM_ABA_Mutants_cDNA_P Parameter: Plant Line Value: WS
  misc_feature: MA Experiment 20000087 PARAMETER Experiment Name: At_100uM_ABA_Mutants_cDNA_P Parameter: Timepoint (hr) Value: 6
  misc_feature: MA Experiment 20000087 PARAMETER Experiment Name: At_100uM_ABA_Mutants_cDNA_P Parameter: Tissue Value: Aerial
  misc_feature: MA Experiment 20000087 PARAMETER Experiment Name: At_100uM_ABA_Mutants_cDNA_P Parameter: Treatment Value: 100uM ABA vs. No Treatment
  misc_feature: MA Experiment ID: 20000088 Result: Up-regulated in Transcription
  misc_feature: MA Experiment 20000088 PARAMETER Experiment Name: At_100uM_ABA_Mutants_cDNA_P Parameter: Plant Line Value: Landsberg
  misc_feature: MA Experiment 20000088 PARAMETER Experiment Name: At_100uM_ABA_Mutants_cDNA_P Parameter: Timepoint (hr) Value: 6
  misc_feature: MA Experiment 20000088 PARAMETER Experiment Name: At_100uM_ABA_Mutants_cDNA_P Parameter: Tissue Value: Aerial
  misc_feature: MA Experiment 20000088 PARAMETER Experiment Name: At_100uM_ABA_Mutants_cDNA_P Parameter: Treatment Value: 100uM ABA vs. No Treatment
  misc_feature: MA Experiment ID: 20000089 Result: Up-regulated in Transcription
  misc_feature: MA Experiment ID: 20000090 Result: Up-regulated in Transcription
  misc_feature: MA Experiment ID: 20000306 Result: Down-regulated in Transcription
  misc_feature: MA Experiment 20000306 PARAMETER Experiment Name: At_Germinating_Seeds_Sub_P Parameter: Age (hr) Value: 6 vs. 0
  misc_feature: MA Experiment 20000306 PARAMETER Experiment Name: At_Germinating_Seeds_Sub_P Parameter: Organism Value: A. thaliana
  misc_feature: MA Experiment 20000306 PARAMETER Experiment Name: At_Germinating_Seeds_Sub_P Parameter: Plant Line Value: WS
  misc_feature: MA Experiment 20000306 PARAMETER Experiment Name: At_Germinating_Seeds_Sub_P Parameter: Tissue Value: Germinating Seeds
  misc_feature: MA Experiment ID: 20000307 Result: Down-regulated in Transcription
  misc_feature: MA Experiment 20000307 PARAMETER Experiment Name: At_Germinating_Seeds_Sub_P Parameter: Age (hr) Value: 24 vs. 0
  misc_feature: MA Experiment 20000307 PARAMETER Experiment Name: At_Germinating_Seeds_Sub_P Parameter: Organism Value: A. thaliana
  misc_feature: MA Experiment 20000307 PARAMETER Experiment Name: At_Germinating_Seeds_Sub_P Parameter: Plant Line Value: WS
  misc_feature: MA Experiment 20000307 PARAMETER Experiment Name: At_Germinating_Seeds_Sub_P Parameter: Tissue Value: Germinating Seeds
  misc_feature: MA Experiment ID: 20000314 Result: Down-regulated in Transcription
  misc_feature: MA Experiment 20000314 PARAMETER Experiment Name: At_14day_Shoots-Roots_Sub_P Parameter: Age (day) Value: 14
  misc_feature: MA Experiment 20000314 PARAMETER Experiment Name: At_14day_Shoots-Roots_Sub_P Parameter: Organism Value: A. thaliana
  misc_feature: MA Experiment 20000314 PARAMETER Experiment Name: At_14day_Shoots-Roots_Sub_P Parameter: Plant Line Value: WS
  misc_feature: MA Experiment 20000314 PARAMETER Experiment Name: At_14day_Shoots-Roots_Sub_P Parameter: Tissue Value: Roots vs. Whole Plant
  misc_feature: MA Experiment ID: 20000315 Result: Down-regulated in Transcription
  misc_feature: MA Experiment 20000315 PARAMETER Experiment Name: At_14day_Shoots-Roots_Sub_P Parameter: Age (day) Value: 14
  misc_feature: MA Experiment 20000315 PARAMETER Experiment Name: At_14day_Shoots-Roots_Sub_P Parameter: Organism Value: A. thaliana
  misc_feature: MA Experiment 20000315 PARAMETER Experiment Name: At_14day_Shoots-Roots_Sub_P Parameter: Plant Line Value: WS
  misc_feature: MA Experiment 20000315 PARAMETER Experiment Name: At_14day_Shoots-Roots_Sub_P Parameter: Tissue Value: Shoots vs. Whole Plant
  misc_feature: MA Experiment ID: 20000328 Result: Down-regulated in Transcription
  misc_feature: MA Experiment 20000328 PARAMETER Experiment Name: At_42deg_Heat_Sub_P Parameter: Age (day) Value: 14
  misc_feature: MA Experiment 20000328 PARAMETER Experiment Name: At_42deg_Heat_Sub_P Parameter: Organism Value: A. thaliana
  misc_feature: MA Experiment 20000328 PARAMETER Experiment Name: At_42deg_Heat_Sub_P Parameter: Plant Line Value: WS
  misc_feature: MA Experiment 20000328 PARAMETER Experiment Name: At_42deg_Heat_Sub_P Parameter: Temperature (deg C) Value: 42 vs. 22
  misc_feature: MA Experiment 20000328 PARAMETER Experiment Name: At_42deg_Heat_Sub_P Parameter: Timepoint (hr) Value: 6
  misc_feature: MA Experiment 20000328 PARAMETER Experiment Name: At_42deg_Heat_Sub_P Parameter: Tissue Value: Aerial
  misc_feature: MA Experiment ID: 20000347 Result: Up-regulated in Transcription
  misc_feature: MA Experiment 20000347 PARAMETER Experiment Name: At_2mM_SA_Sub_P Parameter: Age (day) Value: 14
  misc_feature: MA Experiment 20000347 PARAMETER Experiment Name: At_2mM_SA_Sub_P Parameter: Organism Value: A. thaliana
  misc_feature: MA Experiment 20000347 PARAMETER Experiment Name: At_2mM_SA_Sub_P Parameter: Plant Line Value: WS
  misc_feature: MA Experiment 20000347 PARAMETER Experiment Name: At_2mM_SA_Sub_P Parameter: Timepoint (hr) Value: 6
  misc_feature: MA Experiment 20000347 PARAMETER Experiment Name: At_2mM_SA_Sub_P Parameter: Tissue Value: Aerial
  misc_feature: MA Experiment 20000347 PARAMETER Experiment Name: At_2mM_SA_Sub_P Parameter: Treatment Value: 2mM SA vs. No Treatment
  misc_feature: MA Experiment ID: 20000355 Result: Down-regulated in Transcription
  misc_feature: MA Experiment 20000355 PARAMETER Experiment Name: At_Siliques_Sub_P Parameter: Age (day) Value: 21
  misc_feature: MA Experiment 20000355 PARAMETER Experiment Name: At_Siliques_Sub_P Parameter: Organism Value: A. thaliana
  misc_feature: MA Experiment 20000355 PARAMETER Experiment Name: At_Siliques_Sub_P Parameter: Plant Line Value: WS
  misc_feature: MA Experiment 20000355 PARAMETER Experiment Name: At_Siliques_Sub_P Parameter: Tissue Value: Less Than 5mm Siliques vs. Whole Plant
  misc_feature: MA Experiment ID: 20000440 Result: Down-regulated in Transcription
  misc_feature: MA Experiment 20000440 PARAMETER Experiment Name: At_Closed-Flower__Sub_P Parameter: Tissue Value: Closed Flower vs. Whole Plant
  misc_feature: MA Experiment ID: 20001807 Result: Up-regulated in Transcription
  misc_feature: MA Experiment 20001807 PARAMETER Experiment Name: At_50mM_NH4NO3_L-to-H_Sub_P Parameter: Timepoint (hr) Value: 6
  misc_feature: MA Experiment 20001807 PARAMETER Experiment Name: At_50mM_NH4NO3_L-to-H_Sub_P Parameter: Tissue Value: Leaf
  misc_feature: MA Experiment 20001807 PARAMETER Experiment Name: At_50mM_NH4NO3_L-to-H_Sub_P Parameter: Treatment Value: 50mM NH4NO3 vs 100mM Mannitol
cccccgctcaaccacaaagatctctctacttcaataaatctccaccttgctttaagaacaaagtcttaacaaatggcaggaatcaaagttttcggtcacccagcttccacagccactagaagagttctcatcgctcttcacgagaagaatctcgactttgaattcgttcatatcgagctcaaagatggtgaacacaagaaagagcctttcatcttccgcaacccttttggtaaagttccagcctttgaagatggagacttcaagcttttcgaatcaagagcaatcactcaatacatagctcatttttactcagacaaaggaaaccaacttgtctcccttggctccaaggacattgcgggcatagccatgggcattgaaattgaatcgcatgagtttgacccagttggttcaaagcttgtttgggagcaagtcttaaagcctttgtatggtatgaccacagacaaaaccgttgttgaagaagaagaggctaagctagccaaggtcctcgatgtttacgaacacaggcttggtgagtccaagtatttggcttctgataaattcactttggtcgatcttcacactatccctgtgattcagtacttgcttggtacaccaactaagaaactctttgacgagcgtccacatgtcagtgcttgggttgctgacatcacttctaggccttctgctaagaaggttctttaagtgactcacaaactgttaatcagaagattgaataaagtggcgatgacctcattgccctaattctcataaacaataaaagtggcgatgacctaattgccaaattctcatacactctgtgatttttttgtgtgtgtctcctctgttttttttttttggtttgaatgtaatcttcaataataatgagtcttgatatataataaaaatatatttggtagcctaaagtttagctact

SEQ ID NO: 97806 - protein, 209 aa, Arabidopsis thaliana; identical to SEQ ID NO: 34803
  peptide (1)..(209): Ceres Seq. ID no. 13576340
  misc_feature (1)..(209): Homolog of NCBI NO: 15218639 NR Description: glutathione transferase, putative [Arabidopsis
  misc_feature (1)..(209): Homolog of NCBI NO: 17377644 NR Description: Glutathione S-transferase 11 (GST class-phi)
  misc_feature (1)..(209): Homolog of NCBI NO: 15218640 NR Description: glutathione transferase, putative [Arabidopsis
  misc_feature (1)..(209): Homolog of NCBI NO: 481821 NR Description: probable glutathione transferase (EC 2.5.1.18)
  misc_feature (1)..(209): Homolog of NCBI NO: 15227063 NR Description: glutathione transferase, putative [Arabidopsis
  misc_feature (1)..(208): Homolog of NCBI NO: 15235401 NR Description: glutathione transferase, putative [Arabidopsis
  misc_feature (2)..(208): Homolog of NCBI NO: 2554769 NR Description: Chain A, Structure Of Glutathione S-Transferase
  misc_feature (1)..(208): Homolog of NCBI NO: 21555418 NR Description: Atpm24.1 glutathione S transferase [Arabidopsis
  misc_feature (1)..(206): Homolog of NCBI NO: 30678437 NR Description: glutathione transferase, putative [Arabidopsis >gi|28973615|gb|AAO64132.1| putative glutathione transferase

SEQ ID NO: 97807 - protein, 111 aa, Arabidopsis thaliana; identical to SEQ ID NO: 34804
  peptide (1)..(111): Ceres Seq. ID no. 13576341
  misc_feature (1)..(111): Homolog of NCBI NO: 15218639 NR Description: glutathione transferase, putative [Arabidopsis
  misc_feature (1)..(111): Homolog of NCBI NO: 17377644 NR Description: Glutathione S-transferase 11 (GST class-phi)
  misc_feature (1)..(111): Homolog of NCBI NO: 15218640 NR Description: glutathione transferase, putative [Arabidopsis
  misc_feature (1)..(111): Homolog of NCBI NO: 481821 NR Description: probable glutathione transferase (EC 2.5.1.18)
  misc_feature (1)..(111): Homolog of NCBI NO: 15227063 NR Description: glutathione transferase, putative [Arabidopsis
  misc_feature (1)..(110): Homolog of NCBI NO: 15235401 NR Description: glutathione transferase, putative [Arabidopsis
  misc_feature (1)..(110): Homolog of NCBI NO: 2554769 NR Description: Chain A, Structure Of Glutathione S-Transferase
  misc_feature (1)..(110): Homolog of NCBI NO: 21555418 NR Description: Atpm24.1 glutathione S transferase [Arabidopsis
  misc_feature (1)..(108): Homolog of NCBI NO: 30678437 NR Description: glutathione transferase, putative [Arabidopsis >gi|28973615|gb|AAO64132.1| putative glutathione transferase

SEQ ID NO: 97808 - DNA, 1074 bp, Arabidopsis thaliana
  misc_feature (1)..(1074): Ceres Seq. ID no. 13576346
  misc_feature: MA Experiment ID: 108595 Result: Down-regulated in Transcription
  misc_feature: MA Experiment 108595 PARAMETER Experiment Name: At_Ler-pi_Ovule_cDNA_P Parameter: Plant Line Value: null
  misc_feature: MA Experiment ID: 20000185 Result: Down-regulated in Transcription
  misc_feature: MA Experiment 20000185 PARAMETER Experiment Name: At_Roots__P Parameter: Age (day) Value: 7 vs. 21
  misc_feature: MA Experiment 20000185 PARAMETER Experiment Name: At_Roots__P Parameter: Organism Value: A. thaliana
  misc_feature: MA Experiment 20000185 PARAMETER Experiment Name: At_Roots__P Parameter: Tissue Value: Roots vs. Whole Plant
  misc_feature: MA Experiment ID: 20000439 Result: Down-regulated in Transcription
  misc_feature: MA Experiment 20000439 PARAMETER Experiment Name: At_Roots__P Parameter: Age (day) Value: 14 vs. 21
  misc_feature: MA Experiment 20000439 PARAMETER Experiment Name: At_Roots__P Parameter: Organism Value: A. thaliana
  misc_feature: MA Experiment 20000439 PARAMETER Experiment Name: At_Roots__P Parameter: Tissue Value: Roots vs. Whole Plant
acttcttctagtcttaaaataaaacaaacaaaaaatctagtgttcggctctaacacgctcgacgaccatggcggtctcgtttaatacaacgcttcaccagccttctctgagtccgagctgtagcatcaagctttattctgggttaaagcctcaatctgcaagctttttggcaagtgggtatcagaatttgaacaaggagttctatggaagagtttataagagtctgcaatctgggactgggaaagcgagcaggtcacgggtaaagatgatgccaataggaacaccgagagtaccctacagaaaccgagaagaagggacttggcaatgggttgatatatggaatgccctttatcgagagcgtgtaatcttcattggacaaaacattgatgaagagtttagcaaccagatattagcaaccatgttgtaccttgatactcttgatgactcgaggaggatttatatgtacctaaatggtccgggtggtgatcttactccaagtctagccatctatgatacaatgaagagcttgaaaagtccggttgggacacattgcgttgggcttgcttacaaccttgcaggttttcttcttgcggctggagaaaagggtcaccgatttgcgatgccattatcaagaatcgccctccagtcaccagctggtgcagcccgtggtcaggctgatgatatccaaaatgaagcaaaagagctttcaaggataagagactacctcttcaatgaactagccaagaatacaggccagcctgcggaaagggtcttcaaagacttgagccgggtgaaaaggttcaatgcagaggaagcaatcgagtatggacttattgataagattgttagaccaccgcgcatcaaagaagacgctcctcgccaagacgaaagcgcagggctaggctagtctttttgtttgtttgttatgtcaaaagttttaatctttatgttattgtgattgttacctaataaaatcactgattattgtttttttattccaccgattatctgatttctacaaacattttaaactgctgtgtaagatgtaaaggaagtgacttccctggaaaattc

SEQ ID NO: 97809 - protein, 279 aa, Arabidopsis thaliana; identical to SEQ ID NO: 26212
  peptide (1)..(279): Ceres Seq. ID no. 13576347
  misc_feature (79)..(263): Pfam Name: Clp protease Pfam Description: Clp protease
  misc_feature (1)..(279): Homolog of NCBI NO: 18391391 NR Description: ATP-dependent Clp protease proteolytic subunit
  misc_feature (1)..(279): Homolog of NCBI NO: 16209712 NR Description: At1g12410/F5O11_7 [Arabidopsis thaliana]
  misc_feature (68)..(260): Homolog of NCBI NO: 22298615 NR Description: ATP-dependent Clp protease proteolytic subunit 2
  misc_feature (50)..(260): Homolog of NCBI NO: 13812170 NR Description: ATP-dependent Clp protease proteolytic subunit
  misc_feature (68)..(260): Homolog of NCBI NO: 17231849 NR Description: ATP-dependent Clp protease proteolytic subunit
  misc_feature (68)..(260): Homolog of NCBI NO: 23126722 NR Description: hypothetical protein [Nostoc punctiforme]
  misc_feature (68)..(262): Homolog of NCBI NO: 18203213 NR Description: ATP-dependent Clp protease proteolytic subunit 3
  misc_feature (68)..(260): Homolog of NCBI NO: 23043112 NR Description: hypothetical protein [Trichodesmium erythraeum
  misc_feature (68)..(263): Homolog of NCBI NO: 33240837 NR Description: Protease subunit of ATP-dependent Clp protease
  misc_feature (75)..(268): Homolog of NCBI NO: 29840675 NR Description: ATP-dependent Clp protease, proteolytic subunit

SEQ ID NO: 97810 - protein, 213 aa, Arabidopsis thaliana; identical to SEQ ID NO: 26213
  peptide (1)..(213): Ceres Seq. ID no. 13576348
  misc_feature (13)..(197): Pfam Name: Clp protease Pfam Description: Clp protease
  misc_feature (1)..(213): Homolog of NCBI NO: 18391391 NR Description: ATP-dependent Clp protease proteolytic subunit
  misc_feature (1)..(213): Homolog of NCBI NO: 16209712 NR Description: At1g12410/F5O11_7 [Arabidopsis thaliana]
  misc_feature (2)..(194): Homolog of NCBI NO: 22298615 NR Description: ATP-dependent Clp protease proteolytic subunit 2
  misc_feature (1)..(194): Homolog of NCBI NO: 13812170 NR Description: ATP-dependent Clp protease proteolytic subunit
  misc_feature (2)..(194): Homolog of NCBI NO: 17231849 NR Description: ATP-dependent Clp protease proteolytic subunit
  misc_feature (2)..(194): Homolog of NCBI NO: 23126722 NR Description: hypothetical protein [Nostoc punctiforme]
  misc_feature (2)..(196): Homolog of NCBI NO: 18203213 NR Description: ATP-dependent Clp protease proteolytic subunit 3
  misc_feature (2)..(194): Homolog of NCBI NO: 23043112 NR Description: hypothetical protein [Trichodesmium erythraeum
  misc_feature (2)..(197): Homolog of NCBI NO: 33240837 NR Description: Protease subunit of ATP-dependent Clp protease
  misc_feature (9)..(202): Homolog of NCBI NO: 29840675 NR Description: ATP-dependent Clp protease, proteolytic subunit

SEQ ID NO: 97811 - protein, 212 aa, Arabidopsis thaliana; identical to SEQ ID NO: 27066
  peptide (1)..(212): Ceres Seq. ID no. 13576349
  misc_feature (12)..(196): Pfam Name: Clp protease Pfam Description: Clp protease
  misc_feature (1)..(212): Homolog of NCBI NO: 18391391 NR Description: ATP-dependent Clp protease proteolytic subunit
  misc_feature (1)..(212): Homolog of NCBI NO: 16209712 NR Description: At1g12410/F5O11_7 [Arabidopsis thaliana]
  misc_feature (1)..(193): Homolog of NCBI NO: 22298615 NR Description: ATP-dependent Clp protease proteolytic subunit 2
  misc_feature (1)..(193): Homolog of NCBI NO: 13812170 NR Description: ATP-dependent Clp protease proteolytic subunit
  misc_feature (1)..(193): Homolog of NCBI NO: 17231849 NR Description: ATP-dependent Clp protease proteolytic subunit
  misc_feature (1)..(193): Homolog of NCBI NO: 23126722 NR Description: hypothetical protein [Nostoc punctiforme]
  misc_feature (1)..(195): Homolog of NCBI NO: 18203213 NR Description: ATP-dependent Clp protease proteolytic subunit 3
  misc_feature (1)..(193): Homolog of NCBI NO: 23043112 NR Description: hypothetical protein [Trichodesmium erythraeum
  misc_feature (1)..(196): Homolog of NCBI NO: 33240837 NR Description: Protease subunit of ATP-dependent Clp protease
  misc_feature (8)..(201): Homolog of NCBI NO: 29840675 NR Description: ATP-dependent Clp protease, proteolytic subunit

SEQ ID NO: 97812 - DNA, 740 bp, Arabidopsis thaliana
  misc_feature (1)..(740): Ceres Seq. ID no. 13576352
  misc_feature: MA Experiment ID: 108488 Result: Down-regulated in Transcription
  misc_feature: MA Experiment ID: 108595 Result: Up-regulated in Transcription
  misc_feature: MA Experiment 108595 PARAMETER Experiment Name: At_Ler-pi_Ovule_cDNA_P Parameter: Plant Line Value: null
  misc_feature: MA Experiment ID: 20000087 Result: Up-regulated in Transcription
  misc_feature: MA Experiment 20000087 PARAMETER Experiment Name: At_100uM_ABA_Mutants_cDNA_P Parameter: Plant Line Value: WS
  misc_feature: MA Experiment 20000087 PARAMETER Experiment Name: At_100uM_ABA_Mutants_cDNA_P Parameter: Timepoint (hr) Value: 6
  misc_feature: MA Experiment 20000087 PARAMETER Experiment Name: At_100uM_ABA_Mutants_cDNA_P Parameter: Tissue Value: Aerial
  misc_feature: MA Experiment 20000087 PARAMETER Experiment Name: At_100uM_ABA_Mutants_cDNA_P Parameter: Treatment Value: 100uM ABA vs. No Treatment
  misc_feature: MA Experiment ID: 20000111 Result: Up-regulated in Transcription
  misc_feature: MA Experiment 20000111 PARAMETER Experiment Name: At_42deg_Heat_cDNA_P Parameter: Temperature (deg C) Value: 42 vs. 22
  misc_feature: MA Experiment 20000111 PARAMETER Experiment Name: At_42deg_Heat_cDNA_P Parameter: Timepoint (hr) Value: 6
  misc_feature: MA Experiment 20000111 PARAMETER Experiment Name: At_42deg_Heat_cDNA_P Parameter: Tissue Value: Aerial
  misc_feature: MA Experiment ID: 20000113 Result: Up-regulated in Transcription
  misc_feature: MA Experiment 20000113 PARAMETER Experiment Name: At_42deg_Heat_cDNA_P Parameter: Temperature (deg C) Value: 42 vs. 22
  misc_feature: MA Experiment 20000113 PARAMETER Experiment Name: At_42deg_Heat_cDNA_P Parameter: Timepoint (hr) Value: 8
  misc_feature: MA Experiment 20000113 PARAMETER Experiment Name: At_42deg_Heat_cDNA_P Parameter: Tissue Value: Aerial
ccacgcaattacctcttctcactctcagacattttgtcaaacagatggtgctcgtttctgaatcagcttaagaactaacaaggagacagacactaagcttggtttttctctccgattagacggaggaaaaagtgaaaacgaggggcttagacgagtgatgtgatagagatggaaggagttgagctagaattagaaagaagaagcaagttcttgaacagtttgatacagaagaagaaggctaaagaacagcaagatcagaaagatgagttcaatgttcgtgttagggcttcagatatgcctttgcctcaacagaacagagcctttagtttgtcgcgtgagattttgaatgctactccagggaaggctgataacaaaagactcgctcatgccctaaaaaaggacttcgattcagcctacggcccggcatggcactgcattgttggaacaagctttggttcatacgtgactcattccacaggaggattcctatattttcagatcgacaaagtttacgttcttctcttcaagactgccgtggagccgttagatcaaaaatgagataaaacgttgatgatcagagcatcttcaatttaatccttttcttttagaattctctgtcttgtatcccacaatgtaattctgcctaagacaaaatctttgtggctcctattgtgtaattagaagtcatcttctctactgtgaatcgtttcaacttcacaatgcaaaatattgttcttctc

SEQ ID NO: 97813 - protein, 129 aa, Arabidopsis thaliana; identical to SEQ ID NO: 23535
  peptide (1)..(129): Ceres Seq. ID no. 13576353
  misc_feature (31)..(122): Pfam Name: Dynein light chain type 1 Pfam Description: Dynein light chain type 1
  misc_feature (1)..(129): Homolog of NCBI NO: 15220678 NR Description: dynein light subunit lc6, flagellar outer arm thaliana] >gi|9295690|gb|AAF86996.1|AC005292_5 F26F24.7 thaliana] >gi|17380802|gb|AAL36088.1| putative dynein light
  misc_feature (1)..(126): Homolog of NCBI NO: 38567715 NR Description: B1358B12.13 [Oryza sativa (japonica
  misc_feature (17)..(125): Homolog of NCBI NO: 15241269 NR Description: dynein light chain - like protein [Arabidopsis
  misc_feature (1)..(123): Homolog of NCBI NO: 34913978 NR Description: dynein light chain - like protein [Oryza sativa
  misc_feature (36)..(121): Homolog of NCBI NO: 34902908 NR Description: unnamed protein product [Oryza sativa (japonica group)] >gi|6016872|dbj|BAA85215.1| unnamed protein product
  misc_feature (32)..(120): Homolog of NCBI NO: 28829295 NR Description: similar to Anthocidaris crassispina (Sea urchin).
  misc_feature (33)..(125): Homolog of NCBI NO: 15218189 NR Description: dynein light chain -related [Arabidopsis thaliana]
  misc_feature (29)..(121): Homolog of NCBI NO: 23508829 NR Description: dynein light chain 1, putative [Plasmodium
  misc_feature (29)..(121): Homolog of NCBI NO: 23488907 NR Description: dynein light chain 1, cytoplasmic [Plasmodium
  misc_feature (38)..(121): Homolog of NCBI NO: 2811014 NR Description: DYNEIN LIGHT CHAIN LC6, FLAGELLAR OUTER ARM

SEQ ID NO: 97814 - protein, 87 aa, Arabidopsis thaliana; identical to SEQ ID NO: 23536
  peptide (1)..(87): Ceres Seq. ID no. 13576354
  misc_feature (1)..(80): Pfam Name: Dynein light chain type 1 Pfam Description: Dynein light chain type 1
  misc_feature (1)..(87): Homolog of NCBI NO: 15220678 NR Description: dynein light subunit lc6, flagellar outer arm thaliana] >gi|9295690|gb|AAF86996.1|AC005292_5 F26F24.7 thaliana] >gi|17380802|gb|AAL36088.1| putative dynein light
  misc_feature (1)..(84): Homolog of NCBI NO: 38567715 NR Description: B1358B12.13 [Oryza sativa (japonica
  misc_feature (1)..(83): Homolog of NCBI NO: 15241269 NR Description: dynein light chain - like protein [Arabidopsis
  misc_feature (1)..(81): Homolog of NCBI NO: 34913978 NR Description: dynein light chain - like protein [Oryza sativa
  misc_feature (1)..(79): Homolog of NCBI NO: 34902908 NR Description: unnamed protein product [Oryza sativa (japonica group)] >gi|6016872|dbj|BAA85215.1| unnamed protein product
  misc_feature (1)..(78): Homolog of NCBI NO: 28829295 NR Description: similar to Anthocidaris crassispina (Sea urchin).
  misc_feature (1)..(83): Homolog of NCBI NO: 15218189 NR Description: dynein light chain -related [Arabidopsis thaliana]
  misc_feature (1)..(79): Homolog of NCBI NO: 23508829 NR Description: dynein light chain 1, putative [Plasmodium
  misc_feature (1)..(79): Homolog of NCBI NO: 23488907 NR Description: dynein light chain 1, cytoplasmic [Plasmodium
  misc_feature (1)..(79): Homolog of NCBI NO: 2811014 NR Description: DYNEIN LIGHT CHAIN LC6, FLAGELLAR OUTER ARM

SEQ ID NO: 97815 - DNA, 1030 bp, Arabidopsis thaliana
  misc_feature (1)..(1030): Ceres Seq. ID no. 13576355
  misc_feature: MA Experiment ID: 108569 Result: Up-regulated in Transcription
  misc_feature: MA Experiment 108569 PARAMETER Experiment Name: At_0.001%_MeJA__cDNA_P Parameter: Timepoint (hr) Value: 6
  misc_feature: MA Experiment 108569 PARAMETER Experiment Name: At_0.001%_MeJA__cDNA_P Parameter: Tissue Value: Aerial
  misc_feature: MA Experiment 108569 PARAMETER Experiment Name: At_0.001%_MeJA__cDNA_P Parameter: Treatment Value: 0.001% MeJA vs. No Treatment
  misc_feature: MA Experiment ID: 108573 Result: Up-regulated in Transcription
  misc_feature: MA Experiment 108573 PARAMETER Experiment Name: At_Drought_cDNA_P Parameter: Timepoint (hr) Value: 6
  misc_feature: MA Experiment 108573 PARAMETER Experiment Name: At_Drought_cDNA_P Parameter: Tissue Value: Aerial
  misc_feature: MA Experiment 108573 PARAMETER Experiment Name: At_Drought_cDNA_P Parameter: Treatment Value: Drought vs. No Drought
  misc_feature: MA Experiment ID: 20000111 Result: Up-regulated in Transcription
  misc_feature: MA Experiment 20000111 PARAMETER Experiment Name: At_42deg_Heat_cDNA_P Parameter: Temperature (deg C) Value: 42 vs. 22
  misc_feature: MA Experiment 20000111 PARAMETER Experiment Name: At_42deg_Heat_cDNA_P Parameter: Timepoint (hr) Value: 6
  misc_feature: MA Experiment 20000111 PARAMETER Experiment Name: At_42deg_Heat_cDNA_P Parameter: Tissue Value: Aerial
  misc_feature: MA Experiment ID: 20000112 Result: Up-regulated in Transcription
  misc_feature: MA Experiment 20000112 PARAMETER Experiment Name: At_42deg_Heat_cDNA_P Parameter: Temperature (deg C) Value: 42 vs. 22
  misc_feature: MA Experiment 20000112 PARAMETER Experiment Name: At_42deg_Heat_cDNA_P Parameter: Timepoint (hr) Value: 2
  misc_feature: MA Experiment 20000112 PARAMETER Experiment Name: At_42deg_Heat_cDNA_P Parameter: Tissue Value: Aerial
  misc_feature: MA Experiment ID: 20000113 Result: Up-regulated in Transcription
  misc_feature: MA Experiment 20000113 PARAMETER Experiment Name: At_42deg_Heat_cDNA_P Parameter: Temperature (deg C) Value: 42 vs. 22
  misc_feature: MA Experiment 20000113 PARAMETER Experiment Name: At_42deg_Heat_cDNA_P Parameter: Timepoint (hr) Value: 8
  misc_feature: MA Experiment 20000113 PARAMETER Experiment Name: At_42deg_Heat_cDNA_P Parameter: Tissue Value: Aerial
  misc_feature: MA Experiment ID: 20000224 Result: Down-regulated in Transcription
  misc_feature: MA Experiment ID: 20000227 Result: Down-regulated in Transcription
  misc_feature: MA Experiment 20000227 PARAMETER Experiment Name: At_Root-Tips-vs-Tops_P Parameter: Tissue Value: Root Tips vs. Root Tops
  misc_feature: MA Experiment ID: 20000234 Result: Down-regulated in Transcription
  misc_feature: MA Experiment 20000234 PARAMETER Experiment Name: At_Siliques_P Parameter: Age (day) Value: 21
  misc_feature: MA Experiment 20000234 PARAMETER Experiment Name: At_Siliques_P Parameter: Organism Value: A. thaliana
  misc_feature: MA Experiment 20000234 PARAMETER Experiment Name: At_Siliques_P Parameter: Plant Line Value: WS
  misc_feature: MA Experiment 20000234 PARAMETER Experiment Name: At_Siliques_P Parameter: Tissue Value: Less Than 5mm Siliques vs. Whole Plant
  misc_feature: MA Experiment ID: 20000264 Result: Down-regulated in Transcription
  misc_feature: MA Experiment 20000264 PARAMETER Experiment Name: At_Open_Flower_P Parameter: Age (day) Value: 21
  misc_feature: MA Experiment 20000264 PARAMETER Experiment Name: At_Open_Flower_P Parameter: Plant Line Value: WS
  misc_feature: MA Experiment 20000264 PARAMETER Experiment Name: At_Open_Flower_P Parameter: Tissue Value: Open Flower vs. Whole Plant
  misc_feature: MA Experiment ID: 20000265 Result: Down-regulated in Transcription
  misc_feature: MA Experiment 20000265 PARAMETER Experiment Name: At_Open_Flower_P Parameter: Age (day) Value: 21
  misc_feature: MA Experiment 20000265 PARAMETER Experiment Name: At_Open_Flower_P Parameter: Plant Line Value: WS
  misc_feature: MA Experiment 20000265 PARAMETER Experiment Name: At_Open_Flower_P Parameter: Tissue Value: Closed Flower vs. Whole Plant
  misc_feature: MA Experiment ID: 20000286 Result: Down-regulated in Transcription
  misc_feature: MA Experiment 20000286 PARAMETER Experiment Name: At_Open_Flower_P Parameter: Age (day) Value: 21
  misc_feature: MA Experiment 20000286 PARAMETER Experiment Name: At_Open_Flower_P Parameter: Plant Line Value: WS
  misc_feature: MA Experiment 20000286 PARAMETER Experiment Name: At_Open_Flower_P Parameter: Tissue Value: Half Open vs. Whole Plant
  misc_feature: MA Experiment ID: 20000496 Result: Down-regulated in Transcription
  misc_feature: MA Experiment 20000496 PARAMETER Experiment Name: At_Guard_Cells_P Parameter: Harvest Date Value: 7/19/2002
  misc_feature: MA Experiment 20000496 PARAMETER Experiment Name: At_Guard_Cells_P Parameter: Organism Value: Canola
  misc_feature: MA Experiment 20000496 PARAMETER Experiment Name: At_Guard_Cells_P Parameter: Tissue Value: Guard Cells vs. Leaves
  misc_feature: MA Experiment ID: 20000794 Result: Down-regulated in Transcription
  misc_feature: MA Experiment 20000794 PARAMETER Experiment Name: At_Petals_P Parameter: Age (day) Value: 23-25 days
  misc_feature: MA Experiment 20000794 PARAMETER Experiment Name: At_Petals_P Parameter: Plant Line Value: WS
  misc_feature: MA Experiment 20000794 PARAMETER Experiment Name: At_Petals_P Parameter: Tissue Value: Petals vs. Whole plant
  misc_feature: MA Experiment ID: 20001558 Result: Down-regulated in Transcription
  misc_feature: MA Experiment 20001558 PARAMETER Experiment Name: At_Drought_Soil_Dry_P Parameter: Age (day) Value: 27
  misc_feature: MA Experiment 20001558 PARAMETER Experiment Name: At_Drought_Soil_Dry_P Parameter: Organism Value: A. thaliana
  misc_feature: MA Experiment 20001558 PARAMETER Experiment Name: At_Drought_Soil_Dry_P Parameter: Plant Line Value: WS
  misc_feature: MA Experiment 20001558 PARAMETER Experiment Name: At_Drought_Soil_Dry_P Parameter: Post Timepoint (hr) Value: 6
  misc_feature: MA Experiment 20001558 PARAMETER Experiment Name: At_Drought_Soil_Dry_P Parameter: Post-Treatment Value: Re-Water vs. No Drought
  misc_feature: MA Experiment 20001558 PARAMETER Experiment Name: At_Drought_Soil_Dry_P Parameter: Timepoint (day) Value: 13
  misc_feature: MA Experiment 20001558 PARAMETER Experiment Name: At_Drought_Soil_Dry_P Parameter: Treatment Value: Drought vs. No Drought
  misc_feature: MA Experiment ID: 20001560 Result: Down-regulated in Transcription
  misc_feature: MA Experiment 20001560 PARAMETER Experiment Name: At_Drought_Soil_Dry_P Parameter: Age (day) Value: 28
  misc_feature: MA Experiment 20001560 PARAMETER Experiment Name: At_Drought_Soil_Dry_P Parameter: Organism Value: A. thaliana
  misc_feature: MA Experiment 20001560 PARAMETER Experiment Name: At_Drought_Soil_Dry_P Parameter: Plant Line Value: WS
  misc_feature: MA Experiment 20001560 PARAMETER Experiment Name: At_Drought_Soil_Dry_P Parameter: Post Timepoint (hr) Value: None
  misc_feature: MA Experiment 20001560 PARAMETER Experiment Name: At_Drought_Soil_Dry_P Parameter: Post-Treatment Value: None
  misc_feature: MA Experiment 20001560 PARAMETER Experiment Name: At_Drought_Soil_Dry_P Parameter: Timepoint (day) Value: 14
  misc_feature: MA Experiment 20001560 PARAMETER Experiment Name: At_Drought_Soil_Dry_P Parameter: Treatment Value: Drought vs. No Drought
gacaaaccaaaaaaaagcctaaaaagccgaccttttttctttctttctctcctctacctctcagcttctgctggatctctccagcagacacgatcttgttcggagagattcgtaggggaccgatctatcaaggcttcaagggcaaacagaaatggaccacgacaagacaggatgccaaagcccacctgaaggtcccaagctatgtactaacaactgcggtttctttggaagcgctgccacaatgaacatgtgttctaagtgtcacaaggatatgttgttccaacaggagcagggcgctaagtttgcatctgcagtgtctggaacatcgtcatccagcaacatcataaaggaaacctttaccgctgcgttggtcgatattgaaaccaaatccgttgagccgatgactgtttctgtacagccatcctctgtccaagtcgttgcagaggtagtagcaccagaagaagctgcgaaaccaaagggaccaagccgatgtactacttgcaataagcgggttggcctgactggattcaaatgtcgctgtgggagcctcttctgcggaacacaccgctatgcagacgtacatgactgctccttcaattaccatgctgctgcgcaagaggcgatagctaaggcaaacccggttgtgaaagcagagaagcttgacaaaatctgaaaatctaagtaaacttctctggtttcatcaggtggcctggtgtttccttctcctgtctgtgtctggttcaagtattctcatgttaaaaaggttttatataaggtcgaatgaaagcgtgcttgatctttagcgtcttccatctctctgtggtgtggaactttctattatctgtgtttgcaagcagagaaacgtgctcttaaaaaaaatgctttgtgtgtttatctttctactatttttgagcactgtgttattgtttcctgtttggtctgtatcatattgagattgtctctgtagctacatgaagcttatttaaaaaggcctgtgtttgtccttcaatcagtgattcctttcaatttc

SEQ ID NO: 97816 - protein, 173 aa, Arabidopsis thaliana; identical to SEQ ID NO: 81692
  peptide (1)..(173): Ceres Seq. ID no. 13576356
  misc_feature (114)..(154): Pfam Name: AN1-like Zinc finger Pfam Description: AN1-like Zinc finger
  misc_feature (1)..(173): Homolog of NCBI NO: 18403408 NR Description: expressed protein [Arabidopsis thaliana]
  misc_feature (1)..(173): Homolog of NCBI NO: 25082726 NR Description: expressed protein [Arabidopsis thaliana]
  misc_feature (1)..(173): Homolog of NCBI NO: 11361253 NR Description: hypothetical protein p85RF [imported] - Prunus
  misc_feature (1)..(173): Homolog of NCBI NO: 35187687 NR Description: zinc-finger protein [Oryza sativa (indica
  misc_feature (8)..(173): Homolog of NCBI NO: 18404102 NR Description: expressed protein [Arabidopsis thaliana]
  misc_feature (8)..(173): Homolog of NCBI NO: 15231686 NR Description: zinc finger - like protein [Arabidopsis thaliana]
  misc_feature (11)..(173): Homolog of NCBI NO: 15234402 NR Description: expressed protein [Arabidopsis thaliana]
  misc_feature (8)..(173): Homolog of NCBI NO: 14596167 NR Description: zinc finger-like protein [Arabidopsis thaliana]
  misc_feature (15)..(173): Homolog of NCBI NO: 15225894 NR Description: zinc finger protein -related [Arabidopsis
  misc_feature (1)..(173): Homolog of NCBI NO: 8778645 NR Description: F5O11.17 [Arabidopsis thaliana]

SEQ ID NO: 97817 - protein, 143 aa, Arabidopsis thaliana; identical to SEQ ID NO: 81693
  peptide (1)..(143): Ceres Seq. ID no. 13576357
  misc_feature (84)..(124): Pfam Name: AN1-like Zinc finger Pfam Description: AN1-like Zinc finger
  misc_feature (1)..(143): Homolog of NCBI NO: 18403408 NR Description: expressed protein [Arabidopsis thaliana]
  misc_feature (1)..(143): Homolog of NCBI NO: 25082726 NR Description: expressed protein [Arabidopsis thaliana]
  misc_feature (1)..(143): Homolog of NCBI NO: 11361253 NR Description: hypothetical protein p85RF [imported] - Prunus
  misc_feature (1)..(143): Homolog of NCBI NO: 35187687 NR Description: zinc-finger protein [Oryza sativa (indica
  misc_feature (1)..(143): Homolog of NCBI NO: 18404102 NR Description: expressed protein [Arabidopsis thaliana]
  misc_feature (1)..(143): Homolog of NCBI NO: 15231686 NR Description: zinc finger - like protein [Arabidopsis thaliana]
  misc_feature (1)..(143): Homolog of NCBI NO: 15234402 NR Description: expressed protein [Arabidopsis thaliana]
  misc_feature (1)..(143): Homolog of NCBI NO: 14596167 NR Description: zinc finger-like protein [Arabidopsis thaliana]
  misc_feature (1)..(143): Homolog of NCBI NO: 15225894 NR Description: zinc finger protein -related [Arabidopsis
  misc_feature (1)..(143): Homolog of NCBI NO: 8778645 NR Description: F5O11.17 [Arabidopsis thaliana]

SEQ ID NO: 97818 - protein, 141 aa, Arabidopsis thaliana; identical to SEQ ID NO: 81694
  peptide (1)..(141): Ceres Seq. ID no. 13576358
  misc_feature (82)..(122): Pfam Name: AN1-like Zinc finger Pfam Description: AN1-like Zinc finger
  misc_feature (1)..(141): Homolog of NCBI NO: 18403408 NR Description: expressed protein [Arabidopsis thaliana]
  misc_feature (1)..(141): Homolog of NCBI NO: 25082726 NR Description: expressed protein [Arabidopsis thaliana]
  misc_feature (1)..(141): Homolog of NCBI NO: 11361253 NR Description: hypothetical protein p85RF [imported] - Prunus
  misc_feature (1)..(141): Homolog of NCBI NO: 35187687 NR Description: zinc-finger protein [Oryza sativa (indica
  misc_feature (1)..(141): Homolog of NCBI NO: 18404102 NR Description: expressed protein [Arabidopsis thaliana]
  misc_feature (1)..(141): Homolog of NCBI NO: 15231686 NR Description: zinc finger - like protein [Arabidopsis thaliana]
  misc_feature (1)..(141): Homolog of NCBI NO: 15234402 NR Description: expressed protein [Arabidopsis thaliana]
  misc_feature (1)..(141): Homolog of NCBI NO: 14596167 NR Description: zinc finger-like protein [Arabidopsis thaliana]
  misc_feature (1)..(141): Homolog of NCBI NO: 15225894 NR Description: zinc finger protein -related [Arabidopsis
  misc_feature (1)..(141): Homolog of NCBI NO: 8778645 NR Description: F5O11.17 [Arabidopsis thaliana]

SEQ ID NO: 97819 - DNA, 1479 bp, Arabidopsis thaliana
  misc_feature (1)..(1479): Ceres Seq. ID no. 13576359
  misc_feature: MA Experiment ID: 108579 Result: Down-regulated in Transcription
  misc_feature: MA Experiment 108579 PARAMETER Experiment Name: At_4deg_Cold_cDNA_P Parameter: Temperature (deg C) Value: 4 vs. 22
  misc_feature: MA Experiment 108579 PARAMETER Experiment Name: At_4deg_Cold_cDNA_P Parameter: Timepoint (hr) Value: 6
  misc_feature: MA Experiment 108579 PARAMETER Experiment Name: At_4deg_Cold_cDNA_P Parameter: Tissue Value: Aerial
  misc_feature: MA Experiment ID: 20000264 Result: Down-regulated in Transcription
  misc_feature: MA Experiment 20000264 PARAMETER Experiment Name: At_Open_Flower_P Parameter: Age (day) Value: 21
  misc_feature: MA Experiment 20000264 PARAMETER Experiment Name: At_Open_Flower_P Parameter: Plant Line Value: WS
  misc_feature: MA Experiment 20000264 PARAMETER Experiment Name: At_Open_Flower_P Parameter: Tissue Value: Open Flower vs. Whole Plant
  misc_feature: MA Experiment ID: 20000265 Result: Down-regulated in Transcription
  misc_feature: MA Experiment 20000265 PARAMETER Experiment Name: At_Open_Flower_P Parameter: Age (day) Value: 21
  misc_feature: MA Experiment 20000265 PARAMETER Experiment Name: At_Open_Flower_P Parameter: Plant Line Value: WS
  misc_feature: MA Experiment 20000265 PARAMETER Experiment Name: At_Open_Flower_P Parameter: Tissue Value: Closed Flower vs. Whole Plant
gaaattgtcctctcagttcctacgcgaagttttcaacagattcgccggagaatcttcgaatcaacggcggagaaatggctctatcacgcctctcatcacgatccaacatcatcactcgtcccttctccgccgccttcagccgattaatctcaacggacacaactccgatcacaatcgagacttcgcttcctttcacagctcacttatgtgatccaccgtcacgctccgtcgaatcatcgagtcaagagcttctcgatttcttcagaaccatggcgttgatgcgacgtatggaaatcgcagccgattcgctttacaaagcgaagctaatccgagggttttgtcatctctacgacggccaagaagctgtagctataggcatggaagctgcgattacaaagaaagacgcgattattactgcttatcgtgatcactgtattttcttaggtcgtggtggttcgcttcatgaggttttctcagagcttatgggaagacaagctggttgttctaaagggaaaggtggatctatgcacttctataagaaggaatcgtcgttttacggtggtcatgggattgttggtgctcaggttccattaggttgtggtattgcttttgctcagaagtataacaaggaagaggctgtcacatttgctttgtatggtgatggtgctgcgaatcagggacagttgtttgaagctttgaatatttctgctctttgggatttgcctgcaattttggtctgcgagaacaatcactatggaatgggaactgctgaatggagagccgctaagagtccatcttactacaagcgtggtgattatgttcctggactcaaggtagatggtatggatgcatttgctgtcaaacaagcttgcaaatttgctaagcagcatgcgttggagaaggggccaataattcttgagatggacacatacaggtaccacggtcactccatgtctgatcctgggagcacataccgtacccgagatgagatatctggtgtgaggcaggaacgggatccaattgagagaataaagaagctggtactatctcatgacctagcaaccgagaaagagcttaaggatatggagaaggaaattagaaaagaagtagatgacgccattgccaaagctaaggattgcccaatgccagagccttctgagctctttaccaatgtgtatgtgaagggatttggcaccgagtcatttggacctgacagaaaagaagtcaaagcttcccttccatgatcatggagctcttgttcgttaaactgccacgtgtcatgagaaagttggctgatagagaaatctatgaatatgaataaagatctgattgtatactctctctctccccccccttctgaactttaatctctctgtatctttgtttacaaacataaggagaaacaatgttattcttgtgaagctttagtagtctcgtgtttaatattcaagcaatcgagttgagatctcattttgtgct

SEQ ID NO: 97820 - protein, 413 aa, Arabidopsis thaliana; identical to SEQ ID NO: 42167
  peptide (1)..(413): Ceres Seq. ID no. 13576360
  misc_feature (25)..(413): Homolog of NCBI NO: 15218940 NR Description: pyruvate dehydrogenase e1 alpha subunit -related thaliana] >gi|27735220|sp|P52901|ODPA_ARATH Pyruvate
  misc_feature (25)..(413): Homolog of NCBI NO: 13430788 NR Description: putative pyruvate dehydrogenase e1 alpha subunit
  misc_feature (25)..(413): Homolog of NCBI NO: 2117533 NR Description: pyruvate dehydrogenase (lipoamide) (EC 1.2.4.1)
  misc_feature (25)..(413): Homolog of NCBI NO: 1709449 NR Description: Pyruvate dehydrogenase E1 component alpha subunit,
  misc_feature (25)..(413): Homolog of NCBI NO: 15221692 NR Description: pyruvate dehydrogenase E1 alpha subunit thaliana] >gi|7431563|pir||T00648 pyruvate dehydrogenase
  misc_feature (25)..(413): Homolog of NCBI NO: 23306664 NR Description: pyruvate dehydrogenase E1a-like subunit IAR4
  misc_feature (25)..(413): Homolog of NCBI NO: 1709453 NR Description: Pyruvate dehydrogenase E1 component alpha subunit,
  misc_feature (25)..(413): Homolog of NCBI NO: 12003246 NR Description: pyruvate dehydrogenase [Lycopersicon esculentum]
  misc_feature (27)..(413): Homolog of NCBI NO: 3851005 NR Description: pyruvate dehydrogenase E1 alpha subunit [Zea mays]
  misc_feature (27)..(413): Homolog of NCBI NO: 28465343 NR Description: pyruvate dehydrogenase E1alpha subunit [Beta

SEQ ID NO: 97821 - protein, 389 aa, Arabidopsis thaliana; identical to SEQ ID NO: 24019
  peptide (1)..(389): Ceres Seq. ID no. 13576361
  misc_feature (1)..(389): Homolog of NCBI NO: 15218940 NR Description: pyruvate dehydrogenase e1 alpha subunit -related thaliana] >gi|27735220|sp|P52901|ODPA_ARATH Pyruvate
  misc_feature (1)..(389): Homolog of NCBI NO: 13430788 NR Description: putative pyruvate dehydrogenase e1 alpha subunit
  misc_feature (1)..(389): Homolog of NCBI NO: 2117533 NR Description: pyruvate dehydrogenase (lipoamide) (EC 1.2.4.1)
  misc_feature (1)..(389): Homolog of NCBI NO: 1709449 NR Description: Pyruvate dehydrogenase E1 component alpha subunit,
  misc_feature (1)..(389): Homolog of NCBI NO: 15221692 NR Description: pyruvate dehydrogenase E1 alpha subunit thaliana] >gi|7431563|pir||T00648 pyruvate dehydrogenase
  misc_feature (1)..(389): Homolog of NCBI NO: 23306664 NR Description: pyruvate dehydrogenase E1a-like subunit IAR4
  misc_feature (1)..(389): Homolog of NCBI NO: 1709453 NR Description: Pyruvate dehydrogenase E1 component alpha subunit,
  misc_feature (1)..(389): Homolog of NCBI NO: 12003246 NR Description: pyruvate dehydrogenase [Lycopersicon esculentum]
  misc_feature (3)..(389): Homolog of NCBI NO: 3851005 NR Description: pyruvate dehydrogenase E1 alpha subunit [Zea mays]
  misc_feature (3)..(389): Homolog of NCBI NO: 28465343 NR Description: pyruvate dehydrogenase E1alpha subunit [Beta

SEQ ID NO: 97822 - protein, 324 aa, Arabidopsis thaliana; identical to SEQ ID NO: 24020
  peptide (1)..(324): Ceres Seq. ID no. 13576362
  misc_feature (1)..(324): Homolog of NCBI NO: 15218940 NR Description: pyruvate dehydrogenase e1 alpha subunit -related thaliana] >gi|27735220|sp|P52901|ODPA_ARATH Pyruvate
  misc_feature (1)..(324): Homolog of NCBI NO: 13430788 NR Description: putative pyruvate dehydrogenase e1 alpha subunit
  misc_feature (1)..(324): Homolog of NCBI NO: 2117533 NR Description: pyruvate dehydrogenase (lipoamide) (EC 1.2.4.1)
  misc_feature (1)..(324): Homolog of NCBI NO: 1709449 NR Description: Pyruvate dehydrogenase E1 component alpha subunit,
  misc_feature (1)..(324): Homolog of NCBI NO: 15221692 NR Description: pyruvate dehydrogenase E1 alpha subunit thaliana] >gi|7431563|pir||T00648 pyruvate dehydrogenase
  misc_feature (1)..(324): Homolog of NCBI NO: 23306664 NR Description: pyruvate dehydrogenase E1a-like subunit IAR4
  misc_feature (1)..(324): Homolog of NCBI NO: 1709453 NR Description: Pyruvate dehydrogenase E1 component alpha subunit,
  misc_feature (1)..(324): Homolog of NCBI NO: 12003246 NR Description: pyruvate dehydrogenase [Lycopersicon esculentum]
  misc_feature (1)..(324): Homolog of NCBI NO: 3851005 NR Description: pyruvate dehydrogenase E1 alpha subunit [Zea mays]
  misc_feature (1)..(324): Homolog of NCBI NO: 28465343 NR Description: pyruvate dehydrogenase E1alpha subunit [Beta

SEQ ID NO: 97823 - DNA, 1325 bp, Arabidopsis thaliana
  misc_feature (1)..(1325): Ceres Seq. ID no. 13576363
  misc_feature: MA Experiment ID: 108434 Result: Up-regulated in Transcription
  misc_feature: MA Experiment 108434 PARAMETER Experiment Name: At_Root_Tips_cDNA_P Parameter: Tissue Value: Root Tips
  misc_feature: MA Experiment ID: 108461 Result: Down-regulated in Transcription
  misc_feature: MA Experiment 108461 PARAMETER Experiment Name: At_Germinating_Seeds_cDNA_P Parameter: Age (day) Value: 1 vs. 0
  misc_feature: MA Experiment 108461 PARAMETER Experiment Name: At_Germinating_Seeds_cDNA_P Parameter: Tissue Value: Germinating Seeds
  misc_feature: MA Experiment ID: 108462 Result: Down-regulated in Transcription
  misc_feature: MA Experiment 108462 PARAMETER Experiment Name: At_Germinating_Seeds_cDNA_P Parameter: Age (day) Value: 2 vs. 0
  misc_feature: MA Experiment 108462 PARAMETER Experiment Name: At_Germinating_Seeds_cDNA_P Parameter: Tissue Value: Germinating Seeds
  misc_feature: MA Experiment ID: 108463 Result: Down-regulated in Transcription
  misc_feature: MA Experiment 108463 PARAMETER Experiment Name: At_Germinating_Seeds_cDNA_P Parameter: Age (day) Value: 3 vs. 0
  misc_feature: MA Experiment 108463 PARAMETER Experiment Name: At_Germinating_Seeds_cDNA_P Parameter: Tissue Value: Germinating Seeds
  misc_feature: MA Experiment ID: 108464 Result: Down-regulated in Transcription
  misc_feature: MA Experiment 108464 PARAMETER Experiment Name: At_Germinating_Seeds_cDNA_P Parameter: Age (day) Value: 4 vs. 0
  misc_feature: MA Experiment 108464 PARAMETER Experiment Name: At_Germinating_Seeds_cDNA_P Parameter: Tissue Value: Germinating Seeds
  misc_feature: MA Experiment ID: 108572 Result: Down-regulated in Transcription
  misc_feature: MA Experiment 108572 PARAMETER Experiment Name: At_Drought_cDNA_P Parameter: Timepoint (hr) Value: 1
  misc_feature: MA Experiment 108572 PARAMETER Experiment Name: At_Drought_cDNA_P Parameter: Tissue Value: Aerial
  misc_feature: MA Experiment 108572 PARAMETER Experiment Name: At_Drought_cDNA_P Parameter: Treatment Value: Drought vs. No Drought
  misc_feature: MA Experiment ID: 20000180 Result: Down-regulated in Transcription
  misc_feature: MA Experiment 20000180 PARAMETER Experiment Name: At_Germinating_Seeds_P Parameter: Age (hr) Value: 24 vs. 0
  misc_feature: MA Experiment 20000180 PARAMETER Experiment Name: At_Germinating_Seeds_P Parameter: Tissue Value: Germinating Seeds
  misc_feature: MA Experiment ID: 20001557 Result: Up-regulated in Transcription
  misc_feature: MA Experiment 20001557 PARAMETER Experiment Name: At_Drought_Soil_Dry_P Parameter: Age (day) Value: 27
  misc_feature: MA Experiment 20001557 PARAMETER Experiment Name: At_Drought_Soil_Dry_P Parameter: Organism Value: A. thaliana
  misc_feature: MA Experiment 20001557 PARAMETER Experiment Name: At_Drought_Soil_Dry_P Parameter: Plant Line Value: WS
  misc_feature: MA Experiment 20001557 PARAMETER Experiment Name: At_Drought_Soil_Dry_P Parameter: Post Timepoint (hr) Value: 3
  misc_feature: MA Experiment 20001557 PARAMETER Experiment Name: At_Drought_Soil_Dry_P Parameter: Post-Treatment Value: Re-Water vs. No Drought
  misc_feature: MA Experiment 20001557 PARAMETER Experiment Name: At_Drought_Soil_Dry_P Parameter: Timepoint (day) Value: 13
  misc_feature: MA Experiment 20001557 PARAMETER Experiment Name: At_Drought_Soil_Dry_P Parameter: Treatment Value: Drought vs. No Drought
  misc_feature: MA Experiment ID: 20001558 Result: Up-regulated in Transcription
  misc_feature: MA Experiment 20001558 PARAMETER Experiment Name: At_Drought_Soil_Dry_P Parameter: Age (day) Value: 27
  misc_feature: MA Experiment 20001558 PARAMETER Experiment Name: At_Drought_Soil_Dry_P Parameter: Organism Value: A. thaliana
  misc_feature: MA Experiment 20001558 PARAMETER Experiment Name: At_Drought_Soil_Dry_P Parameter: Plant Line Value: WS
  misc_feature: MA Experiment 20001558 PARAMETER Experiment Name: At_Drought_Soil_Dry_P Parameter: Post Timepoint (hr) Value: 6
  misc_feature: MA Experiment 20001558 PARAMETER Experiment Name: At_Drought_Soil_Dry_P Parameter: Post-Treatment Value: Re-Water vs. No Drought
  misc_feature: MA Experiment 20001558 PARAMETER Experiment Name: At_Drought_Soil_Dry_P Parameter: Timepoint (day) Value: 13
  misc_feature: MA Experiment 20001558 PARAMETER Experiment Name: At_Drought_Soil_Dry_P Parameter: Treatment Value: Drought vs. No Drought
accgtttgttcttcatctcctcgccgccgcctcctactctctctttctctctaaattgctcaattctctcggccacagacctagacaaggatggtgactaaagcagaaaaacaattcgccaaaaatttcaacatagacgatctccctgacgtccctgccggacttcctccacatctcaaagcccagcaaactcgtgtcgtctctaaaaacaacgctcctgctcatactgcgagtgccatttactcgggtacctatgtttcttctacggaagaggacgacaatgtgaagctaggaaacttctatgataacttcaaagttgatgtggttagtctcacaaagacagatatggaatttgatatgattggtattgatgcagcgtttgccaatgcattccgaaggatccttatagctgaggttccttcaatggctattgaaaaagtgttgatagcgtacaacacatcggttattatagacgaagttcttgctcacaggatgggtcttattccaattgccgcagatccaagactttttgaatatttatccgaacatgatcaggcgaatgaaaagaacaccattgtattcaaactccatgtgaaatgtccgaaaaatagaccacgtcttaaagttttaacgagtgatttaaaatggttaccaaatggaagtgagcttctgagagaatcggaaaataaaacctcaaagccaaaaacttacacttcattcagttgcagccaagattcattacctgaatttgctaataatcctatcactccatgcgacctcgatatcttgatagcaaaactcgcccctggtcaggaaatcgagctcgaagctcatgcggttaagggcattggtaaaacacatgcaaagtggtctccagtagggactgcttggtatagaatgcatcctgaggtggttctacgtggggaagttgaggatgaacttgctgaacgacttgtaaacgtctgcccacagaatgttttcgacattgaagacatgggaaaaggtaagaaaagggcaacagtagcgcagccacgtaagtgcacattgtgtaaggaatgcgtaagagacgatgatttggtagaccatgtggatcttggcagtgttaagaaccattttatatttaacattgagtccaccggatcactgcctccagaggttctcttcactgaagctgtgaagatattggaagctaaatgtgaagctataaccgacttttgagttctggtttagttcaattttgaattgtctgtctatcaatgtttctcctcctattgataaattaccaacaaacaacattgacatatttatttatacggttgttgttc

SEQ ID NO: 97824 - protein, 375 aa, Arabidopsis thaliana; identical to SEQ ID NO: 40103
  peptide (1)..(375): Ceres Seq. ID no. 13576364
  misc_feature (117)..(261): Pfam Name: RNA polymerase Rpb3/RpoA insert domain Pfam Description: RNA polymerase Rpb3/RpoA insert domain
  misc_feature (1)..(375): Homolog of NCBI NO: 15219820 NR Description: RNA polymerase subunit [Arabidopsis thaliana]
  misc_feature (1)..(375): Homolog of NCBI NO: 514322 NR Description: RNA polymerase subunit >gi|1586549|prf||2204246A
  misc_feature (1)..(375): Homolog of NCBI NO: 21592304 NR Description: RNA polymerase subunit [Arabidopsis thaliana]
  misc_feature (1)..(372): Homolog of NCBI NO: 15219773 NR Description: RNA polymerase subunit [Arabidopsis thaliana]
  misc_feature (29)..(374): Homolog of NCBI NO: 3914807 NR Description: DNA-directed RNA polymerase I 40 kDa polypeptide (RPA39) >gi|2266929|gb|AAC14354.1| RNA polymerase I subunit [Homo sapiens] >gi|14250788|gb|AAH08863.1| POLR1C protein [Homo
  misc_feature (45)..(374): Homolog of NCBI NO: 14198113 NR Description: Unknown (protein for IMAGE:3448039) [Homo sapiens]
  misc_feature (45)..(370): Homolog of NCBI NO: 34193909 NR Description: RNA polymerase 1-1 [Danio rerio]
  misc_feature (29)..(374): Homolog of NCBI NO: 34874462 NR Description: similar to DNA-directed RNA polymerase I 40 kDa
  misc_feature (29)..(374): Homolog of NCBI NO: 6677787 NR Description: RNA polymerase 1-1; RNA polymerase 1-1 (40 kDa
  misc_feature (29)..(374): Homolog of NCBI NO: 18266895 NR Description: DNA-directed RNA polymerase I 40 kDa polypeptide

SEQ ID NO: 97825 - protein, 290 aa, Arabidopsis thaliana; identical to SEQ ID NO: 40104
  peptide (1)..(290): Ceres Seq. ID no. 13576365
  misc_feature (32)..(176): Pfam Name: RNA polymerase Rpb3/RpoA insert domain Pfam Description: RNA polymerase Rpb3/RpoA insert domain
  misc_feature (1)..(290): Homolog of NCBI NO: 15219820 NR Description: RNA polymerase subunit [Arabidopsis thaliana]
  misc_feature (1)..(290): Homolog of NCBI NO: 514322 NR Description: RNA polymerase subunit >gi|1586549|prf||2204246A
  misc_feature (1)..(290): Homolog of NCBI NO: 21592304 NR Description: RNA polymerase subunit [Arabidopsis thaliana]
  misc_feature (1)..(287): Homolog of NCBI NO: 15219773 NR Description: RNA polymerase subunit [Arabidopsis thaliana]
  misc_feature (1)..(289): Homolog of NCBI NO: 3914807 NR Description: DNA-directed RNA polymerase I 40 kDa polypeptide (RPA39) >gi|2266929|gb|AAC14354.1| RNA polymerase I subunit [Homo sapiens] >gi|14250788|gb|AAH08863.1| POLR1C protein [Homo
  misc_feature (1)..(289): Homolog of NCBI NO: 14198113 NR Description: Unknown (protein for IMAGE:3448039) [Homo sapiens]
  misc_feature (1)..(285): Homolog of NCBI NO: 34193909 NR Description: RNA polymerase 1-1 [Danio rerio]
  misc_feature (1)..(289): Homolog of NCBI NO: 34874462 NR Description: similar to DNA-directed RNA polymerase I 40 kDa
  misc_feature (1)..(289): Homolog of NCBI NO: 6677787 NR Description: RNA polymerase 1-1; RNA polymerase 1-1 (40 kDa
  misc_feature (1)..(289): Homolog of NCBI NO: 18266895 NR Description: DNA-directed RNA polymerase I 40 kDa polypeptide

SEQ ID NO: 97826 - protein, 286 aa, Arabidopsis thaliana; identical to SEQ ID NO: 40105
  peptide (1)..(286): Ceres Seq. ID no. 13576366
  misc_feature (28)..(172): Pfam Name: RNA polymerase Rpb3/RpoA insert domain Pfam Description: RNA polymerase Rpb3/RpoA insert domain
  misc_feature (1)..(286): Homolog of NCBI NO: 15219820 NR Description: RNA polymerase subunit [Arabidopsis thaliana]
  misc_feature (1)..(286): Homolog of NCBI NO: 514322 NR Description: RNA polymerase subunit >gi|1586549|prf||2204246A
  misc_feature (1)..(286): Homolog of NCBI NO: 21592304 NR Description: RNA polymerase subunit [Arabidopsis thaliana]
  misc_feature (1)..(283): Homolog of NCBI NO: 15219773 NR Description: RNA polymerase subunit [Arabidopsis thaliana]
  misc_feature (1)..(285): Homolog of NCBI NO: 3914807 NR Description: DNA-directed RNA polymerase I 40 kDa polypeptide (RPA39) >gi|2266929|gb|AAC14354.1| RNA polymerase I subunit [Homo sapiens] >gi|14250788|gb|AAH08863.1| POLR1C protein [Homo
  misc_feature (1)..(285): Homolog of NCBI NO: 14198113 NR Description: Unknown (protein for IMAGE:3448039) [Homo sapiens]
  misc_feature (1)..(281): Homolog of NCBI NO: 34193909 NR Description: RNA polymerase 1-1 [Danio rerio]
  misc_feature (1)..(285): Homolog of NCBI NO: 34874462 NR Description: similar to DNA-directed RNA polymerase I 40 kDa
  misc_feature (1)..(285): Homolog of NCBI NO: 6677787 NR Description: RNA polymerase 1-1; RNA polymerase 1-1 (40 kDa
  misc_feature (1)..(285): Homolog of NCBI NO: 18266895 NR Description: DNA-directed RNA polymerase I 40 kDa polypeptide

SEQ ID NO: 97827 - DNA, 1395 bp, Arabidopsis thaliana
  misc_feature (1)..(1395): Ceres Seq. ID no. 13576371
  misc_feature: MA Experiment ID: 108461 Result: Up-regulated in Transcription
  misc_feature: MA Experiment 108461 PARAMETER Experiment Name: At_Germinating_Seeds_cDNA_P Parameter: Age (day) Value: 1 vs. 0
  misc_feature: MA Experiment 108461 PARAMETER Experiment Name: At_Germinating_Seeds_cDNA_P Parameter: Tissue Value: Germinating Seeds
  misc_feature: MA Experiment ID: 108462 Result: Up-regulated in Transcription
  misc_feature: MA Experiment 108462 PARAMETER Experiment Name: At_Germinating_Seeds_cDNA_P Parameter: Age (day) Value: 2 vs. 0
  misc_feature: MA Experiment 108462 PARAMETER Experiment Name: At_Germinating_Seeds_cDNA_P Parameter: Tissue Value: Germinating Seeds
  misc_feature: MA Experiment ID: 108463 Result: Up-regulated in Transcription
  misc_feature: MA Experiment 108463 PARAMETER Experiment Name: At_Germinating_Seeds_cDNA_P Parameter: Age (day) Value: 3 vs. 0
  misc_feature: MA Experiment 108463 PARAMETER Experiment Name: At_Germinating_Seeds_cDNA_P Parameter: Tissue Value: Germinating Seeds
  misc_feature: MA Experiment ID: 108464 Result: Up-regulated in Transcription
  misc_feature: MA Experiment 108464 PARAMETER Experiment Name: At_Germinating_Seeds_cDNA_P Parameter: Age (day) Value: 4 vs. 0
  misc_feature: MA Experiment 108464 PARAMETER Experiment Name: At_Germinating_Seeds_cDNA_P Parameter: Tissue Value: Germinating Seeds
  misc_feature: MA Experiment ID: 108595 Result: Down-regulated in Transcription
  misc_feature: MA Experiment 108595 PARAMETER Experiment Name: At_Ler-pi_Ovule_cDNA_P Parameter: Plant Line Value: null
  misc_feature: MA Experiment ID: 20000173 Result: Down-regulated in Transcription
  misc_feature: MA Experiment 20000173 PARAMETER Experiment Name: At_42deg_Heat_P Parameter: Age (day) Value: 14
  misc_feature: MA Experiment 20000173 PARAMETER Experiment Name: At_42deg_Heat_P Parameter: Organism Value: A. thaliana
  misc_feature: MA Experiment 20000173 PARAMETER Experiment Name: At_42deg_Heat_P Parameter: Plant Line Value: WS
  misc_feature: MA Experiment 20000173 PARAMETER Experiment Name: At_42deg_Heat_P Parameter: Temperature (deg C) Value: 42 vs. 22
  misc_feature: MA Experiment 20000173 PARAMETER Experiment Name: At_42deg_Heat_P Parameter: Timepoint (hr) Value: 6
  misc_feature: MA Experiment 20000173 PARAMETER Experiment Name: At_42deg_Heat_P Parameter: Tissue Value: Aerial
  misc_feature: MA Experiment ID: 20000180 Result: Up-regulated in Transcription
  misc_feature: MA Experiment 20000180 PARAMETER Experiment Name: At_Germinating_Seeds_P Parameter: Age (hr) Value: 24 vs. 0
  misc_feature: MA Experiment 20000180 PARAMETER Experiment Name: At_Germinating_Seeds_P Parameter: Tissue Value: Germinating Seeds
  misc_feature: MA Experiment ID: 20001558 Result: Down-regulated in Transcription
  misc_feature: MA Experiment 20001558 PARAMETER Experiment Name: At_Drought_Soil_Dry_P Parameter: Age (day) Value: 27
  misc_feature: MA Experiment 20001558 PARAMETER Experiment Name: At_Drought_Soil_Dry_P Parameter: Organism Value: A. thaliana
  misc_feature: MA Experiment 20001558 PARAMETER Experiment Name: At_Drought_Soil_Dry_P Parameter: Plant Line Value: WS
  misc_feature: MA Experiment 20001558 PARAMETER Experiment Name: At_Drought_Soil_Dry_P Parameter: Post Timepoint (hr) Value: 6
  misc_feature: MA Experiment 20001558 PARAMETER Experiment Name: At_Drought_Soil_Dry_P Parameter: Post-Treatment Value: Re-Water vs. No Drought
  misc_feature: MA Experiment 20001558 PARAMETER Experiment Name: At_Drought_Soil_Dry_P Parameter: Timepoint (day) Value: 13
  misc_feature: MA Experiment 20001558 PARAMETER Experiment Name: At_Drought_Soil_Dry_P Parameter: Treatment Value: Drought vs. No Drought
aaaaccttttgacaaaaaccagatattctctcccatttccctcaatcatccaaaccacgcgccgcctctaatctctcacgcgccgcggtccgatttcaaatcctccatcaatttctccatcccctcttctcgtttattcatcaagatctcacaaaatccaaatttaactatagggtttcaattacttcgatcaaaaggtatctaatttatgaattagaattcatcatcatgggaggtgttacatcatcgatcgctgctaaatttgctttctttccaccaacgccaccgtcgtatgaggttatagccgacgatagctgcggtggacgtttatacataccggagattcctcgccgtgatgatgttgatatattgaagcttcgtactcgttgtggtaatgagatcgttgctgtttatgtgaaacattcaaaagctaatggcacgcttttgtattctcatggtaacgctgctgatttgggtcaaatgtttgagcttttcgttgagcttagcaatcgccttcgcgtcaatcttatggggtatgattactctggttatggtcagtctactggacaggctagcgagtgtaatacatatgctgatatagaggcatcatataaatgcctcaaggaaaagtacggtgtaaaagacgatcaactgatagtatatggtcaatctgttggtagtggacctacggttgatctagcttcacgcacacctaacttaagaggcgtggttttacagtgtcctatcctgtctgggatgagggttttgtatcctgtgaaatgtacatattggtttgacatttacaagaatattgacaagatcggctcagttacctgtcctgtattagtaatccatggtactgcggatgaagtagttgattggtctcacggaaaacggctctgggaactcagcaaagagaagtatgaacctttgtggataagtggaggtggacactgtgaccttgaactctatccagatttcatcagacatctgaagaaatttgttgtatcacttggcaacaaacaagcagagcaagctcccacatagcgagatagctgatatgtttgaaatgggttattttcagagaaggctagacagttggctacagaaagttcaaaagaaagtaataagcctgagagattcaagatgagagtggtaataggtttagtcattaaaagataaaaaaaggtctagtctggtgacacaatgggtcaatctggaatgtaaacagtatagtacatttcgtgaataaatgtattttctgctttcatgctttagtaggttccaaagaggttactttgtttatttcacattcatggatcatacttttatgattctataacatgccagagaaagctgtaaaaataaataaatgtattggctactttttttggc

SEQ ID NO: 97828 - protein, 272 aa, Arabidopsis thaliana; identical to SEQ ID NO: 43120
  peptide (1)..(272): Ceres Seq. ID no. 13576372
  misc_feature (1)..(272): Homolog of NCBI NO: 22330474 NR Description: expressed protein [Arabidopsis thaliana] unknown protein [Arabidopsis thaliana]
  misc_feature (1)..(272): Homolog of NCBI NO: 25404647 NR Description: hypothetical protein T4O24.3 [imported] - thaliana >gi|12320929|gb|AAG50594.1|AC083891_8 hypothetical
  misc_feature (1)..(262): Homolog of NCBI NO: 10177798 NR Description: emb|CAB87778.1~gene_id:MXA21.9~strong similarity unknown protein [Arabidopsis thaliana] unknown protein [Arabidopsis thaliana]
  misc_feature (1)..(262): Homolog of NCBI NO: 15240861 NR Description: expressed protein [Arabidopsis thaliana]
  misc_feature (43)..(272): Homolog of NCBI NO: 34911338 NR Description: P0519D04.38 [Oryza sativa (japonica
  misc_feature (1)..(41): Homolog of NCBI NO: 34911338 NR Description: P0519D04.38 [Oryza sativa (japonica
  misc_feature (1)..(272): Homolog of NCBI NO: 15241394 NR Description: expressed protein [Arabidopsis thaliana]
  misc_feature (1)..(262): Homolog of NCBI NO: 15232168 NR Description: expressed protein [Arabidopsis thaliana] unknown protein [Arabidopsis thaliana] unknown protein [Arabidopsis thaliana]
  misc_feature (1)..(269): Homolog of NCBI NO: 15233975 NR Description: expressed protein [Arabidopsis thaliana]
  misc_feature (1)..(262): Homolog of NCBI NO: 15230760 NR Description: hypothetical protein [Arabidopsis thaliana] contains similarity to unknown

SEQ ID NO: 97829 - protein, 188 aa, Arabidopsis thaliana; identical to SEQ ID NO: 43121
  peptide (1)..(188): Ceres Seq. ID no. 13576373
  misc_feature (1)..(188): Homolog of NCBI NO: 22330474 NR Description: expressed protein [Arabidopsis thaliana] unknown protein [Arabidopsis thaliana]
  misc_feature (1)..(188): Homolog of NCBI NO: 25404647 NR Description: hypothetical protein T4O24.3 [imported] - thaliana >gi|12320929|gb|AAG50594.1|AC083891_8 hypothetical
  misc_feature (1)..(178): Homolog of NCBI NO: 10177798 NR Description: emb|CAB87778.1~gene_id:MXA21.9~strong similarity unknown protein [Arabidopsis thaliana] unknown protein [Arabidopsis thaliana]
  misc_feature (1)..(178): Homolog of NCBI NO: 15240861 NR Description: expressed protein [Arabidopsis thaliana]
  misc_feature (1)..(188): Homolog of NCBI NO: 34911338 NR Description: P0519D04.38 [Oryza sativa (japonica
  misc_feature (1)..(188): Homolog of NCBI NO: 15241394 NR Description: expressed protein [Arabidopsis thaliana]
  misc_feature (1)..(178): Homolog of NCBI NO: 15232168 NR Description: expressed protein [Arabidopsis thaliana] unknown protein [Arabidopsis thaliana] unknown protein [Arabidopsis thaliana]
  misc_feature (1)..(185): Homolog of NCBI NO: 15233975 NR Description: expressed protein [Arabidopsis thaliana]
  misc_feature (1)..(178): Homolog of NCBI NO: 15230760 NR Description: hypothetical protein [Arabidopsis thaliana] contains similarity to unknown
  misc_feature (1)..(175): Homolog of NCBI NO: 28393521 NR Description: unknown protein [Arabidopsis thaliana]

SEQ ID NO: 97830 - protein, 172 aa, Arabidopsis thaliana; identical to SEQ ID NO: 43122
  peptide (1)..(172): Ceres Seq. ID no. 13576374
  misc_feature (1)..(172): Homolog of NCBI NO: 22330474 NR Description: expressed protein [Arabidopsis thaliana] unknown protein [Arabidopsis thaliana]
  misc_feature (1)..(172): Homolog of NCBI NO: 25404647 NR Description: hypothetical protein T4O24.3 [imported] - thaliana >gi|12320929|gb|AAG50594.1|AC083891_8 hypothetical
  misc_feature (1)..(162): Homolog of NCBI NO: 10177798 NR Description: emb|CAB87778.1~gene_id:MXA21.9~strong similarity unknown protein [Arabidopsis thaliana] unknown protein [Arabidopsis thaliana]
  misc_feature (1)..(162): Homolog of NCBI NO: 15240861 NR Description: expressed protein [Arabidopsis thaliana]
  misc_feature (1)..(172): Homolog of NCBI NO: 34911338 NR Description: P0519D04.38 [Oryza sativa (japonica
  misc_feature (1)..(172): Homolog of NCBI NO: 15241394 NR Description: expressed protein [Arabidopsis thaliana]
  misc_feature (1)..(162): Homolog of NCBI NO: 15232168 NR Description: expressed protein [Arabidopsis thaliana] unknown protein [Arabidopsis thaliana] unknown protein [Arabidopsis thaliana]
  misc_feature (1)..(169): Homolog of NCBI NO: 15233975 NR Description: expressed protein [Arabidopsis thaliana]
  misc_feature (1)..(162): Homolog of NCBI NO: 15230760 NR Description: hypothetical protein [Arabidopsis thaliana] contains similarity to unknown
  misc_feature (1)..(159): Homolog of NCBI NO: 28393521 NR Description: unknown protein [Arabidopsis thaliana]

SEQ ID NO: 97831 - DNA, 1364 bp, Arabidopsis thaliana
  misc_feature (1)..(1364): Ceres Seq. ID no. 13576379
  misc_feature: MA Experiment ID: 20000185 Result: Up-regulated in Transcription
  misc_feature: MA Experiment 20000185 PARAMETER Experiment Name: At_Roots__P Parameter: Age (day) Value: 7 vs. 21
  misc_feature: MA Experiment 20000185 PARAMETER Experiment Name: At_Roots__P Parameter: Organism Value: A. thaliana
  misc_feature: MA Experiment 20000185 PARAMETER Experiment Name: At_Roots__P Parameter: Tissue Value: Roots vs. Whole Plant
  misc_feature: MA Experiment ID: 20000496 Result: Up-regulated in Transcription
  misc_feature: MA Experiment 20000496 PARAMETER Experiment Name: At_Guard_Cells_P Parameter: Harvest Date Value: 7/19/2002
  misc_feature: MA Experiment 20000496 PARAMETER Experiment Name: At_Guard_Cells_P Parameter: Organism Value: Canola
  misc_feature: MA Experiment 20000496 PARAMETER Experiment Name: At_Guard_Cells_P Parameter: Tissue Value: Guard Cells vs. Leaves
  misc_feature: MA Experiment ID: 20000794 Result: Up-regulated in Transcription
  misc_feature: MA Experiment 20000794 PARAMETER Experiment Name: At_Petals_P Parameter: Age (day) Value: 23-25 days
  misc_feature: MA Experiment 20000794 PARAMETER Experiment Name: At_Petals_P Parameter: Plant Line Value: WS
  misc_feature: MA Experiment 20000794 PARAMETER Experiment Name: At_Petals_P Parameter: Tissue Value: Petals vs. Whole plant
  misc_feature (1164)..(1164): n is a, c, t, g, unknown, or other
  misc_feature (1191)..(1191): n is a, c, t, g, unknown, or other
  misc_feature (1303)..(1303): n is a, c, t, g, unknown, or other
  misc_feature (1322)..(1322): n is a, c, t, g, unknown, or other
atggtgaaggaaacagtgtattatgatgttcttggtgtcactccctctgcttctgaggaagagattcgcaaggcttattacatcaaggcaagacaagttcatcctgacaagaatcaaggtgatcctctagctgctgaaaaacaggttcttggtgaagcttaccaggttctaagtgatcctgttcatcgtgaagcgtatgatcggactggaaaattctcagctcccaaagaaacaatggttgatccaacggctgttttcgctcttcttttcggaagtgaactattcgaggattatatcggtcacttggctgttgcatcaatggcttccactcaaatggcttctgaaatcgaaaactctgatcagtttcaagacaaactaaaggcaaatcaaaaaccatatgctgttcagaaagaaagagaagaaaacctttcaaggtttctcaaagattttctgagtcaatatgtccacggagacaaagaaggattcataagccgcgcagaatctgaagccaagagactttcagatgcagcttttggagcggatatgttgcatacaattggatatgtatacacaagacaagcagctcaagaacttgggaagagagctctttacttaggagttccatttgtagctgaatgggttaggaacaaaggtcattcttggaaatcacagattagtgcagctaaaggagctttacagttacttcagctgcaagaagagagtaaccggagattaaagaaagatgggactagtccagcaaatgagttagagtctcatattcagaccaacaaagaaacattgatgggatctttgtggaaacttaatgttgtcgacattgaagtgactctgttacatgtgtgtcagatggtctttcgcgaaaacaatttgagaaaggaggagctcaagtctagagcaatggctctcaagattcttgggaagatttttcagcaagaaaagcaatcgaagaacggtacaacatcaagaaaagaagatgaagacagcgacgatgatgacagtagcagcgatgacgattcttcacaaccactttcatacagaactcctctgcttactcaggggattggtagacttttcagatgtctctgcaatccagcattcgatgtagacgatgatgaaattgtatacaaaggcaaatgatcaataccncactcaaatatttcaatttgatgggtntcacatgtgaaatgtgatgcagcttcttaagttattaattctttataaatatatgtaatgatgataattgatgggatcaaacttaacaaattgttaaaataagtttattttntaaaagaagaaaaactccnctactttgtaatcattacaagattgctatactgttttgttgt

SEQ ID NO: 97832 - protein, 384 aa, Arabidopsis thaliana
  peptide (1)..(384): Ceres Seq. ID no. 13576380
  misc_feature (6)..(70): Pfam Name: DnaJ domain Pfam Description: DnaJ domain
  misc_feature (1)..(384): Homolog of NCBI NO: 30699227 NR Description: DnaJ protein family [Arabidopsis thaliana]
  misc_feature (1)..(289): Homolog of NCBI NO: 25406486 NR Description: hypothetical protein F22K20.12 [imported] -
  misc_feature (317)..(384): Homolog of NCBI NO: 25406486 NR Description: hypothetical protein F22K20.12 [imported] -
  misc_feature (1)..(359): Homolog of NCBI NO: 15223142 NR Description: DnaJ protein family [Arabidopsis thaliana]
  misc_feature (129)..(345): Homolog of NCBI NO: 27817868 NR Description: OJ1081_B12.17 [Oryza sativa (japonica
  misc_feature (1)..(128): Homolog of NCBI NO: 27817868 NR Description: OJ1081_B12.17 [Oryza sativa (japonica
  misc_feature (1)..(359): Homolog of NCBI NO: 26449747 NR Description: putative DnaJ protein [Arabidopsis thaliana]
  misc_feature (1)..(359): Homolog of NCBI NO: 18394951 NR Description: DnaJ protein family [Arabidopsis thaliana]
  misc_feature (1)..(359): Homolog of NCBI NO: 2230757 NR Description: dnaJ-like protein [Arabidopsis thaliana]
  misc_feature (1)..(346): Homolog of NCBI NO: 15226572 NR Description: DnaJ protein family [Arabidopsis thaliana]
MVKETVYYDVLGVTPSASEEEIRKAYYIKARQVHPDKNQGDPLAAEKQVLGEAYQVLSDPVHREAYDRTGKFSAPKETMVDPTAVFALLFGSELFEDYIGHLAVASMASTQMASEIENSDQFQDKLKANQKPYAVQKEREENLSRFLKDFLSQYVHGDKEGFISRAESEAKRLSDAAFGADMLHTIGYVYTRQAAQELGKRALYLGVPFVAEWVRNKGHSWKSQISAAKGALQLLQLQEESNRRLKKDGTSPANELESHIQTNKETLMGSLWKLNVVDIEVTLLHVCQMVFRENNLRKEELKSRAMALKILGKIFQQEKQSKNGTTSRKEDEDSDDDDSSSDDDSSQPLSYRTPLLTQGIGRLFRCLCNPAFDVDDDEIVYKGK

SEQ ID NO: 97833 - protein, 306 aa, Arabidopsis thaliana
  peptide (1)..(306): Ceres Seq. ID no. 13576381
  misc_feature (1)..(306): Homolog of NCBI NO: 30699227 NR Description: DnaJ protein family [Arabidopsis thaliana]
  misc_feature (1)..(211): Homolog of NCBI NO: 25406486 NR Description: hypothetical protein F22K20.12 [imported] -
  misc_feature (239)..(306): Homolog of NCBI NO: 25406486 NR Description: hypothetical protein F22K20.12 [imported] -
  misc_feature (1)..(281): Homolog of NCBI NO: 15223142 NR Description: DnaJ protein family [Arabidopsis thaliana]
  misc_feature (51)..(267): Homolog of NCBI NO: 27817868 NR Description: OJ1081_B12.17 [Oryza sativa (japonica
  misc_feature (1)..(50): Homolog of NCBI NO: 27817868 NR Description: OJ1081_B12.17 [Oryza sativa (japonica
  misc_feature (1)..(281): Homolog of NCBI NO: 26449747 NR Description: putative DnaJ protein [Arabidopsis thaliana]
  misc_feature (1)..(281): Homolog of NCBI NO: 18394951 NR Description: DnaJ protein family [Arabidopsis thaliana]
  misc_feature (1)..(281): Homolog of NCBI NO: 2230757 NR Description: dnaJ-like protein [Arabidopsis thaliana]
  misc_feature (1)..(268): Homolog of NCBI NO: 15226572 NR Description: DnaJ protein family [Arabidopsis thaliana]
MVDPTAVFALLFGSELFEDYIGHLAVASMASTQMASEIENSDQFQDKLKANQKPYAVQKEREENLSRFLKDFLSQYVHGDKEGFISRAESEAKRLSDAAFGADMLHTIGYVYTRQAAQELGKRALYLGVPFVAEWVRNKGHSWKSQISAAKGALQLLQLQEESNRRLKKDGTSPANELESHIQTNKETLMGSLWKLNVVDIEVTLLHVCQMVFRENNLRKEELKSRAMALKILGKIFQQEKQSKNGTTSRKEDEDSDDDDSSSDDDSSQPLSYRTPLLTQGIGRLFRCLCNPAFDVDDDEIVYKGK

SEQ ID NO: 97834 - protein, 278 aa, Arabidopsis thaliana
  peptide (1)..(278): Ceres Seq. ID no. 13576382
  misc_feature (1)..(278): Homolog of NCBI NO: 30699227 NR Description: DnaJ protein family [Arabidopsis thaliana]
  misc_feature (1)..(183): Homolog of NCBI NO: 25406486 NR Description: hypothetical protein F22K20.12 [imported] -
  misc_feature (211)..(278): Homolog of NCBI NO: 25406486 NR Description: hypothetical protein F22K20.12 [imported] -
  misc_feature (1)..(253): Homolog of NCBI NO: 15223142 NR Description: DnaJ protein family [Arabidopsis thaliana]
  misc_feature (23)..(239): Homolog of NCBI NO: 27817868 NR Description: OJ1081_B12.17 [Oryza sativa (japonica
  misc_feature (1)..(22): Homolog of NCBI NO: 27817868 NR Description: OJ1081_B12.17 [Oryza sativa (japonica
  misc_feature (1)..(253): Homolog of NCBI NO: 26449747 NR Description: putative DnaJ protein [Arabidopsis thaliana]
  misc_feature (1)..(253): Homolog of NCBI NO: 18394951 NR Description: DnaJ protein family [Arabidopsis thaliana]
  misc_feature (1)..(253): Homolog of NCBI NO: 2230757 NR Description: dnaJ-like protein [Arabidopsis thaliana]
  misc_feature (1)..(240): Homolog of NCBI NO: 15226572 NR Description: DnaJ protein family [Arabidopsis thaliana]
MASTQMASEIENSDQFQDKLKANQKPYAVQKEREENLSRFLKDFLSQYVHGDKEGFISRAESEAKRLSDAAFGADMLHTIGYVYTRQAAQELGKRALYLGVPFVAEWVRNKGHSWKSQISAAKGALQLLQLQEESNRRLKKDGTSPANELESHIQTNKETLMGSLWKLNVVDIEVTLLHVCQMVFRENNLRKEELKSRAMALKILGKIFQQEKQSKNGTTSRKEDEDSDDDDSSSDDDSSQPLSYRTPLLTQGIGRLFRCLCNPAFDVDDDEIVYKGK

SEQ ID NO: 97835 - DNA, 1366 bp, Arabidopsis thaliana
  misc_feature (1)..(1366): Ceres Seq. ID no. 13576383
  misc_feature: MA Experiment ID: 108433 Result: Up-regulated in Transcription
  misc_feature: MA Experiment 108433 PARAMETER Experiment Name: At_rhl_Mutant2_cDNA_P Parameter: Age (day) Value: 7
  misc_feature: MA Experiment 108433 PARAMETER Experiment Name: At_rhl_Mutant2_cDNA_P Parameter: Organism Value: A. thaliana
  misc_feature: MA Experiment 108433 PARAMETER Experiment Name: At_rhl_Mutant2_cDNA_P Parameter: Plant Line Value: rhl Mutant vs. wt landsburg
  misc_feature: MA Experiment 108433 PARAMETER Experiment Name: At_rhl_Mutant2_cDNA_P Parameter: Tissue Value: Roots
  misc_feature: MA Experiment ID: 108434 Result: Down-regulated in Transcription
  misc_feature: MA Experiment 108434 PARAMETER Experiment Name: At_Root_Tips_cDNA_P Parameter: Tissue Value: Root Tips
  misc_feature: MA Experiment ID: 108435 Result: Up-regulated in Transcription
  misc_feature: MA Experiment 108435 PARAMETER Experiment Name: At_stm_Mutants_cDNA_P Parameter: Plant Line Value: wt Landsburg vs stm
  misc_feature: MA Experiment 108435 PARAMETER Experiment Name: At_stm_Mutants_cDNA_P Parameter: Tissue Value: Shoot Apical Meristem Region
  misc_feature: MA Experiment ID: 108461 Result: Up-regulated in Transcription
  misc_feature: MA Experiment 108461 PARAMETER Experiment Name: At_Germinating_Seeds_cDNA_P Parameter: Age (day) Value: 1 vs. 0
  misc_feature: MA Experiment 108461 PARAMETER Experiment Name: At_Germinating_Seeds_cDNA_P Parameter: Tissue Value: Germinating Seeds
  misc_feature: MA Experiment ID: 108463 Result: Up-regulated in Transcription
  misc_feature: MA Experiment 108463 PARAMETER Experiment Name: At_Germinating_Seeds_cDNA_P Parameter: Age (day) Value: 3 vs. 0
  misc_feature: MA Experiment 108463 PARAMETER Experiment Name: At_Germinating_Seeds_cDNA_P Parameter: Tissue Value: Germinating Seeds
  misc_feature: MA Experiment ID: 108464 Result: Up-regulated in Transcription
  misc_feature: MA Experiment 108464 PARAMETER Experiment Name: At_Germinating_Seeds_cDNA_P Parameter: Age (day) Value: 4 vs. 0
  misc_feature: MA Experiment 108464 PARAMETER Experiment Name: At_Germinating_Seeds_cDNA_P Parameter: Tissue Value: Germinating Seeds
  misc_feature: MA Experiment ID: 108488 Result: Down-regulated in Transcription
  misc_feature: MA Experiment ID: 108574 Result: Up-regulated in Transcription
  misc_feature: MA Experiment 108574 PARAMETER Experiment Name: At_Wounding__cDNA_P Parameter: Timepoint (hr) Value: 1
  misc_feature: MA Experiment 108574 PARAMETER Experiment Name: At_Wounding__cDNA_P Parameter: Tissue Value: Aerial
  misc_feature: MA Experiment 108574 PARAMETER Experiment Name: At_Wounding__cDNA_P Parameter: Treatment Value: Wounding vs. No Wounding
  misc_feature: MA Experiment ID: 108577 Result: Down-regulated in Transcription
  misc_feature: MA Experiment 108577 PARAMETER Experiment Name: At_42deg_Heat_cDNA_P Parameter: Temperature (deg C) Value: 42 vs. 22
  misc_feature: MA Experiment 108577 PARAMETER Experiment Name: At_42deg_Heat_cDNA_P Parameter: Timepoint (hr) Value: 6
  misc_feature: MA Experiment 108577 PARAMETER Experiment Name: At_42deg_Heat_cDNA_P Parameter: Tissue Value: Aerial
  misc_feature: MA Experiment ID: 108585 Result: Up-regulated in Transcription
  misc_feature: MA Experiment 108585 PARAMETER Experiment Name: At_5mM_NaNP_cDNA_P Parameter: Timepoint (hr) Value: 6
  misc_feature: MA Experiment 108585 PARAMETER Experiment Name: At_5mM_NaNP_cDNA_P Parameter: Tissue Value: Aerial
  misc_feature: MA Experiment 108585 PARAMETER Experiment Name: At_5mM_NaNP_cDNA_P Parameter: Treatment Value: null
  misc_feature: MA Experiment ID: 108595 Result: Up-regulated in Transcription
  misc_feature: MA Experiment 108595 PARAMETER Experiment Name: At_Ler-pi_Ovule_cDNA_P Parameter: Plant Line Value: null
  misc_feature: MA Experiment ID: 108667 Result: Up-regulated in Transcription
  misc_feature: MA Experiment 108667 PARAMETER Experiment Name: At_2mM_SA_cDNA_P Parameter: Plant Line Value: WS
  misc_feature: MA Experiment 108667 PARAMETER Experiment Name: At_2mM_SA_cDNA_P Parameter: Timepoint (hr) Value: 1
  misc_feature: MA Experiment 108667 PARAMETER Experiment Name: At_2mM_SA_cDNA_P Parameter: Treatment Value: 2mM SA vs. No Treatment
  misc_feature: MA Experiment ID: 108668 Result: Up-regulated in Transcription
  misc_feature: MA Experiment 108668 PARAMETER Experiment Name: At_2mM_SA_cDNA_P Parameter: Plant Line Value: WS
  misc_feature: MA Experiment 108668 PARAMETER Experiment Name: At_2mM_SA_cDNA_P Parameter: Timepoint (hr) Value: 6
  misc_feature: MA Experiment 108668 PARAMETER Experiment Name: At_2mM_SA_cDNA_P Parameter: Treatment Value: 2mM SA vs. No Treatment
  misc_feature: MA Experiment ID: 20000069 Result: Up-regulated in Transcription
  misc_feature: MA Experiment 20000069 PARAMETER Experiment Name: At_100uM_ABA_Mutants_cDNA_P Parameter: Plant Line Value: CS23
  misc_feature: MA Experiment 20000069 PARAMETER Experiment Name: At_100uM_ABA_Mutants_cDNA_P Parameter: Timepoint (hr) Value: 6
  misc_feature: MA Experiment 20000069 PARAMETER Experiment Name: At_100uM_ABA_Mutants_cDNA_P Parameter: Tissue Value: Aerial
  misc_feature: MA Experiment 20000069 PARAMETER Experiment Name: At_100uM_ABA_Mutants_cDNA_P Parameter: Treatment Value: 100uM ABA vs. No Treatment
  misc_feature: MA Experiment ID: 20000072 Result: Up-regulated in Transcription
  misc_feature: MA Experiment 20000072 PARAMETER Experiment Name: At_100uM_ABA_Mutants_cDNA_P Parameter: Plant Line Value: CS8105
  misc_feature: MA Experiment 20000072 PARAMETER Experiment Name: At_100uM_ABA_Mutants_cDNA_P Parameter: Timepoint (hr) Value: 6
  misc_feature: MA Experiment 20000072 PARAMETER Experiment Name: At_100uM_ABA_Mutants_cDNA_P Parameter: Tissue Value: Aerial
  misc_feature: MA Experiment 20000072 PARAMETER Experiment Name: At_100uM_ABA_Mutants_cDNA_P Parameter: Treatment Value: 100uM ABA vs. No Treatment
  misc_feature: MA Experiment ID: 20000086 Result: Up-regulated in Transcription
  misc_feature: MA Experiment 20000086 PARAMETER Experiment Name: At_100uM_ABA_Mutants_cDNA_P Parameter: Plant Line Value: CS22
  misc_feature: MA Experiment 20000086 PARAMETER Experiment Name: At_100uM_ABA_Mutants_cDNA_P Parameter: Timepoint (hr) Value: 6
  misc_feature: MA Experiment 20000086 PARAMETER Experiment Name: At_100uM_ABA_Mutants_cDNA_P Parameter: Tissue Value: Aerial
  misc_feature: MA Experiment 20000086 PARAMETER Experiment Name: At_100uM_ABA_Mutants_cDNA_P Parameter: Treatment Value: 100uM ABA vs. No Treatment
  misc_feature: MA Experiment ID: 20000111 Result: Down-regulated in Transcription
  misc_feature: MA Experiment 20000111 PARAMETER Experiment Name: At_42deg_Heat_cDNA_P Parameter: Temperature (deg C) Value: 42 vs. 22
  misc_feature: MA Experiment 20000111 PARAMETER Experiment Name: At_42deg_Heat_cDNA_P Parameter: Timepoint (hr) Value: 6
  misc_feature: MA Experiment 20000111 PARAMETER Experiment Name: At_42deg_Heat_cDNA_P Parameter: Tissue Value: Aerial
  misc_feature: MA Experiment ID: 20000112 Result: Down-regulated in Transcription
  misc_feature: MA Experiment 20000112 PARAMETER Experiment Name: At_42deg_Heat_cDNA_P Parameter: Temperature (deg C) Value: 42 vs. 22
  misc_feature: MA Experiment 20000112 PARAMETER Experiment Name: At_42deg_Heat_cDNA_P Parameter: Timepoint (hr) Value: 2
  misc_feature: MA Experiment 20000112 PARAMETER Experiment Name: At_42deg_Heat_cDNA_P Parameter: Tissue Value: Aerial
  misc_feature: MA Experiment ID: 20000173 Result: Down-regulated in Transcription
  misc_feature: MA Experiment 20000173 PARAMETER Experiment Name: At_42deg_Heat_P Parameter: Age (day) Value: 14
  misc_feature: MA Experiment 20000173 PARAMETER Experiment Name: At_42deg_Heat_P Parameter: Organism Value: A. thaliana
  misc_feature: MA Experiment 20000173 PARAMETER Experiment Name: At_42deg_Heat_P Parameter: Plant Line Value: WS
  misc_feature: MA Experiment 20000173 PARAMETER Experiment Name: At_42deg_Heat_P Parameter: Temperature (deg C) Value: 42 vs. 22
  misc_feature: MA Experiment 20000173 PARAMETER Experiment Name: At_42deg_Heat_P Parameter: Timepoint (hr) Value: 6
  misc_feature: MA Experiment 20000173 PARAMETER Experiment Name: At_42deg_Heat_P Parameter: Tissue Value: Aerial
  misc_feature: MA Experiment ID: 20000179 Result: Up-regulated in Transcription
  misc_feature: MA Experiment 20000179 PARAMETER Experiment Name: At_Germinating_Seeds_P Parameter: Age (hr) Value: 6 vs. 0
  misc_feature: MA Experiment 20000179 PARAMETER Experiment Name: At_Germinating_Seeds_P Parameter: Tissue Value: Germinating Seeds
  misc_feature: MA Experiment ID: 20000180 Result: Up-regulated in Transcription
  misc_feature: MA Experiment 20000180 PARAMETER Experiment Name: At_Germinating_Seeds_P Parameter: Age (hr) Value: 24 vs. 0
  misc_feature: MA Experiment 20000180 PARAMETER Experiment Name: At_Germinating_Seeds_P Parameter: Tissue Value: Germinating Seeds
  misc_feature: MA Experiment ID: 20000182 Result: Up-regulated in Transcription
  misc_feature: MA Experiment 20000182 PARAMETER Experiment Name: At_2mM_SA_P Parameter: Age (day) Value: 14
  misc_feature: MA Experiment 20000182 PARAMETER Experiment Name: At_2mM_SA_P Parameter: Organism Value: A. thaliana
  misc_feature: MA Experiment 20000182 PARAMETER Experiment Name: At_2mM_SA_P Parameter: Plant Line Value: WS
  misc_feature: MA Experiment 20000182 PARAMETER Experiment Name: At_2mM_SA_P Parameter: Timepoint (hr) Value: 6
  misc_feature: MA Experiment 20000182 PARAMETER Experiment Name: At_2mM_SA_P Parameter: Tissue Value: Aerial
  misc_feature: MA Experiment 20000182 PARAMETER Experiment Name: At_2mM_SA_P Parameter: Treatment Value: 2mM SA vs. No Treatment
  misc_feature: MA Experiment ID: 20000184 Result: Down-regulated in Transcription
  misc_feature: MA Experiment 20000184 PARAMETER Experiment Name: At_Shoots__P Parameter: Age (day) Value: 7
  misc_feature: MA Experiment 20000184 PARAMETER Experiment Name: At_Shoots__P Parameter: Tissue Value: Shoots vs. Whole Plant
  misc_feature: MA Experiment ID: 20000185 Result: Down-regulated in Transcription
  misc_feature: MA Experiment 20000185 PARAMETER Experiment Name: At_Roots__P Parameter: Age (day) Value: 7 vs. 21
  misc_feature: MA Experiment 20000185 PARAMETER Experiment Name: At_Roots__P Parameter: Organism Value: A. thaliana
  misc_feature: MA Experiment 20000185 PARAMETER Experiment Name: At_Roots__P Parameter: Tissue Value: Roots vs. Whole Plant
  misc_feature: MA Experiment ID: 20000211 Result: Up-regulated in Transcription
  misc_feature: MA Experiment 20000211 PARAMETER Experiment Name: At_0.001percent_MeJA__P Parameter: Age (day) Value: 14
  misc_feature: MA Experiment 20000211 PARAMETER Experiment Name: At_0.001percent_MeJA__P Parameter: Organism Value: A. thaliana
  misc_feature: MA Experiment 20000211 PARAMETER Experiment Name: At_0.001percent_MeJA__P Parameter: Plant Line Value: WS
  misc_feature: MA Experiment 20000211 PARAMETER Experiment Name: At_0.001percent_MeJA__P Parameter: Timepoint (hr) Value: 1
  misc_feature: MA Experiment 20000211 PARAMETER Experiment Name: At_0.001percent_MeJA__P Parameter: Tissue Value: Aerial
  misc_feature: MA Experiment 20000211 PARAMETER Experiment Name: At_0.001percent_MeJA__P Parameter: Treatment Value: 0.001percent MeJA vs. No Treatment
  misc_feature: MA Experiment ID: 20000234 Result: Down-regulated in Transcription
  misc_feature: MA Experiment 20000234 PARAMETER Experiment Name: At_Siliques_P Parameter: Age (day) Value: 21
  misc_feature: MA Experiment 20000234 PARAMETER Experiment Name: At_Siliques_P Parameter: Organism Value: A. thaliana
  misc_feature: MA Experiment 20000234 PARAMETER Experiment Name: At_Siliques_P Parameter: Plant Line Value: WS
  misc_feature: MA Experiment 20000234 PARAMETER Experiment Name: At_Siliques_P Parameter: Tissue Value: Less Than 5mm Siliques vs. Whole Plant
  misc_feature: MA Experiment ID: 20000438 Result: Down-regulated in Transcription
  misc_feature: MA Experiment 20000438 PARAMETER Experiment Name: At_Shoots__P Parameter: Age (day) Value: 14
  misc_feature: MA Experiment 20000438 PARAMETER Experiment Name: At_Shoots__P Parameter: Tissue Value: Shoots vs. Whole Plant
  misc_feature: MA Experiment ID: 20000439 Result: Down-regulated in Transcription
  misc_feature: MA Experiment 20000439 PARAMETER Experiment Name: At_Roots__P Parameter: Age (day) Value: 14 vs. 21
  misc_feature: MA Experiment 20000439 PARAMETER Experiment Name: At_Roots__P Parameter: Organism Value: A. thaliana
  misc_feature: MA Experiment 20000439 PARAMETER Experiment Name: At_Roots__P Parameter: Tissue Value: Roots vs. Whole Plant
  misc_feature: MA Experiment ID: 20000495 Result: Down-regulated in Transcription
  misc_feature: MA Experiment 20000495 PARAMETER Experiment Name: At_Guard_Cells_P Parameter: Harvest Date Value: 8/2/2002
  misc_feature: MA Experiment 20000495 PARAMETER Experiment Name: At_Guard_Cells_P Parameter: Organism Value: A. thaliana
  misc_feature: MA Experiment 20000495 PARAMETER Experiment Name: At_Guard_Cells_P Parameter: Tissue Value: Guard Cells vs. Leaves
  misc_feature: MA Experiment ID: 20000606 Result: Up-regulated in Transcription
  misc_feature: MA Experiment 20000606 PARAMETER Experiment Name: At_CS8548_Mutant_P Parameter: Age (day) Value: 14
  misc_feature: MA Experiment 20000606 PARAMETER Experiment Name: At_CS8548_Mutant_P Parameter: Plant Line Value: CS8548 vs. wt
  misc_feature: MA Experiment 20000606 PARAMETER Experiment Name: At_CS8548_Mutant_P Parameter: Tissue Value: Whole Plant
  misc_feature: MA Experiment ID: 20001450 Result: Down-regulated in Transcription
  misc_feature: MA Experiment 20001450 PARAMETER Experiment Name: At_Far-red-induction_P Parameter: Age (day) Value: 7
  misc_feature: MA Experiment 20001450 PARAMETER Experiment Name: At_Far-red-induction_P Parameter: Light Value: Far-red vs. White
  misc_feature: MA Experiment 20001450 PARAMETER Experiment Name: At_Far-red-induction_P Parameter: Organism Value: A. thaliana
  misc_feature: MA Experiment 20001450 PARAMETER Experiment Name: At_Far-red-induction_P Parameter: Plant Line Value: Columbia
  misc_feature: MA Experiment 20001450 PARAMETER Experiment Name: At_Far-red-induction_P Parameter: Timepoint (hr) Value: 8
  misc_feature: MA Experiment 20001450 PARAMETER Experiment Name: At_Far-red-induction_P Parameter: Tissue Value: Whole Plant
  misc_feature: MA Experiment ID: 20001451 Result: Down-regulated in Transcription
  misc_feature: MA Experiment 20001451 PARAMETER Experiment Name: At_Far-red-induction_P Parameter: Age (day) Value: 7
  misc_feature: MA Experiment 20001451 PARAMETER Experiment Name: At_Far-red-induction_P Parameter: Light Value: Far-red vs. White
  misc_feature: MA Experiment 20001451 PARAMETER Experiment Name: At_Far-red-induction_P Parameter: Organism Value: A. thaliana
  misc_feature: MA Experiment 20001451 PARAMETER Experiment Name: At_Far-red-induction_P Parameter: Plant Line Value: Columbia
  misc_feature: MA Experiment 20001451 PARAMETER Experiment Name: At_Far-red-induction_P Parameter: Timepoint (hr) Value: 24
  misc_feature: MA Experiment 20001451 PARAMETER Experiment Name: At_Far-red-induction_P Parameter: Tissue Value: Whole Plant
  misc_feature: MA Experiment ID: 20001911 Result: Down-regulated in Transcription
  misc_feature: MA Experiment 20001911 PARAMETER Experiment Name: At_Drought_Reproduction_P Parameter: Age (day) Value: 40
  misc_feature: MA Experiment 20001911 PARAMETER Experiment Name: At_Drought_Reproduction_P Parameter: Organism Value: A. thaliana
  misc_feature: MA Experiment 20001911 PARAMETER Experiment Name: At_Drought_Reproduction_P Parameter: Plant Line Value: WS
  misc_feature: MA Experiment 20001911 PARAMETER Experiment Name: At_Drought_Reproduction_P Parameter: Timepoint (day) Value: 10
  misc_feature: MA Experiment 20001911 PARAMETER Experiment Name: At_Drought_Reproduction_P Parameter: Tissue Value: Flowers
  misc_feature: MA Experiment 20001911 PARAMETER Experiment Name: At_Drought_Reproduction_P Parameter: Treatment Value: Drought vs. No Drought
acacaacaacaacacatccactcgaattttctatttccgaataacaaaaccgatcggcggagacatgacggcggcacaagggaactctaacgagactctgttttcttcttacaagatgggaagattcgatctctctcatcgagtggttctggcgccgatgacgcggtgcagggcgttgaacggagtaccaaacgcggcgttggcagagtattatgctcaacggaccactcccggcggttttctcatctccgaaggcaccatggtctctcccggatccgcagggttcccacatgtgcctggaatctattcagatgaacaagtagaagcatggaagcaagttgtggaagcagttcacgctaagggaggtttcatcttttgtcaattatggcatgttggacgtgcttctcatgcagtgtatcaacctaatggaggatcaccaatatcgtcaacgaacaaaccaatctcggaaaacaggtggcgagttttgttgcccgatggttcccacgtgaagtacccgaaacctcgggctttagaagcttccgagatacctcgggtggtggaggattattgcctttctgctttgaatgcgattcgagctggtttcgatgggattgagatccacggggcgcatggttaccttattgatcagtttttgaaagatgggatcaatgaccgtactgaccaatacggaggatccattgcaaaccgttgtagattcttgaaacaagtagtggaaggtgtagtttcagccataggagctagtaaagttggtgtgagggtatctccggctatagatcacttggacgcaactgattctgacccactatcactcgggctagccgtggttggcatgctcaataagttacaaggtgttaatggctcaaagctcgcttaccttcacgttacacaacctcgctaccacgcctacgggcaaacagagtctggaaggcaagggagtgatgaggaagaagctaagctaatgaagagcttgaggatggcttataatggaacctttatgtctagtggaggattcaataaggaactaggtatgcaagctgttcaacaaggtgatgctgatttggtttcatatggcagactgtttatcgcaaacccggatttggtttcgcggttcaagattgatggagagttgaataaatataatcggaagacgttttacactcaagatccagttgttggctacacggattatcctttcttggctcctttttcccgcctctgagtttgataatcgaggagaaaatgtattgacaatacattgatatgtaaaatgacaatgttattgttatccacttaatatttagtcatgtatcttgttgtttatctagttaaaatcttcatggcatta

SEQ ID NO: 97836 - protein, 412 aa, Arabidopsis thaliana
  peptide (1)..(412): Ceres Seq. ID no. 13576384
  misc_feature (32)..(384): Pfam Name: NADH:flavin oxidoreductase / NADH oxidase family Pfam Description: NADH:flavin oxidoreductase / NADH oxidase family
  misc_feature (22)..(412): Homolog of NCBI NO: 15225045 NR Description: 12-oxophytodienoate reductase (OPR3)(DDE1)
  misc_feature (22)..(412): Homolog of NCBI NO: 6707797 NR Description: 12-oxo-phytodienoate reductase [Arabidopsis
  misc_feature (22)..(412): Homolog of NCBI NO: 7688991 NR Description: 12-oxo-phytodienoate reductase [Arabidopsis
  misc_feature (22)..(412): Homolog of NCBI NO: 5059115 NR Description: OPDA-reductase homolog [Arabidopsis thaliana]
  misc_feature (22)..(412): Homolog of NCBI NO: 10242314 NR Description: 12-oxo-phytodienoate reductase [Arabidopsis
  misc_feature (22)..(412): Homolog of NCBI NO: 12056507 NR Description: 12-oxophytodienoate reductase 3 [Lycopersicon
  misc_feature (33)..(406): Homolog of NCBI NO: 23495288 NR Description: 12-oxophytodienoic acid reductase [Oryza sativa]
  misc_feature (29)..(406): Homolog of NCBI NO: 5701740 NR Description: LEDI-5a protein [Lithospermum erythrorhizon]
  misc_feature (29)..(406): Homolog of NCBI NO: 5701742 NR Description: LEDI-5b protein [Lithospermum erythrorhizon]
  misc_feature (22)..(406): Homolog of NCBI NO: 2765083 NR Description: 12-oxophytodienoate reductase [Arabidopsis
HNNNTSTRIFYFRITKPIGGDMTAAQGNSNETLFSSYKMGRFDLSHRVVLAPMTRCRALNGVPNAALAEYYAQRTTPGGFLISEGTMVSPGSAGFPHVPGIYSDEQVEAWKQVVEAVHAKGGFIFCQLWHVGRASHAVYQPNGGSPISSTNKPISENRWRVLLPDGSHVKYPKPRALEASEIPRVVEDYCLSALNAIRAGFDGIEIHGAHGYLIDQFLKDGINDRTDQYGGSIANRCRFLKQVVEGVVSAIGASKVGVRVSPAIDHLDATDSDPLSLGLAVVGMLNKLQGVNGSKLAYLHVTQPRYHAYGQTESGRQGSDEEEAKLMKSLRMAYNGTFMSSGGFNKELGMQAVQQGDADLVSYGRLFIANPDLVSRFKIDGELNKYNRKTFYTQDPVVGYTDYPFLAPFSRL

SEQ ID NO: 97837 - protein, 391 aa, Arabidopsis thaliana; identical to SEQ ID NO: 95866
  peptide (1)..(391): Ceres Seq. ID no. 13576385
  misc_feature (11)..(363): Pfam Name: NADH:flavin oxidoreductase / NADH oxidase family Pfam Description: NADH:flavin oxidoreductase / NADH oxidase family
  misc_feature (1)..(391): Homolog of NCBI NO: 15225045 NR Description: 12-oxophytodienoate reductase (OPR3)(DDE1)
  misc_feature (1)..(391): Homolog of NCBI NO: 6707797 NR Description: 12-oxo-phytodienoate reductase [Arabidopsis
  misc_feature (1)..(391): Homolog of NCBI NO: 7688991 NR Description: 12-oxo-phytodienoate reductase [Arabidopsis
  misc_feature (1)..(391): Homolog of NCBI NO: 5059115 NR Description: OPDA-reductase homolog [Arabidopsis thaliana]
  misc_feature (1)..(391): Homolog of NCBI NO: 10242314 NR Description: 12-oxo-phytodienoate reductase [Arabidopsis
  misc_feature (1)..(391): Homolog of NCBI NO: 12056507 NR Description: 12-oxophytodienoate reductase 3 [Lycopersicon
  misc_feature (12)..(385): Homolog of NCBI NO: 23495288 NR Description: 12-oxophytodienoic acid reductase [Oryza sativa]
  misc_feature (8)..(385): Homolog of NCBI NO: 5701740 NR Description: LEDI-5a protein [Lithospermum erythrorhizon]
  misc_feature (8)..(385): Homolog of NCBI NO: 5701742 NR Description: LEDI-5b protein [Lithospermum erythrorhizon]
  misc_feature (1)..(385): Homolog of NCBI NO: 2765083 NR Description: 12-oxophytodienoate reductase [Arabidopsis

SEQ ID NO: 97838 - protein, 374 aa, Arabidopsis thaliana; identical to SEQ ID NO: 95867
  peptide (1)..(374): Ceres Seq. ID no. 13576386
  misc_feature (1)..(346): Pfam Name: NADH:flavin oxidoreductase / NADH oxidase family Pfam Description: NADH:flavin oxidoreductase / NADH oxidase family
  misc_feature (1)..(374): Homolog of NCBI NO: 15225045 NR Description: 12-oxophytodienoate reductase (OPR3)(DDE1)
  misc_feature (1)..(374): Homolog of NCBI NO: 6707797 NR Description: 12-oxo-phytodienoate reductase [Arabidopsis
  misc_feature (1)..(374): Homolog of NCBI NO: 7688991 NR Description: 12-oxo-phytodienoate reductase [Arabidopsis
  misc_feature (1)..(374): Homolog of NCBI NO: 5059115 NR Description: OPDA-reductase homolog [Arabidopsis thaliana]
  misc_feature (1)..(374): Homolog of NCBI NO: 10242314 NR Description: 12-oxo-phytodienoate reductase [Arabidopsis
  misc_feature (1)..(374): Homolog of NCBI NO: 12056507 NR Description: 12-oxophytodienoate reductase 3 [Lycopersicon
  misc_feature (1)..(368): Homolog of NCBI NO: 23495288 NR Description: 12-oxophytodienoic acid reductase [Oryza sativa]
  misc_feature (1)..(368): Homolog of NCBI NO: 5701740 NR Description: LEDI-5a protein [Lithospermum erythrorhizon]
  misc_feature (1)..(368): Homolog of NCBI NO: 5701742 NR Description: LEDI-5b protein [Lithospermum erythrorhizon]
  misc_feature (1)..(368): Homolog of NCBI NO: 2765083 NR Description: 12-oxophytodienoate reductase [Arabidopsis

SEQ ID NO: 97839 - DNA, 794 bp, Arabidopsis thaliana
  misc_feature (1)..(794): Ceres Seq. ID no. 13576387
  misc_feature: MA Experiment ID: 20000234 Result: Up-regulated in Transcription
  misc_feature: MA Experiment 20000234 PARAMETER Experiment Name: At_Siliques_P Parameter: Age (day) Value: 21
  misc_feature: MA Experiment 20000234 PARAMETER Experiment Name: At_Siliques_P Parameter: Organism Value: A. thaliana
  misc_feature: MA Experiment 20000234 PARAMETER Experiment Name: At_Siliques_P Parameter: Plant Line Value: WS
  misc_feature: MA Experiment 20000234 PARAMETER Experiment Name: At_Siliques_P Parameter: Tissue Value: Less Than 5mm Siliques vs. Whole Plant
  misc_feature: MA Experiment ID: 20000439 Result: Down-regulated in Transcription
  misc_feature: MA Experiment 20000439 PARAMETER Experiment Name: At_Roots__P Parameter: Age (day) Value: 14 vs. 21
  misc_feature: MA Experiment 20000439 PARAMETER Experiment Name: At_Roots__P Parameter: Organism Value: A. thaliana
  misc_feature: MA Experiment 20000439 PARAMETER Experiment Name: At_Roots__P Parameter: Tissue Value: Roots vs. Whole Plant
  misc_feature: MA Experiment ID: 20001450 Result: Down-regulated in Transcription
  misc_feature: MA Experiment 20001450 PARAMETER Experiment Name: At_Far-red-induction_P Parameter: Age (day) Value: 7
  misc_feature: MA Experiment 20001450 PARAMETER Experiment Name: At_Far-red-induction_P Parameter: Light Value: Far-red vs. White
  misc_feature: MA Experiment 20001450 PARAMETER Experiment Name: At_Far-red-induction_P Parameter: Organism Value: A. thaliana
  misc_feature: MA Experiment 20001450 PARAMETER Experiment Name: At_Far-red-induction_P Parameter: Plant Line Value: Columbia
  misc_feature: MA Experiment 20001450 PARAMETER Experiment Name: At_Far-red-induction_P Parameter: Timepoint (hr) Value: 8
  misc_feature: MA Experiment 20001450 PARAMETER Experiment Name: At_Far-red-induction_P Parameter: Tissue Value: Whole Plant
  misc_feature: MA Experiment ID: 20001558 Result: Up-regulated in Transcription
  misc_feature: MA Experiment 20001558 PARAMETER Experiment Name: At_Drought_Soil_Dry_P Parameter: Age (day) Value: 27
  misc_feature: MA Experiment 20001558 PARAMETER Experiment Name: At_Drought_Soil_Dry_P Parameter: Organism Value: A. thaliana
  misc_feature: MA Experiment 20001558 PARAMETER Experiment Name: At_Drought_Soil_Dry_P Parameter: Plant Line Value: WS
  misc_feature: MA Experiment 20001558 PARAMETER Experiment Name: At_Drought_Soil_Dry_P Parameter: Post Timepoint (hr) Value: 6
  misc_feature: MA Experiment 20001558 PARAMETER Experiment Name: At_Drought_Soil_Dry_P Parameter: Post-Treatment Value: Re-Water vs. No Drought
  misc_feature: MA Experiment 20001558 PARAMETER Experiment Name: At_Drought_Soil_Dry_P Parameter: Timepoint (day) Value: 13
  misc_feature: MA Experiment 20001558 PARAMETER Experiment Name: At_Drought_Soil_Dry_P Parameter: Treatment Value: Drought vs. No Drought
  misc_feature: MA Experiment ID: 20001560 Result: Up-regulated in Transcription
  misc_feature: MA Experiment 20001560 PARAMETER Experiment Name: At_Drought_Soil_Dry_P Parameter: Age (day) Value: 28
  misc_feature: MA Experiment 20001560 PARAMETER Experiment Name: At_Drought_Soil_Dry_P Parameter: Organism Value: A. thaliana
  misc_feature: MA Experiment 20001560 PARAMETER Experiment Name: At_Drought_Soil_Dry_P Parameter: Plant Line Value: WS
  misc_feature: MA Experiment 20001560 PARAMETER Experiment Name: At_Drought_Soil_Dry_P Parameter: Post Timepoint (hr) Value: None
  misc_feature: MA Experiment 20001560 PARAMETER Experiment Name: At_Drought_Soil_Dry_P Parameter: Post-Treatment Value: None
  misc_feature: MA Experiment 20001560 PARAMETER Experiment Name: At_Drought_Soil_Dry_P Parameter: Timepoint (day) Value: 14
  misc_feature: MA Experiment 20001560 PARAMETER Experiment Name: At_Drought_Soil_Dry_P Parameter: Treatment Value: Drought vs. No Drought
  misc_feature: MA Experiment ID: 20001757 Result: Up-regulated in Transcription
  misc_feature: MA Experiment 20001757 PARAMETER Experiment Name: At_50mM_NH4NO3_L-to-H_P Parameter: Timepoint (hr) Value: 6
  misc_feature: MA Experiment 20001757 PARAMETER Experiment Name: At_50mM_NH4NO3_L-to-H_P Parameter: Tissue Value: Leaf
  misc_feature: MA Experiment 20001757 PARAMETER Experiment Name: At_50mM_NH4NO3_L-to-H_P Parameter: Treatment Value: 50mM NH4NO3 vs 100mM Mannitol
aagaataaaaaaaataaaaaccaaaaagcaaaagggataacacaaaacccctttcaccttcccaattccaccaccacacagacaaagcacaccgaaaatggcggtttcttctggaacattctccactttcctctgcatcaaaacgacatctttccgcaacccatcaactcctctgtcctctctccggttcgcctctcacccggcggctaaactacgcttggttcgagcggtaacatctgcgacggaatcttcagagccaaccgcaaccaataagagagtgccacgcggtatcatgaaacctagaccagtttcaccagagatgcaagacatcgtcgaacttcctgaaatcgctcgcacacaagctcttaagcgtatttgggcttacatcaaagaacatgaccttcaggacccacaaaacaagagagaaatactgtgtgatgagaagctgaagaagatattcgaaggaagagatcgggttgggttcctagagattgcaaagctcatcggtcctcacttcctctgatggattgtttccgcggaactttatttggatgattgtctatgttttgttgttgacctgttatggccatgaaaagagaagggtatttgaagttgaggaagacttagattagtaaattaggtttttttttggttgcttcaattcaatggatgttatgtagtcgttgcttcctaatgttgtttgcgttttcgtttcgatttcagattctatttttcttgtttgactaacggtaaacggcttttgacaacatgtttttccgtttatttagttttcg

SEQ ID NO: 97840 - protein, 141 aa, Arabidopsis thaliana
  peptide (1)..(141): Ceres Seq. ID no. 13576388
  misc_feature (65)..(141): Pfam Name: SWIB/MDM2 domain Pfam Description: SWIB/MDM2 domain
  misc_feature (1)..(141): Homolog of NCBI NO: 18397658 NR Description: expressed protein [Arabidopsis thaliana]
  misc_feature (1)..(141): Homolog of NCBI NO: 19698859 NR Description: unknown protein [Arabidopsis thaliana]
  misc_feature (1)..(141): Homolog of NCBI NO: 21593713 NR Description: unknown [Arabidopsis thaliana]
  misc_feature (1)..(141): Homolog of NCBI NO: 14423526 NR Description: putative protein [Arabidopsis thaliana]
  misc_feature (1)..(141): Homolog of NCBI NO: 15235320 NR Description: expressed protein [Arabidopsis thaliana]
  misc_feature (1)..(141): Homolog of NCBI NO: 21553903 NR Description: unknown [Arabidopsis thaliana]
  misc_feature (22)..(141): Homolog of NCBI NO: 14488372 NR Description: hypothetical protein [Oryza sativa (japonica
  misc_feature (23)..(141): Homolog of NCBI NO: 21593643 NR Description: unknown [Arabidopsis thaliana]
  misc_feature (7)..(140): Homolog of NCBI NO: 33667910 NR Description: SWIb domain-containing protein [Solanum chacoense]
  misc_feature (23)..(141): Homolog of NCBI NO: 18396594 NR Description: expressed protein [Arabidopsis thaliana] hypothetical protein [Arabidopsis thaliana] unknown protein [Arabidopsis thaliana]
MAVSSGTFSTFLCIKTTSFRNPSTPLSSLRFASHPAAKLRLVRAVTSATESSEPTATNKRVPRGIMKPRPVSPEMQDIVELPEIARTQALKRIWAYIKEHDLQDPQNKREILCDEKLKKIFEGRDRVGFLEIAKLIGPHFL

SEQ ID NO: 97841 - protein, 76 aa, Arabidopsis thaliana; identical to SEQ ID NO: 37578
  peptide (1)..(76): Ceres Seq. ID no. 13576389
  misc_feature (1)..(76): Pfam Name: SWIB/MDM2 domain Pfam Description: SWIB/MDM2 domain
  misc_feature (1)..(76): Homolog of NCBI NO: 18397658 NR Description: expressed protein [Arabidopsis thaliana]
  misc_feature (1)..(76): Homolog of NCBI NO: 19698859 NR Description: unknown protein [Arabidopsis thaliana]
  misc_feature (1)..(76): Homolog of NCBI NO: 21593713 NR Description: unknown [Arabidopsis thaliana]
  misc_feature (1)..(76): Homolog of NCBI NO: 14423526 NR Description: putative protein [Arabidopsis thaliana]
  misc_feature (1)..(76): Homolog of NCBI NO: 15235320 NR Description: expressed protein [Arabidopsis thaliana]
  misc_feature (1)..(76): Homolog of NCBI NO: 21553903 NR Description: unknown [Arabidopsis thaliana]
  misc_feature (1)..(76): Homolog of NCBI NO: 14488372 NR Description: hypothetical protein [Oryza sativa (japonica
  misc_feature (1)..(76): Homolog of NCBI NO: 21593643 NR Description: unknown [Arabidopsis thaliana]
  misc_feature (1)..(75): Homolog of NCBI NO: 33667910 NR Description: SWIb domain-containing protein [Solanum chacoense]
  misc_feature (1)..(76): Homolog of NCBI NO: 18396594 NR Description: expressed protein [Arabidopsis thaliana] hypothetical protein [Arabidopsis thaliana] unknown protein [Arabidopsis thaliana]

SEQ ID NO: 97842 - DNA, 1206 bp, Arabidopsis thaliana
  misc_feature (1)..(1206): Ceres Seq. ID no. 13576390
  misc_feature: MA Experiment ID: 108462 Result: Down-regulated in Transcription
  misc_feature: MA Experiment 108462 PARAMETER Experiment Name: At_Germinating_Seeds_cDNA_P Parameter: Age (day) Value: 2 vs. 0
  misc_feature: MA Experiment 108462 PARAMETER Experiment Name: At_Germinating_Seeds_cDNA_P Parameter: Tissue Value: Germinating Seeds
  misc_feature: MA Experiment ID: 108464 Result: Down-regulated in Transcription
  misc_feature: MA Experiment 108464 PARAMETER Experiment Name: At_Germinating_Seeds_cDNA_P Parameter: Age (day) Value: 4 vs. 0
  misc_feature: MA Experiment 108464 PARAMETER Experiment Name: At_Germinating_Seeds_cDNA_P Parameter: Tissue Value: Germinating Seeds
  misc_feature: MA Experiment ID: 20000088 Result: Up-regulated in Transcription
  misc_feature: MA Experiment 20000088 PARAMETER Experiment Name: At_100uM_ABA_Mutants_cDNA_P Parameter: Plant Line Value: Landsberg
  misc_feature: MA Experiment 20000088 PARAMETER Experiment Name: At_100uM_ABA_Mutants_cDNA_P Parameter: Timepoint (hr) Value: 6
  misc_feature: MA Experiment 20000088 PARAMETER Experiment Name: At_100uM_ABA_Mutants_cDNA_P Parameter: Tissue Value: Aerial
  misc_feature: MA Experiment 20000088 PARAMETER Experiment Name: At_100uM_ABA_Mutants_cDNA_P Parameter: Treatment Value: 100uM ABA vs. No Treatment
  misc_feature: MA Experiment ID: 20000111 Result: Up-regulated in Transcription
  misc_feature: MA Experiment 20000111 PARAMETER Experiment Name: At_42deg_Heat_cDNA_P Parameter: Temperature (deg C) Value: 42 vs. 22
  misc_feature: MA Experiment 20000111 PARAMETER Experiment Name: At_42deg_Heat_cDNA_P Parameter: Timepoint (hr) Value: 6
  misc_feature: MA Experiment 20000111 PARAMETER Experiment Name: At_42deg_Heat_cDNA_P Parameter: Tissue Value: Aerial
  misc_feature: MA Experiment ID: 20000113 Result: Up-regulated in Transcription
  misc_feature: MA Experiment 20000113 PARAMETER Experiment Name: At_42deg_Heat_cDNA_P Parameter: Temperature (deg C) Value: 42 vs. 22
  misc_feature: MA Experiment 20000113 PARAMETER Experiment Name: At_42deg_Heat_cDNA_P Parameter: Timepoint (hr) Value: 8
  misc_feature: MA Experiment 20000113 PARAMETER Experiment Name: At_42deg_Heat_cDNA_P Parameter: Tissue Value: Aerial
  misc_feature: MA Experiment ID: 20000437 Result: Up-regulated in Transcription
  misc_feature: MA Experiment 20000437 PARAMETER Experiment Name: At_Drought_P Parameter: Age (day) Value: 8
  misc_feature: MA Experiment 20000437 PARAMETER Experiment Name: At_Drought_P Parameter: Organism Value: A. thaliana
  misc_feature: MA Experiment 20000437 PARAMETER Experiment Name: At_Drought_P Parameter: Plant Line Value: WS
  misc_feature: MA Experiment 20000437 PARAMETER Experiment Name: At_Drought_P Parameter: Timepoint (hr) Value: 24
  misc_feature: MA Experiment 20000437 PARAMETER Experiment Name: At_Drought_P Parameter: Tissue Value: Whole Plant
  misc_feature: MA Experiment 20000437 PARAMETER Experiment Name: At_Drought_P Parameter: Treatment Value: Drought vs. No Drought
ttttccccaatcttcataagtcataagaaaaatctcagcaattgtcaaaattttccagcaatcgagagagcagcacaagagagcatagaaggaccgattggggattagttagcgtgaaaggagatcctagtagcagctatggatagagaatggggttccaagcctggtagtggcggcgccgcctccggccaaaacgaggccatagatcgccgtgagcgtctccgtcgtcttgctcttgaaaccatagaccttgctaaagatccgtatttcatgcgaaatcatcttggaagctatgagtgtaaactatgtctaacactgcataacaatgaaggaaactacttggcacatactcaaggtaagaggcatcagacaaacttggcaaagagagctgctcgagaggctaaggatgctcctactaagccgcagccactcaagcgcaatgtctcagttcgcagaacagttaaaattggtagaccagggtaccgggttacaaaacagtatgatcccgagctgcaacaaagatctcttctgttccagattgaatatcctgagatagaggacaacataaagccaagacatcgtttcatgtcatcttatgagcagaaagttcaaccttatgacaagagctatcaataccttctatttgcagccgaaccatatgaaatcatagctttcaaggttcctagcacagaggttgataaatcaaccccaaagtttttctctcactgggatccagactccaagatgtttacactgcaggtgtatttcaagcctaccaagccagaaccaaacaagcctcagtcagctgttggagcaaatggtcttccaccgccaccaccacccccgcctcatcaagctcaaccgccaccaccacctccatctggtttattcccaccgccaccacctccaatggctaacaatggttttaggcccatgccaccagctggaggtttcggacatcctaacatgtgaaagagaatccagcgaagcagtttaaaaacacagtactctgatcatggtttactaagagagacttgctctttgactgaaaaacaaatctgttttgacatggattctcaaagctgtgatctctacggatgtattagctctctagataccttctttgagtttcttctatctgcttctcgtatgtaccattttgacaagattgttttccgttaatagtacaattagcgttggcgaaac

SEQ ID NO: 97843 - protein, 277 aa, Arabidopsis thaliana; identical to SEQ ID NO: 21044
  peptide (1)..(277): Ceres Seq. ID no. 13576391
  misc_feature (208)..(268): Pfam Name: Extensin-like region Pfam Description: Extensin-like region
  misc_feature (1)..(277): Homolog of NCBI NO: 18403023 NR Description: spliceosome associated protein-family thaliana] >gi|15450715|gb|AAK96629.1| At2g32600/T26B15.16 thaliana] >gi|20197236|gb|AAC25942.2| putative spliceosome
  misc_feature (1)..(277): Homolog of NCBI NO: 7488346 NR Description: probable spliceosome-associated protein SAP62
  misc_feature (49)..(275): Homolog of NCBI NO: 34902138 NR Description: hypothetical protein [Oryza sativa (japonica group)] >gi|29893604|gb|AAP06858.1| hypothetical protein [Oryza
  misc_feature (1)..(52): Homolog of NCBI NO: 34902138 NR Description: hypothetical protein [Oryza sativa (japonica group)] >gi|29893604|gb|AAP06858.1| hypothetical protein [Oryza
  misc_feature (6)..(270): Homolog of NCBI NO: 21361376 NR Description: splicing factor 3a, subunit 2, 66kDa; Spliceosome
  misc_feature (6)..(275): Homolog of NCBI NO: 30931324 NR Description: Unknown (protein for MGC:64703) [Mus musculus]
  misc_feature (6)..(270): Homolog of NCBI NO: 627605 NR Description: spliceosome-associated protein SAP 62 - human
  misc_feature (6)..(275): Homolog of NCBI NO: 34862283 NR Description: similar to Splicing factor 3A subunit 2
  misc_feature (6)..(268): Homolog of NCBI NO: 27371271 NR Description: Similar to splicing factor 3a, subunit 2, 66kDa
  misc_feature (6)..(275): Homolog of NCBI NO: 10800150 NR Description: splicing factor 3a, subunit 2; spliceosomal gene 62; splicing factor 3a, subunit 2, 66kD [Mus musculus] Splicing factor 3A subunit 2 (Spliceosome associated protein 62)

SEQ ID NO: 97844 - protein, 233 aa, Arabidopsis thaliana; identical to SEQ ID NO: 21045
  peptide (1)..(233): Ceres Seq. ID no. 13576392
  misc_feature (164)..(224): Pfam Name: Extensin-like region Pfam Description: Extensin-like region
  misc_feature (1)..(233): Homolog of NCBI NO: 18403023 NR Description: spliceosome associated protein-family thaliana] >gi|15450715|gb|AAK96629.1| At2g32600/T26B15.16 thaliana] >gi|20197236|gb|AAC25942.2| putative spliceosome
  misc_feature (1)..(233): Homolog of NCBI NO: 7488346 NR Description: probable spliceosome-associated protein SAP62
  misc_feature (5)..(231): Homolog of NCBI NO: 34902138 NR Description: hypothetical protein [Oryza sativa (japonica group)] >gi|29893604|gb|AAP06858.1| hypothetical protein [Oryza
  misc_feature (1)..(226): Homolog of NCBI NO: 21361376 NR Description: splicing factor 3a, subunit 2, 66kDa; Spliceosome
  misc_feature (1)..(231): Homolog of NCBI NO: 30931324 NR Description: Unknown (protein for MGC:64703) [Mus musculus]
  misc_feature (1)..(226): Homolog of NCBI NO: 627605 NR Description: spliceosome-associated protein SAP 62 - human
  misc_feature (1)..(231): Homolog of NCBI NO: 34862283 NR Description: similar to Splicing factor 3A subunit 2
  misc_feature (1)..(224): Homolog of NCBI NO: 27371271 NR Description: Similar to splicing factor 3a, subunit 2, 66kDa
  misc_feature (1)..(231): Homolog of NCBI NO: 10800150 NR Description: splicing factor 3a, subunit 2; spliceosomal gene 62; splicing factor 3a, subunit 2, 66kD [Mus musculus] Splicing factor 3A subunit 2 (Spliceosome associated protein 62)
  misc_feature (1)..(167): Homolog of NCBI NO: 7498869 NR Description: hypothetical protein F11A10.2 - Caenorhabditis

SEQ ID NO: 97845 - DNA, 1394 bp, Arabidopsis thaliana
  misc_feature (1)..(1394): Ceres Seq. ID no. 13576393
  misc_feature: MA Experiment ID: 108434 Result: Up-regulated in Transcription
  misc_feature: MA Experiment 108434 PARAMETER Experiment Name: At_Root_Tips_cDNA_P Parameter: Tissue Value: Root Tips
  misc_feature: MA Experiment ID: 108595 Result: Down-regulated in Transcription
  misc_feature: MA Experiment 108595 PARAMETER Experiment Name: At_Ler-pi_Ovule_cDNA_P Parameter: Plant Line Value: null
  misc_feature: MA Experiment ID: 20000185 Result: Up-regulated in Transcription
  misc_feature: MA Experiment 20000185 PARAMETER Experiment Name: At_Roots__P Parameter: Age (day) Value: 7 vs. 21
  misc_feature: MA Experiment 20000185 PARAMETER Experiment Name: At_Roots__P Parameter: Organism Value: A. thaliana
  misc_feature: MA Experiment 20000185 PARAMETER Experiment Name: At_Roots__P Parameter: Tissue Value: Roots vs. Whole Plant
  misc_feature: MA Experiment ID: 20001451 Result: Down-regulated in Transcription
  misc_feature: MA Experiment 20001451 PARAMETER Experiment Name: At_Far-red-induction_P Parameter: Age (day) Value: 7
  misc_feature: MA Experiment 20001451 PARAMETER Experiment Name: At_Far-red-induction_P Parameter: Light Value: Far-red vs. White
  misc_feature: MA Experiment 20001451 PARAMETER Experiment Name: At_Far-red-induction_P Parameter: Organism Value: A. thaliana
  misc_feature: MA Experiment 20001451 PARAMETER Experiment Name: At_Far-red-induction_P Parameter: Plant Line Value: Columbia
  misc_feature: MA Experiment 20001451 PARAMETER Experiment Name: At_Far-red-induction_P Parameter: Timepoint (hr) Value: 24
  misc_feature: MA Experiment 20001451 PARAMETER Experiment Name: At_Far-red-induction_P Parameter: Tissue Value: Whole Plant
gtgtagactgagaaataaagaagcccttgattttgcccattgcagtcatctctctcgaatctctctctataatccgatctgagaaatttcgccggagctaggttttgttgtttaccgatcaatcctttaatcaatggcaatggctgttttccgtcgcgaagggaggcgtctcctcccttcaatcgccgctcgcccaatcgctgctatccgatctcctctctcttctgaccaggaggaaggacttcttggagttcgatctatctcaactcaagtggtgcgtaaccgcatgaagagtgttaagaacatccaaaagatcacaaaggcaatgaagatggttgctgcttccaagcttagagcagttcaaggccgagctgagaactcccgtggactttggcagccatttactgcacttctaggagataatcccagcattgatgtaaagaagagtgtggtggtcactctctcttctgacaagggtctctgtggtggaatcaactccactgtcgttaaagtgagcagggctctgtacaaattgaatgctggtcctgaaaaggaagttcagtttgttattgtcggagagaaagcaaaggctataatgtttcgtgactcaaagaacgacattgtcctctctgtaacagagctgaataagaacccactcaattatgctcaggtgtcagttctagctgatgacatcctgaagaacgttgaatttgatgctttgcgcattgtctacaacaagttccattcagttgtcgcatttctgccaactgtgtccactgttttgtcacctgagattattgagaaggagtctgaaattggaggaaaacttggcgagcttgactcatatgagattgaaggtggggaaacaaagggagaaatattgcagaatctggccgagttccaattctcttgtgtgatgttcaatgcggttctggagaatgcatgtagtgagatgggagcaagaatgtctgccatggacagctcaagcagaaacgcaggagaaatgctcgaccgtctcaccctcacatacaacaggactcgtcaagcttctattacaacagagcttattgagattatctctggagcttctgctcttgaagctgctaaataagcccatccgtgttagttctcttttcttcgctttgatatttacccccaccttgaaggagaagagtgtgttaaaattttactgaatcagtttcctttgctggcttcttgttgagacctaccaatgtttgctcaacgatttttaataaacatacctgtaatttccagcaggatttcgaataattgcattaacattttgttctgattcagactcgcttcctccagagtctgtagtgttgttttgtgcaaacaccatgtactccggtttatttgatatttttttacct

SEQ ID NO: 97846 - protein, 325 aa, Arabidopsis thaliana; identical to SEQ ID NO: 36222
  peptide (1)..(325): Ceres Seq. ID no. 13576394
  misc_feature (43)..(321): Pfam Name: ATP synthase Pfam Description: ATP synthase
  misc_feature (1)..(325): Homolog of NCBI NO: 15227257 NR Description: mitochondrial F1-ATPase, gamma subunit [Arabidopsis thaliana] >gi|3334123|sp|Q96250|ATP3_ARATH ATP gamma chain, mitochondrial precursor >gi|25290513|pir||F84740
  misc_feature (1)..(325): Homolog of NCBI NO: 22530902 NR Description: mitochondrial F1-ATPase, gamma subunit
  misc_feature (3)..(325): Homolog of NCBI NO: 7436158 NR Description: probable H+-transporting two-sector ATPase (EC
  misc_feature (1)..(322): Homolog of NCBI NO: 543867 NR Description: ATP synthase gamma chain, mitochondrial precursor
  misc_feature (180)..(322): Homolog of NCBI NO: 37532654 NR Description: putative ATP SYNTHASE GAMMA CHAIN, MITOCHONDRIAL
  misc_feature (46)..(179): Homolog of NCBI NO: 37532654 NR Description: putative ATP SYNTHASE GAMMA CHAIN, MITOCHONDRIAL
  misc_feature (160)..(322): Homolog of NCBI NO: 7436157 NR Description: probable H+-transporting two-sector ATPase (EC
  misc_feature (44)..(325): Homolog of NCBI NO: 11466530 NR Description: ATP synthase F1 subunit alpha [Reclinomonas
  misc_feature (40)..(321): Homolog of NCBI NO: 38512238 NR Description: Mitochondrial ATP synthase gamma-subunit [Danio
  misc_feature (40)..(322): Homolog of NCBI NO: 543875 NR Description: ATP synthase gamma chain, mitochondrial precursor

SEQ ID NO: 97847 - protein, 323 aa, Arabidopsis thaliana; identical to SEQ ID NO: 36223
  peptide (1)..(323): Ceres Seq. ID no. 13576395
  misc_feature (41)..(319): Pfam Name: ATP synthase Pfam Description: ATP synthase
  misc_feature (1)..(323): Homolog of NCBI NO: 15227257 NR Description: mitochondrial F1-ATPase, gamma subunit [Arabidopsis thaliana] >gi|3334123|sp|Q96250|ATP3_ARATH ATP gamma chain, mitochondrial precursor >gi|25290513|pir||F84740
  misc_feature (1)..(323): Homolog of NCBI NO: 22530902 NR Description: mitochondrial F1-ATPase, gamma subunit
  misc_feature (1)..(323): Homolog of NCBI NO: 7436158 NR Description: probable H+-transporting two-sector ATPase (EC
  misc_feature (1)..(320): Homolog of NCBI NO: 543867 NR Description: ATP synthase gamma chain, mitochondrial precursor
  misc_feature (178)..(320): Homolog of NCBI NO: 37532654 NR Description: putative ATP SYNTHASE GAMMA CHAIN, MITOCHONDRIAL
  misc_feature (44)..(177): Homolog of NCBI NO: 37532654 NR Description: putative ATP SYNTHASE GAMMA CHAIN, MITOCHONDRIAL
  misc_feature (158)..(320): Homolog of NCBI NO: 7436157 NR Description: probable H+-transporting two-sector ATPase (EC
  misc_feature (42)..(323): Homolog of NCBI NO: 11466530 NR Description: ATP synthase F1 subunit alpha [Reclinomonas
  misc_feature (38)..(319): Homolog of NCBI NO: 38512238 NR Description: Mitochondrial ATP synthase gamma-subunit [Danio
  misc_feature (38)..(320): Homolog of NCBI NO: 543875 NR Description: ATP synthase gamma chain, mitochondrial precursor

SEQ ID NO: 97848 - protein, 274 aa, Arabidopsis thaliana; identical to SEQ ID NO: 36224
  peptide (1)..(274): Ceres Seq. ID no. 13576396
  misc_feature (1)..(270): Pfam Name: ATP synthase Pfam Description: ATP synthase
  misc_feature (1)..(274): Homolog of NCBI NO: 15227257 NR Description: mitochondrial F1-ATPase, gamma subunit [Arabidopsis thaliana] >gi|3334123|sp|Q96250|ATP3_ARATH ATP gamma chain, mitochondrial precursor >gi|25290513|pir||F84740
  misc_feature (1)..(274): Homolog of NCBI NO: 22530902 NR Description: mitochondrial F1-ATPase, gamma subunit
  misc_feature (1)..(274): Homolog of NCBI NO: 7436158 NR Description: probable H+-transporting two-sector ATPase (EC
  misc_feature (1)..(271): Homolog of NCBI NO: 543867 NR Description: ATP synthase gamma chain, mitochondrial precursor
  misc_feature (129)..(271): Homolog of NCBI NO: 37532654 NR Description: putative ATP SYNTHASE GAMMA CHAIN, MITOCHONDRIAL
  misc_feature (1)..(128): Homolog of NCBI NO: 37532654 NR Description: putative ATP SYNTHASE GAMMA CHAIN, MITOCHONDRIAL
  misc_feature (109)..(271): Homolog of NCBI NO: 7436157 NR Description: probable H+-transporting two-sector ATPase (EC
  misc_feature (1)..(274): Homolog of NCBI NO: 11466530 NR Description: ATP synthase F1 subunit alpha [Reclinomonas
  misc_feature (1)..(270): Homolog of NCBI NO: 38512238 NR Description: Mitochondrial ATP synthase gamma-subunit [Danio
  misc_feature (1)..(271): Homolog of NCBI NO: 543875 NR Description: ATP synthase gamma chain, mitochondrial precursor

SEQ ID NO: 97849 - DNA, 906 bp, Arabidopsis thaliana
  misc_feature (1)..(906): Ceres Seq. ID no. 13576397
  misc_feature: MA Experiment ID: 108434 Result: Down-regulated in Transcription
  misc_feature: MA Experiment 108434 PARAMETER Experiment Name: At_Root_Tips_cDNA_P Parameter: Tissue Value: Root Tips
  misc_feature: MA Experiment ID: 108462 Result: Up-regulated in Transcription
  misc_feature: MA Experiment 108462 PARAMETER Experiment Name: At_Germinating_Seeds_cDNA_P Parameter: Age (day) Value: 2 vs. 0
  misc_feature: MA Experiment 108462 PARAMETER Experiment Name: At_Germinating_Seeds_cDNA_P Parameter: Tissue Value: Germinating Seeds
  misc_feature: MA Experiment ID: 108463 Result: Up-regulated in Transcription
  misc_feature: MA Experiment 108463 PARAMETER Experiment Name: At_Germinating_Seeds_cDNA_P Parameter: Age (day) Value: 3 vs. 0
  misc_feature: MA Experiment 108463 PARAMETER Experiment Name: At_Germinating_Seeds_cDNA_P Parameter: Tissue Value: Germinating Seeds
  misc_feature: MA Experiment ID: 108464 Result: Up-regulated in Transcription
  misc_feature: MA Experiment 108464 PARAMETER Experiment Name: At_Germinating_Seeds_cDNA_P Parameter: Age (day) Value: 4 vs. 0
  misc_feature: MA Experiment 108464 PARAMETER Experiment Name: At_Germinating_Seeds_cDNA_P Parameter: Tissue Value: Germinating Seeds
  misc_feature: MA Experiment ID: 108501 Result: Down-regulated in Transcription
  misc_feature: MA Experiment 108501 PARAMETER Experiment Name: At_ap2_floral_buds_cDNA_P Parameter: Plant Line Value: ap2 (Ler.)
  misc_feature: MA Experiment 108501 PARAMETER Experiment Name: At_ap2_floral_buds_cDNA_P Parameter: Tissue Value: Closed Flower
  misc_feature: MA Experiment ID: 108577 Result: Down-regulated in Transcription
  misc_feature: MA Experiment 108577 PARAMETER Experiment Name: At_42deg_Heat_cDNA_P Parameter: Temperature (deg C) Value: 42 vs. 22
  misc_feature: MA Experiment 108577 PARAMETER Experiment Name: At_42deg_Heat_cDNA_P Parameter: Timepoint (hr) Value: 6
  misc_feature: MA Experiment 108577 PARAMETER Experiment Name: At_42deg_Heat_cDNA_P Parameter: Tissue Value: Aerial
  misc_feature: MA Experiment ID: 20000111 Result: Down-regulated in Transcription
  misc_feature: MA Experiment 20000111 PARAMETER Experiment Name: At_42deg_Heat_cDNA_P Parameter: Temperature (deg C) Value: 42 vs. 22
  misc_feature: MA Experiment 20000111 PARAMETER Experiment Name: At_42deg_Heat_cDNA_P Parameter: Timepoint (hr) Value: 6
  misc_feature: MA Experiment 20000111 PARAMETER Experiment Name: At_42deg_Heat_cDNA_P Parameter: Tissue Value: Aerial
  misc_feature: MA Experiment ID: 20000234 Result: Down-regulated in Transcription
  misc_feature: MA Experiment 20000234 PARAMETER Experiment Name: At_Siliques_P Parameter: Age (day) Value: 21
  misc_feature: MA Experiment 20000234 PARAMETER Experiment Name: At_Siliques_P Parameter: Organism Value: A. thaliana
  misc_feature: MA Experiment 20000234 PARAMETER Experiment Name: At_Siliques_P Parameter: Plant Line Value: WS
  misc_feature: MA Experiment 20000234 PARAMETER Experiment Name: At_Siliques_P Parameter: Tissue Value: Less Than 5mm Siliques vs. Whole Plant
  misc_feature: MA Experiment ID: 20000235 Result: Down-regulated in Transcription
  misc_feature: MA Experiment 20000235 PARAMETER Experiment Name: At_Siliques_P Parameter: Age (day) Value: 21
  misc_feature: MA Experiment 20000235 PARAMETER Experiment Name: At_Siliques_P Parameter: Organism Value: A. thaliana
  misc_feature: MA Experiment 20000235 PARAMETER Experiment Name: At_Siliques_P Parameter: Plant Line Value: WS
  misc_feature: MA Experiment 20000235 PARAMETER Experiment Name: At_Siliques_P Parameter: Tissue Value: 5-10mm Siliques vs. Whole Plant
  misc_feature: MA Experiment ID: 20001247 Result: Up-regulated in Transcription
  misc_feature: MA Experiment 20001247 PARAMETER Experiment Name: At_Far-red-induction_P Parameter: Age (day) Value: 7
  misc_feature: MA Experiment 20001247 PARAMETER Experiment Name: At_Far-red-induction_P Parameter: Light Value: Far-red vs. White
  misc_feature: MA Experiment 20001247 PARAMETER Experiment Name: At_Far-red-induction_P Parameter: Organism Value: A. thaliana
  misc_feature: MA Experiment 20001247 PARAMETER Experiment Name: At_Far-red-induction_P Parameter: Plant Line Value: Columbia
  misc_feature: MA Experiment 20001247 PARAMETER Experiment Name: At_Far-red-induction_P Parameter: Timepoint (hr) Value: 1
  misc_feature: MA Experiment 20001247 PARAMETER Experiment Name: At_Far-red-induction_P Parameter: Tissue Value: Whole Plant
  misc_feature: MA Experiment ID: 20001248 Result: Up-regulated in Transcription
  misc_feature: MA Experiment 20001248 PARAMETER Experiment Name: At_Far-red-induction_P Parameter: Age (day) Value: 7
  misc_feature: MA Experiment 20001248 PARAMETER Experiment Name: At_Far-red-induction_P Parameter: Light Value: Far-red vs. White
  misc_feature: MA Experiment 20001248 PARAMETER Experiment Name: At_Far-red-induction_P Parameter: Organism Value: A. thaliana
  misc_feature: MA Experiment 20001248 PARAMETER Experiment Name: At_Far-red-induction_P Parameter: Plant Line Value: Columbia
  misc_feature: MA Experiment 20001248 PARAMETER Experiment Name: At_Far-red-induction_P Parameter: Timepoint (hr) Value: 4
  misc_feature: MA Experiment 20001248 PARAMETER Experiment Name: At_Far-red-induction_P Parameter: Tissue Value: Whole Plant
  misc_feature: MA Experiment ID: 20001450 Result: Up-regulated in Transcription
  misc_feature: MA Experiment 20001450 PARAMETER Experiment Name: At_Far-red-induction_P Parameter: Age (day) Value: 7
  misc_feature: MA Experiment 20001450 PARAMETER Experiment Name: At_Far-red-induction_P Parameter: Light Value: Far-red vs. White
  misc_feature: MA Experiment 20001450 PARAMETER Experiment Name: At_Far-red-induction_P Parameter: Organism Value: A. thaliana
  misc_feature: MA Experiment 20001450 PARAMETER Experiment Name: At_Far-red-induction_P Parameter: Plant Line Value: Columbia
  misc_feature: MA Experiment 20001450 PARAMETER Experiment Name: At_Far-red-induction_P Parameter: Timepoint (hr) Value: 8
  misc_feature: MA Experiment 20001450 PARAMETER Experiment Name: At_Far-red-induction_P Parameter: Tissue Value: Whole Plant
  misc_feature: MA Experiment ID: 20001560 Result: Down-regulated in Transcription
  misc_feature: MA Experiment 20001560 PARAMETER Experiment Name: At_Drought_Soil_Dry_P Parameter: Age (day) Value: 28
  misc_feature: MA Experiment 20001560 PARAMETER Experiment Name: At_Drought_Soil_Dry_P Parameter: Organism Value: A. thaliana
  misc_feature: MA Experiment 20001560 PARAMETER Experiment Name: At_Drought_Soil_Dry_P Parameter: Plant Line Value: WS
  misc_feature: MA Experiment 20001560 PARAMETER Experiment Name: At_Drought_Soil_Dry_P Parameter: Post Timepoint (hr) Value: None
  misc_feature: MA Experiment 20001560 PARAMETER Experiment Name: At_Drought_Soil_Dry_P Parameter: Post-Treatment Value: None
  misc_feature: MA Experiment 20001560 PARAMETER Experiment Name: At_Drought_Soil_Dry_P Parameter: Timepoint (day) Value: 14
  misc_feature: MA Experiment 20001560 PARAMETER Experiment Name: At_Drought_Soil_Dry_P Parameter: Treatment Value: Drought vs. No Drought
agcttcgtcaccgaaccttactttatatattagtccttcttcttctcatcttctcgcaacgtaggttctggtgaatgatcctaatccgtttagcttttaaaaaaataagaagacatatttatcaacttgatcaacttgagcaagttgcagcagatattttcctcggccaagatctagagttttgagaatggcgatggtatcaggaagacgatctactctaaaccccgacgcacctctttttattccggcagctgtacgacaagtggaagatttctcaccggagtggtggcaattggtgacaacttcgacttggtaccctgattactggatcagtcagcagcagcaaggcgcggatggtttctatgacaacggagagaatgagaatggtggaggtcatatcgatgtagctgatcttcttccagaatcatttgattttgatgatatggaagatttctttgacactgatgctgctgagtttgatcaaggattcgatggaagaatgtattaccaagcaccttccgaatttggctttggaaagaatggtgagatggttaagaaatcaagtggaaacaggagcccgagatcgattgtggaaccagctaagtatgcggaaaagccagcgaaatggggaaaccagagggttgctgctgctccgagaaacatccaccagcctcgctgaagagatatgttgttaactagtcagagaagtcagagcagttcggtctgtgtatctttagccaccactgtacctttgtaatttttagtatttgcttccacaacaaaaatctgtaactttgtatctttatgatgttcattctcaaacttgctatcacaaaaatgtaaaaacataaaaaaaaaaaaatgtaaactttgaagagaaatgagaactagagtttatttcctacc

SEQ ID NO: 97850 - protein, 163 aa, Arabidopsis thaliana; identical to SEQ ID NO: 20801
  peptide (1)..(163): Ceres Seq. ID no. 13576398
  misc_feature (1)..(163): Homolog of NCBI NO: 15227351 NR Description: ERD15 protein [Arabidopsis thaliana]
  misc_feature (1)..(163): Homolog of NCBI NO: 21592689 NR Description: ERD15 protein [Arabidopsis thaliana]
  misc_feature (1)..(163): Homolog of NCBI NO: 8489786 NR Description: dehydration-induced protein ERD15 [Lycopersicon
  misc_feature (9)..(163): Homolog of NCBI NO: 34395186 NR Description: unknown protein [Oryza sativa (japonica
  misc_feature (9)..(163): Homolog of NCBI NO: 34899128 NR Description: P0496C02.30 [Oryza sativa (japonica
  misc_feature (2)..(82): Homolog of NCBI NO: 18414176 NR Description: expressed protein [Arabidopsis thaliana] unknown protein [Arabidopsis thaliana] unknown protein [Arabidopsis thaliana]
  misc_feature (2)..(58): Homolog of NCBI NO: 21592596 NR Description: unknown [Arabidopsis thaliana]

SEQ ID NO: 97851 - protein, 161 aa, Arabidopsis thaliana; identical to SEQ ID NO: 20802
  peptide (1)..(161): Ceres Seq. ID no. 13576399
  misc_feature (1)..(161): Homolog of NCBI NO: 15227351 NR Description: ERD15 protein [Arabidopsis thaliana]
  misc_feature (1)..(161): Homolog of NCBI NO: 21592689 NR Description: ERD15 protein [Arabidopsis thaliana]
  misc_feature (1)..(161): Homolog of NCBI NO: 8489786 NR Description: dehydration-induced protein ERD15 [Lycopersicon
  misc_feature (7)..(161): Homolog of NCBI NO: 34395186 NR Description: unknown protein [Oryza sativa (japonica
  misc_feature (7)..(161): Homolog of NCBI NO: 34899128 NR Description: P0496C02.30 [Oryza sativa (japonica
  misc_feature (1)..(80): Homolog of NCBI NO: 18414176 NR Description: expressed protein [Arabidopsis thaliana] unknown protein [Arabidopsis thaliana] unknown protein [Arabidopsis thaliana]
  misc_feature (1)..(56): Homolog of NCBI NO: 21592596 NR Description: unknown [Arabidopsis thaliana]

SEQ ID NO: 97852 - protein, 85 aa, Arabidopsis thaliana; identical to SEQ ID NO: 20803
  peptide (1)..(85): Ceres Seq. ID no. 13576400

SEQ ID NO: 97853 - DNA, 957 bp, Arabidopsis thaliana
  misc_feature (1)..(957): Ceres Seq. ID no. 13576401
  misc_feature: MA Experiment ID: 108434 Result: Up-regulated in Transcription
  misc_feature: MA Experiment 108434 PARAMETER Experiment Name: At_Root_Tips_cDNA_P Parameter: Tissue Value: Root Tips
  misc_feature: MA Experiment ID: 108435 Result: Up-regulated in Transcription
  misc_feature: MA Experiment 108435 PARAMETER Experiment Name: At_stm_Mutants_cDNA_P Parameter: Plant Line Value: wt Landsburg vs stm
  misc_feature: MA Experiment 108435 PARAMETER Experiment Name: At_stm_Mutants_cDNA_P Parameter: Tissue Value: Shoot Apical Meristem Region
  misc_feature: MA Experiment ID: 108462 Result: Down-regulated in Transcription
  misc_feature: MA Experiment 108462 PARAMETER Experiment Name: At_Germinating_Seeds_cDNA_P Parameter: Age (day) Value: 2 vs. 0
  misc_feature: MA Experiment 108462 PARAMETER Experiment Name: At_Germinating_Seeds_cDNA_P Parameter: Tissue Value: Germinating Seeds
  misc_feature: MA Experiment ID: 108463 Result: Down-regulated in Transcription
  misc_feature: MA Experiment 108463 PARAMETER Experiment Name: At_Germinating_Seeds_cDNA_P Parameter: Age (day) Value: 3 vs. 0
  misc_feature: MA Experiment 108463 PARAMETER Experiment Name: At_Germinating_Seeds_cDNA_P Parameter: Tissue Value: Germinating Seeds
  misc_feature: MA Experiment ID: 108464 Result: Down-regulated in Transcription
  misc_feature: MA Experiment 108464 PARAMETER Experiment Name: At_Germinating_Seeds_cDNA_P Parameter: Age (day) Value: 4 vs. 0
  misc_feature: MA Experiment 108464 PARAMETER Experiment Name: At_Germinating_Seeds_cDNA_P Parameter: Tissue Value: Germinating Seeds
  misc_feature: MA Experiment ID: 108488 Result: Up-regulated in Transcription
  misc_feature: MA Experiment ID: 108573 Result: Down-regulated in Transcription
  misc_feature: MA Experiment 108573 PARAMETER Experiment Name: At_Drought_cDNA_P Parameter: Timepoint (hr) Value: 6
  misc_feature: MA Experiment 108573 PARAMETER Experiment Name: At_Drought_cDNA_P Parameter: Tissue Value: Aerial
  misc_feature: MA Experiment 108573 PARAMETER Experiment Name: At_Drought_cDNA_P Parameter: Treatment Value: Drought vs. No Drought
  misc_feature: MA Experiment ID: 108595 Result: Down-regulated in Transcription
  misc_feature: MA Experiment 108595 PARAMETER Experiment Name: At_Ler-pi_Ovule_cDNA_P Parameter: Plant Line Value: null
  misc_feature: MA Experiment ID: 20000234 Result: Up-regulated in Transcription
  misc_feature: MA Experiment 20000234 PARAMETER Experiment Name: At_Siliques_P Parameter: Age (day) Value: 21
  misc_feature: MA Experiment 20000234 PARAMETER Experiment Name: At_Siliques_P Parameter: Organism Value: A. thaliana
  misc_feature: MA Experiment 20000234 PARAMETER Experiment Name: At_Siliques_P Parameter: Plant Line Value: WS
  misc_feature: MA Experiment 20000234 PARAMETER Experiment Name: At_Siliques_P Parameter: Tissue Value: Less Than 5mm Siliques vs. Whole Plant
  misc_feature: MA Experiment ID: 20000495 Result: Up-regulated in Transcription
  misc_feature: MA Experiment 20000495 PARAMETER Experiment Name: At_Guard_Cells_P Parameter: Harvest Date Value: 8/2/2002
  misc_feature: MA Experiment 20000495 PARAMETER Experiment Name: At_Guard_Cells_P Parameter: Organism Value: A. thaliana
  misc_feature: MA Experiment 20000495 PARAMETER Experiment Name: At_Guard_Cells_P Parameter: Tissue Value: Guard Cells vs. Leaves
  misc_feature: MA Experiment ID: 20000794 Result: Down-regulated in Transcription
  misc_feature: MA Experiment 20000794 PARAMETER Experiment Name: At_Petals_P Parameter: Age (day) Value: 23-25 days
  misc_feature: MA Experiment 20000794 PARAMETER Experiment Name: At_Petals_P Parameter: Plant Line Value: WS
  misc_feature: MA Experiment 20000794 PARAMETER Experiment Name: At_Petals_P Parameter: Tissue Value: Petals vs. Whole plant
  misc_feature: MA Experiment ID: 20001557 Result: Up-regulated in Transcription
  misc_feature: MA Experiment 20001557 PARAMETER Experiment Name: At_Drought_Soil_Dry_P Parameter: Age (day) Value: 27
  misc_feature: MA Experiment 20001557 PARAMETER Experiment Name: At_Drought_Soil_Dry_P Parameter: Organism Value: A. thaliana
  misc_feature: MA Experiment 20001557 PARAMETER Experiment Name: At_Drought_Soil_Dry_P Parameter: Plant Line Value: WS
  misc_feature: MA Experiment 20001557 PARAMETER Experiment Name: At_Drought_Soil_Dry_P Parameter: Post Timepoint (hr) Value: 3
  misc_feature: MA Experiment 20001557 PARAMETER Experiment Name: At_Drought_Soil_Dry_P Parameter: Post-Treatment Value: Re-Water vs. No Drought
  misc_feature: MA Experiment 20001557 PARAMETER Experiment Name: At_Drought_Soil_Dry_P Parameter: Timepoint (day) Value: 13
  misc_feature: MA Experiment 20001557 PARAMETER Experiment Name: At_Drought_Soil_Dry_P Parameter: Treatment Value: Drought vs. No Drought
  misc_feature: MA Experiment ID: 20001558 Result: Up-regulated in Transcription
  misc_feature: MA Experiment 20001558 PARAMETER Experiment Name: At_Drought_Soil_Dry_P Parameter: Age (day) Value: 27
  misc_feature: MA Experiment 20001558 PARAMETER Experiment Name: At_Drought_Soil_Dry_P Parameter: Organism Value: A. thaliana
  misc_feature: MA Experiment 20001558 PARAMETER Experiment Name: At_Drought_Soil_Dry_P Parameter: Plant Line Value: WS
  misc_feature: MA Experiment 20001558 PARAMETER Experiment Name: At_Drought_Soil_Dry_P Parameter: Post Timepoint (hr) Value: 6
  misc_feature: MA Experiment 20001558 PARAMETER Experiment Name: At_Drought_Soil_Dry_P Parameter: Post-Treatment Value: Re-Water vs. No Drought
  misc_feature: MA Experiment 20001558 PARAMETER Experiment Name: At_Drought_Soil_Dry_P Parameter: Timepoint (day) Value: 13
  misc_feature: MA Experiment 20001558 PARAMETER Experiment Name: At_Drought_Soil_Dry_P Parameter: Treatment Value: Drought vs. No Drought
  misc_feature: MA Experiment ID: 20001560 Result: Up-regulated in Transcription
  misc_feature: MA Experiment 20001560 PARAMETER Experiment Name: At_Drought_Soil_Dry_P Parameter: Age (day) Value: 28
  misc_feature: MA Experiment 20001560 PARAMETER Experiment Name: At_Drought_Soil_Dry_P Parameter: Organism Value: A. thaliana
  misc_feature: MA Experiment 20001560 PARAMETER Experiment Name: At_Drought_Soil_Dry_P Parameter: Plant Line Value: WS
  misc_feature: MA Experiment 20001560 PARAMETER Experiment Name: At_Drought_Soil_Dry_P Parameter: Post Timepoint (hr) Value: None
  misc_feature: MA Experiment 20001560 PARAMETER Experiment Name: At_Drought_Soil_Dry_P Parameter: Post-Treatment Value: None
  misc_feature: MA Experiment 20001560 PARAMETER Experiment Name: At_Drought_Soil_Dry_P Parameter: Timepoint (day) Value: 14
  misc_feature: MA Experiment 20001560 PARAMETER Experiment Name: At_Drought_Soil_Dry_P Parameter: Treatment Value: Drought vs. No Drought
  misc_feature: MA Experiment ID: 20001757 Result: Up-regulated in Transcription
  misc_feature: MA Experiment 20001757 PARAMETER Experiment Name: At_50mM_NH4NO3_L-to-H_P Parameter: Timepoint (hr) Value: 6
  misc_feature: MA Experiment 20001757 PARAMETER Experiment Name: At_50mM_NH4NO3_L-to-H_P Parameter: Tissue Value: Leaf
  misc_feature: MA Experiment 20001757 PARAMETER Experiment Name: At_50mM_NH4NO3_L-to-H_P Parameter: Treatment Value: 50mM NH4NO3 vs 100mM Mannitol
gttttgtcctccttctacgccgcacactatctcttcctctctctcagacgagatttcctcttcatctcaagagaaatggctgaatccaaggtagtggttccagagtctgtgctaaagaagatcaagaggcaagaggaatgggcattggccaagaaagatgaagctgtagctgctaagaagaagagtgttgaggcccgcaagcttatcttcaagagagctgagcagtatgccaaagaatacgctgagaaggataacgagttgatccgattgaagcgggaggctaagttgaaaggaggtttctacgttgaccctgaggctaagttgctctttatcattcgtatccgtggtatcaatgccattgacccaaaaaccaagaagattctgcagctcctgcgtttgagacagatcttcaatggtgtgtttcttaaggtgaacaaggcaacagtaaacatgctgcgccgagttgaaccatacgtgacttacggatacccaaacttgaagagcgttaaggaactgatctacaaaagaggttatggaaagctgaaccaccagaggatagcacttactgacaactccattgtggatcaggctctcggaaagcatgggatcatctgcgttgaggatctcatccacgagatcatgactgttggacctcacttcaaggaagccaacaacttcctgtggccattccaattgaaggcaccactcggtggccttaagaagaagagaaaccactacgtcgaaggtggtgatgctggaaacagggagaatttcatcaacgagcttgtcaggagaatgaattgatgaaagcttccttctttatctttgcaaatttcaaagattttgggaccgagttttttttttttttgttcaagttatcagagacttgtgatcttttatccgagataggctttttatgactaatcatgttattttccaatggcgggcttttaaatt

SEQ ID NO: 97854 - protein, 267 aa, Arabidopsis thaliana
  peptide (1)..(267): Ceres Seq. ID no. 13576402
  misc_feature (107)..(159): Pfam Name: Ribosomal protein L30p/L7e Pfam Description: Ribosomal protein L30p/L7e
  misc_feature (25)..(267): Homolog of NCBI NO: 30689623 NR Description: 60S ribosomal protein L7 (RPL7C) [Arabidopsis >gi|6174958|sp|Q42208|RL7_ARATH 60S ribosomal protein L7
  misc_feature (26)..(267): Homolog of NCBI NO: 30689617 NR Description: 60S ribosomal protein L7 (RPL7C) [Arabidopsis >gi|15450713|gb|AAK96628.1| At2g44120/F6E13.25 [Arabidopsis >gi|17386142|gb|AAL38617.1|AF446884_1 At2g44120/F6E13.25
  misc_feature (26)..(267): Homolog of NCBI NO: 27311547 NR Description: Unknown protein [Arabidopsis thaliana]
  misc_feature (26)..(267): Homolog of NCBI NO: 15226212 NR Description: 60S ribosomal protein L7 (RPL7B) [Arabidopsis
  misc_feature (27)..(267): Homolog of NCBI NO: 15231288 NR Description: 60S ribosomal protein L7 (RPL7D) [Arabidopsis >gi|11994560|dbj|BAB02600.1| 60S ribosomal protein L7 thaliana] >gi|14532552|gb|AAK64004.1| AT3g13580/K20M4_2
  misc_feature (26)..(267): Homolog of NCBI NO: 445613 NR Description: ribosomal protein L7
  misc_feature (22)..(267): Homolog of NCBI NO: 38637548 NR Description: putative 60S ribosomal protein L7 [Oryza sativa
  misc_feature (29)..(267): Homolog of NCBI NO: 38346542 NR Description: OSJNBa0035M09.3 [Oryza sativa (japonica
  misc_feature (33)..(266): Homolog of NCBI NO: 28630259 NR Description: ribosomal protein L7 [Branchiostoma lanceolatum]
  misc_feature (26)..(267): Homolog of NCBI NO: 11383729 NR Description: ribosomal protein L7, cytosolic [validated] - rat
VLSSFYAAHYLFLSLRRDFLFISREMAESKVVVPESVLKKIKRQEEWALAKKDEAVAAKKKSVEARKLIFKRAEQYAKEYAEKDNELIRLKREAKLKGGFYVDPEAKLLFIIRIRGINAIDPKTKKILQLLRLRQIFNGVFLKVNKATVNMLRRVEPYVTYGYPNLKSVKELIYKRGYGKLNHQRIALTDNSIVDQALGKHGIICVEDLIHEIMTVGPHFKEANNFLWPFQLKAPLGGLKKKRNHYVEGGDAGNRENFINELVRRMN

SEQ ID NO: 97855 - protein, 242 aa, Arabidopsis thaliana; identical to SEQ ID NO: 23649
  peptide (1)..(242): Ceres Seq. ID no. 13576403
  misc_feature (82)..(134): Pfam Name: Ribosomal protein L30p/L7e Pfam Description: Ribosomal protein L30p/L7e
  misc_feature (1)..(242): Homolog of NCBI NO: 30689623 NR Description: 60S ribosomal protein L7 (RPL7C) [Arabidopsis >gi|6174958|sp|Q42208|RL7_ARATH 60S ribosomal protein L7
  misc_feature (1)..(242): Homolog of NCBI NO: 30689617 NR Description: 60S ribosomal protein L7 (RPL7C) [Arabidopsis >gi|15450713|gb|AAK96628.1| At2g44120/F6E13.25 [Arabidopsis >gi|17386142|gb|AAL38617.1|AF446884_1 At2g44120/F6E13.25
  misc_feature (1)..(242): Homolog of NCBI NO: 27311547 NR Description: Unknown protein [Arabidopsis thaliana]
  misc_feature (1)..(242): Homolog of NCBI NO: 15226212 NR Description: 60S ribosomal protein L7 (RPL7B) [Arabidopsis
  misc_feature (2)..(242): Homolog of NCBI NO: 15231288 NR Description: 60S ribosomal protein L7 (RPL7D) [Arabidopsis >gi|11994560|dbj|BAB02600.1| 60S ribosomal protein L7 thaliana] >gi|14532552|gb|AAK64004.1| AT3g13580/K20M4_2
  misc_feature (1)..(242): Homolog of NCBI NO: 445613 NR Description: ribosomal protein L7
  misc_feature (1)..(242): Homolog of NCBI NO: 38637548 NR Description: putative 60S ribosomal protein L7 [Oryza sativa
  misc_feature (4)..(242): Homolog of NCBI NO: 38346542 NR Description: OSJNBa0035M09.3 [Oryza sativa (japonica
  misc_feature (8)..(241): Homolog of NCBI NO: 28630259 NR Description: ribosomal protein L7 [Branchiostoma lanceolatum]
  misc_feature (1)..(242): Homolog of NCBI NO: 11383729 NR Description: ribosomal protein L7, cytosolic [validated] - rat

SEQ ID NO: 97856 - DNA, 1524 bp, Arabidopsis thaliana
  misc_feature (1)..(1524): Ceres Seq. ID no. 13576404
  misc_feature: MA Experiment ID: 108434 Result: Up-regulated in Transcription
  misc_feature: MA Experiment 108434 PARAMETER Experiment Name: At_Root_Tips_cDNA_P Parameter: Tissue Value: Root Tips
  misc_feature: MA Experiment ID: 108561 Result: Up-regulated in Transcription
  misc_feature: MA Experiment 108561 PARAMETER Experiment Name: At_100uM_ABA_cDNA_P Parameter: Timepoint (hr) Value: 6
  misc_feature: MA Experiment 108561 PARAMETER Experiment Name: At_100uM_ABA_cDNA_P Parameter: Tissue Value: Aerial
  misc_feature: MA Experiment 108561 PARAMETER Experiment Name: At_100uM_ABA_cDNA_P Parameter: Treatment Value: 100uM ABA vs. No Treatment
  misc_feature: MA Experiment ID: 108572 Result: Up-regulated in Transcription
  misc_feature: MA Experiment 108572 PARAMETER Experiment Name: At_Drought_cDNA_P Parameter: Timepoint (hr) Value: 1
  misc_feature: MA Experiment 108572 PARAMETER Experiment Name: At_Drought_cDNA_P Parameter: Tissue Value: Aerial
  misc_feature: MA Experiment 108572 PARAMETER Experiment Name: At_Drought_cDNA_P Parameter: Treatment Value: Drought vs. No Drought
  misc_feature: MA Experiment ID: 108573 Result: Up-regulated in Transcription
  misc_feature: MA Experiment 108573 PARAMETER Experiment Name: At_Drought_cDNA_P Parameter: Timepoint (hr) Value: 6
  misc_feature: MA Experiment 108573 PARAMETER Experiment Name: At_Drought_cDNA_P Parameter: Tissue Value: Aerial
  misc_feature: MA Experiment 108573 PARAMETER Experiment Name: At_Drought_cDNA_P Parameter: Treatment Value: Drought vs. No Drought
  misc_feature: MA Experiment ID: 108579 Result: Down-regulated in Transcription
  misc_feature: MA Experiment 108579 PARAMETER Experiment Name: At_4deg_Cold_cDNA_P Parameter: Temperature (deg C) Value: 4 vs. 22
  misc_feature: MA Experiment 108579 PARAMETER Experiment Name: At_4deg_Cold_cDNA_P Parameter: Timepoint (hr) Value: 6
  misc_feature: MA Experiment 108579 PARAMETER Experiment Name: At_4deg_Cold_cDNA_P Parameter: Tissue Value: Aerial
  misc_feature: MA Experiment ID: 108605 Result: Up-regulated in Transcription
  misc_feature: MA Experiment 108605 PARAMETER Experiment Name: At_100uM_ABA_cDNA_P Parameter: Timepoint (hr) Value: 6
  misc_feature: MA Experiment 108605 PARAMETER Experiment Name: At_100uM_ABA_cDNA_P Parameter: Tissue Value: Aerial
  misc_feature: MA Experiment 108605 PARAMETER Experiment Name: At_100uM_ABA_cDNA_P Parameter: Treatment Value: 100uM ABA vs. No Treatment
  misc_feature: MA Experiment ID: 108607 Result: Up-regulated in Transcription
  misc_feature: MA Experiment 108607 PARAMETER Experiment Name: At_100uM_ABA_cDNA_P Parameter: Timepoint (hr) Value: 4
  misc_feature: MA Experiment 108607 PARAMETER Experiment Name: At_100uM_ABA_cDNA_P Parameter: Tissue Value: Aerial
  misc_feature: MA Experiment 108607 PARAMETER Experiment Name: At_100uM_ABA_cDNA_P Parameter: Treatment Value: 100uM ABA vs. No Treatment
  misc_feature: MA Experiment ID: 108608 Result: Up-regulated in Transcription
  misc_feature: MA Experiment 108608 PARAMETER Experiment Name: At_100uM_ABA_cDNA_P Parameter: Timepoint (hr) Value: 1
  misc_feature: MA Experiment 108608 PARAMETER Experiment Name: At_100uM_ABA_cDNA_P Parameter: Tissue Value: Aerial
  misc_feature: MA Experiment 108608 PARAMETER Experiment Name: At_100uM_ABA_cDNA_P Parameter: Treatment Value: 100uM ABA vs. No Treatment
  misc_feature: MA Experiment ID: 20000111 Result: Up-regulated in Transcription
  misc_feature: MA Experiment 20000111 PARAMETER Experiment Name: At_42deg_Heat_cDNA_P Parameter: Temperature (deg C) Value: 42 vs. 22
  misc_feature: MA Experiment 20000111 PARAMETER Experiment Name: At_42deg_Heat_cDNA_P Parameter: Timepoint (hr) Value: 6
  misc_feature: MA Experiment 20000111 PARAMETER Experiment Name: At_42deg_Heat_cDNA_P Parameter: Tissue Value: Aerial
  misc_feature: MA Experiment ID: 20000113 Result: Up-regulated in Transcription
  misc_feature: MA Experiment 20000113 PARAMETER Experiment Name: At_42deg_Heat_cDNA_P Parameter: Temperature (deg C) Value: 42 vs. 22
  misc_feature: MA Experiment 20000113 PARAMETER Experiment Name: At_42deg_Heat_cDNA_P Parameter: Timepoint (hr) Value: 8
  misc_feature: MA Experiment 20000113 PARAMETER Experiment Name: At_42deg_Heat_cDNA_P Parameter: Tissue Value: Aerial
  misc_feature: MA Experiment ID: 20000166 Result: Up-regulated in Transcription
  misc_feature: MA Experiment 20000166 PARAMETER Experiment Name: At_100uM_ABA_P Parameter: Age (day) Value: 14
  misc_feature: MA Experiment 20000166 PARAMETER Experiment Name: At_100uM_ABA_P Parameter: Organism Value: A. thaliana
  misc_feature: MA Experiment 20000166 PARAMETER Experiment Name: At_100uM_ABA_P Parameter: Plant Line Value: WS
  misc_feature: MA Experiment 20000166 PARAMETER Experiment Name: At_100uM_ABA_P Parameter: Timepoint (hr) Value: 1
  misc_feature: MA Experiment 20000166 PARAMETER Experiment Name: At_100uM_ABA_P Parameter: Tissue Value: Aerial
  misc_feature: MA Experiment 20000166 PARAMETER Experiment Name: At_100uM_ABA_P Parameter: Treatment Value: 100uM ABA vs. No Treatment
  misc_feature: MA Experiment ID: 20000173 Result: Up-regulated in Transcription
  misc_feature: MA Experiment 20000173 PARAMETER Experiment Name: At_42deg_Heat_P Parameter: Age (day) Value: 14
  misc_feature: MA Experiment 20000173 PARAMETER Experiment Name: At_42deg_Heat_P Parameter: Organism Value: A. thaliana
  misc_feature: MA Experiment 20000173 PARAMETER Experiment Name: At_42deg_Heat_P Parameter: Plant Line Value: WS
  misc_feature: MA Experiment 20000173 PARAMETER Experiment Name: At_42deg_Heat_P Parameter: Temperature (deg C) Value: 42 vs. 22
  misc_feature: MA Experiment 20000173 PARAMETER Experiment Name: At_42deg_Heat_P Parameter: Timepoint (hr) Value: 6
  misc_feature: MA Experiment 20000173 PARAMETER Experiment Name: At_42deg_Heat_P Parameter: Tissue Value: Aerial
  misc_feature: MA Experiment ID: 20000185 Result: Up-regulated in Transcription
  misc_feature: MA Experiment 20000185 PARAMETER Experiment Name: At_Roots__P Parameter: Age (day) Value: 7 vs. 21
  misc_feature: MA Experiment 20000185 PARAMETER Experiment Name: At_Roots__P Parameter: Organism Value: A. thaliana
  misc_feature: MA Experiment 20000185 PARAMETER Experiment Name: At_Roots__P Parameter: Tissue Value: Roots vs. Whole Plant
  misc_feature: MA Experiment ID: 20000227 Result: Up-regulated in Transcription
  misc_feature: MA Experiment 20000227 PARAMETER Experiment Name: At_Root-Tips-vs-Tops_P Parameter: Tissue Value: Root Tips vs. Root Tops
  misc_feature: MA Experiment ID: 20000436 Result: Up-regulated in Transcription
  misc_feature: MA Experiment 20000436 PARAMETER Experiment Name: At_Drought_P Parameter: Age (day) Value: 7
  misc_feature: MA Experiment 20000436 PARAMETER Experiment Name: At_Drought_P Parameter: Organism Value: A. thaliana
  misc_feature: MA Experiment 20000436 PARAMETER Experiment Name: At_Drought_P Parameter: Plant Line Value: WS
  misc_feature: MA Experiment 20000436 PARAMETER Experiment Name: At_Drought_P Parameter: Timepoint (hr) Value: 12
  misc_feature: MA Experiment 20000436 PARAMETER Experiment Name: At_Drought_P Parameter: Tissue Value: Whole Plant
  misc_feature: MA Experiment 20000436 PARAMETER Experiment Name: At_Drought_P Parameter: Treatment Value: Drought vs. No Drought
  misc_feature: MA Experiment ID: 20000441 Result: Up-regulated in Transcription
  misc_feature: MA Experiment 20000441 PARAMETER Experiment Name: At_1uM_BR-BRZ__P Parameter: Tissue Value: Shoot Apices
  misc_feature: MA Experiment 20000441 PARAMETER Experiment Name: At_1uM_BR-BRZ__P Parameter: Treatment Value: 1uM BR vs. No Treatment
  misc_feature: MA Experiment ID: 20000495 Result: Up-regulated in Transcription
  misc_feature: MA Experiment 20000495 PARAMETER Experiment Name: At_Guard_Cells_P Parameter: Harvest Date Value: 8/2/2002
  misc_feature: MA Experiment 20000495 PARAMETER Experiment Name: At_Guard_Cells_P Parameter: Organism Value: A. thaliana
  misc_feature: MA Experiment 20000495 PARAMETER Experiment Name: At_Guard_Cells_P Parameter: Tissue Value: Guard Cells vs. Leaves
  misc_feature: MA Experiment ID: 20001911 Result: Up-regulated in Transcription
  misc_feature: MA Experiment 20001911 PARAMETER Experiment Name: At_Drought_Reproduction_P Parameter: Age (day) Value: 40
  misc_feature: MA Experiment 20001911 PARAMETER Experiment Name: At_Drought_Reproduction_P Parameter: Organism Value: A. thaliana
  misc_feature: MA Experiment 20001911 PARAMETER Experiment Name: At_Drought_Reproduction_P Parameter: Plant Line Value: WS
  misc_feature: MA Experiment 20001911 PARAMETER Experiment Name: At_Drought_Reproduction_P Parameter: Timepoint (day) Value: 10
  misc_feature: MA Experiment 20001911 PARAMETER Experiment Name: At_Drought_Reproduction_P Parameter: Tissue Value: Flowers
  misc_feature: MA Experiment 20001911 PARAMETER Experiment Name: At_Drought_Reproduction_P Parameter: Treatment Value: Drought vs. No Drought
atgtcgaaggagataagagagaaaggggacccaaaaaaagggttaggtggatctctcatgaaatcggtggagctcccccatatcttttttaaatagctttcttcttttggccccttacccagagatagattcttatatactactgagaatcttcaatttctgcaacttttgtatctcttcctgatcaccaaataagaaaactcttgtggttctattgaattgggtttccactatctttattgtagagatggagtcttcaagtccccaccatagtcacattgttgaggttaatgttggaaaatctgatgaagagagaataattgtggcgagtaaagtctgtggagaagcaccatgtgggttttcagattctaagaatgcttccggggatgctcacgaacgctctgcttctatgcggaagctttgtatcgccgtcgtgctgtgtctagtgttcatgagtgttgaagttgttggtgggattaaagccaatagtttagctatattaaccgatgcagctcatttgctctctgacgttgctgcctttgctatctccctcttctcattgtgggctgctggctgggaagcgactcctaggcagacttacgggttcttcaggattgagattttgggtgctcttgtatctatccagctcatttggttgctcacgggtattctggtttatgaagcgattatcagaattgttacagagaccagtgaggttaatggattcctcatgtttctggttgctgcctttggtctagtggtgaacatcataatggctgttctgctagggcatgatcatggtcacagtcatggacatgggcatggccacggccatgaccatcacaatcatagccatggggtgactgttaccactcatcaccatcatcacgatcatgaacatggccatagtcatggtcatggagaggacaagcatcatgctcatggggatgttactgagcaattgttggacaaatcgaagactcaagtcgcagcaaaagagaaaagaaagagaaacatcaatctccaaggagcttatctgcatgtccttggggattccatccagagtgttggtgttatgattggaggagctatcatttggtacaatccggaatggaagatagtggatctgatctgcacacttgccttttcggttattgtcctaggaacaaccatcaacatgattcgcaacattctagaagtattgatggagagtacacccagagagattgacgccacaaagctcgaaaagggtttgctcgaaatggaagaagtggtggctgttcatgagctccacatatgggctatcacagtgggaaaagtgctattggcttgccatgtcaatatcagaccagaagcagatgcagatatggtgctcaacaaggtaattgattacatccgcagggagtacaacattagtcatgtcacgatacaaatcgagcgctaaaagctaagtaagatctgatgaagggtttttgtatcagcattctcattaacaataaaatcaataaagtttctactcgtgcc

SEQ ID NO: 97857 - protein, 398 aa, Arabidopsis thaliana; identical to SEQ ID NO: 43642
  peptide (1)..(398): Ceres Seq. ID no. 13576405
  misc_feature (58)..(398): Pfam Name: Cation efflux family Pfam Description: Cation efflux family
  misc_feature (1)..(398): Homolog of NCBI NO: 15226441 NR Description: zinc transporter of Arabidopsis/metal tolerance (ZAT/MTP1) [Arabidopsis thaliana] >gi|30690511|ref|NP_850459.1| transporter of Arabidopsis/metal tolerance protein (ZAT/MTP1)
  misc_feature (1)..(398): Homolog of NCBI NO: 4206640 NR Description: zinc transporter ZAT [Arabidopsis thaliana]
  misc_feature (1)..(398): Homolog of NCBI NO: 40287446 NR Description: heavy metal transporter MTP1 [Arabis shortii]
  misc_feature (1)..(398): Homolog of NCBI NO: 40287442 NR Description: heavy metal transporter MTP1 [Thlaspi arvense]
  misc_feature (1)..(204): Homolog of NCBI NO: 40287448 NR Description: heavy metal transporter MTP2 [Arabis shortii]
  misc_feature (216)..(398): Homolog of NCBI NO: 40287448 NR Description: heavy metal transporter MTP2 [Arabis shortii]
  misc_feature (1)..(398): Homolog of NCBI NO: 39919138 NR Description: zinc transporter CDF1-3 [Arabidopsis halleri
  misc_feature (1)..(398): Homolog of NCBI NO: 28315876 NR Description: putative vacuolar metal-ion transport protein
  misc_feature (1)..(398): Homolog of NCBI NO: 40287440 NR Description: heavy metal transporter MTP1 [Thlaspi montanum]
  misc_feature (1)..(398): Homolog of NCBI NO: 40287444 NR Description: heavy metal transporter MTP1 [Thlaspi

SEQ ID NO: 97858 - protein, 344 aa, Arabidopsis thaliana; identical to SEQ ID NO: 43643
  peptide (1)..(344): Ceres Seq. ID no. 13576406
  misc_feature (4)..(344): Pfam Name: Cation efflux family Pfam Description: Cation efflux family
  misc_feature (1)..(344): Homolog of NCBI NO: 15226441 NR Description: zinc transporter of Arabidopsis/metal tolerance (ZAT/MTP1) [Arabidopsis thaliana] >gi|30690511|ref|NP_850459.1| transporter of Arabidopsis/metal tolerance protein (ZAT/MTP1)
  misc_feature (1)..(344): Homolog of NCBI NO: 4206640 NR Description: zinc transporter ZAT [Arabidopsis thaliana]
  misc_feature (1)..(344): Homolog of NCBI NO: 40287446 NR Description: heavy metal transporter MTP1 [Arabis shortii]
  misc_feature (1)..(344): Homolog of NCBI NO: 40287442 NR Description: heavy metal transporter MTP1 [Thlaspi arvense]
  misc_feature (1)..(150): Homolog of NCBI NO: 40287448 NR Description: heavy metal transporter MTP2 [Arabis shortii]
  misc_feature (162)..(344): Homolog of NCBI NO: 40287448 NR Description: heavy metal transporter MTP2 [Arabis shortii]
  misc_feature (1)..(344): Homolog of NCBI NO: 39919138 NR Description: zinc transporter CDF1-3 [Arabidopsis halleri
  misc_feature (1)..(344): Homolog of NCBI NO: 28315876 NR Description: putative vacuolar metal-ion transport protein
  misc_feature (1)..(344): Homolog of NCBI NO: 40287440 NR Description: heavy metal transporter MTP1 [Thlaspi montanum]
  misc_feature (1)..(344): Homolog of NCBI NO: 40287444 NR Description: heavy metal transporter MTP1 [Thlaspi

SEQ ID NO: 97859 - protein, 330 aa, Arabidopsis thaliana; identical to SEQ ID NO: 43644
  peptide (1)..(330): Ceres Seq. ID no. 13576407
  misc_feature (1)..(330): Pfam Name: Cation efflux family Pfam Description: Cation efflux family
  misc_feature (1)..(330): Homolog of NCBI NO: 15226441 NR Description: zinc transporter of Arabidopsis/metal tolerance (ZAT/MTP1) [Arabidopsis thaliana] >gi|30690511|ref|NP_850459.1| transporter of Arabidopsis/metal tolerance protein (ZAT/MTP1)
  misc_feature (1)..(330): Homolog of NCBI NO: 4206640 NR Description: zinc transporter ZAT [Arabidopsis thaliana]
  misc_feature (1)..(330): Homolog of NCBI NO: 40287446 NR Description: heavy metal transporter MTP1 [Arabis shortii]
  misc_feature (1)..(330): Homolog of NCBI NO: 40287442 NR Description: heavy metal transporter MTP1 [Thlaspi arvense]
  misc_feature (1)..(136): Homolog of NCBI NO: 40287448 NR Description: heavy metal transporter MTP2 [Arabis shortii]
  misc_feature (148)..(330): Homolog of NCBI NO: 40287448 NR Description: heavy metal transporter MTP2 [Arabis shortii]
  misc_feature (1)..(330): Homolog of NCBI NO: 39919138 NR Description: zinc transporter CDF1-3 [Arabidopsis halleri
  misc_feature (1)..(330): Homolog of NCBI NO: 28315876 NR Description: putative vacuolar metal-ion transport protein
  misc_feature (1)..(330): Homolog of NCBI NO: 40287440 NR Description: heavy metal transporter MTP1 [Thlaspi montanum]
  misc_feature (1)..(330): Homolog of NCBI NO: 40287444 NR Description: heavy metal transporter MTP1 [Thlaspi

SEQ ID NO: 97860 - DNA, 1626 bp, Arabidopsis thaliana
  misc_feature (1)..(1626): Ceres Seq. ID no. 13576408
  misc_feature: MA Experiment ID: 108461 Result: Up-regulated in Transcription
  misc_feature: MA Experiment 108461 PARAMETER Experiment Name: At_Germinating_Seeds_cDNA_P Parameter: Age (day) Value: 1 vs. 0
  misc_feature: MA Experiment 108461 PARAMETER Experiment Name: At_Germinating_Seeds_cDNA_P Parameter: Tissue Value: Germinating Seeds
  misc_feature: MA Experiment ID: 108462 Result: Up-regulated in Transcription
  misc_feature: MA Experiment 108462 PARAMETER Experiment Name: At_Germinating_Seeds_cDNA_P Parameter: Age (day) Value: 2 vs. 0
  misc_feature: MA Experiment 108462 PARAMETER Experiment Name: At_Germinating_Seeds_cDNA_P Parameter: Tissue Value: Germinating Seeds
  misc_feature: MA Experiment ID: 108463 Result: Up-regulated in Transcription
  misc_feature: MA Experiment 108463 PARAMETER Experiment Name: At_Germinating_Seeds_cDNA_P Parameter: Age (day) Value: 3 vs. 0
  misc_feature: MA Experiment 108463 PARAMETER Experiment Name: At_Germinating_Seeds_cDNA_P Parameter: Tissue Value: Germinating Seeds
  misc_feature: MA Experiment ID: 108464 Result: Up-regulated in Transcription
  misc_feature: MA Experiment 108464 PARAMETER Experiment Name: At_Germinating_Seeds_cDNA_P Parameter: Age (day) Value: 4 vs. 0
  misc_feature: MA Experiment 108464 PARAMETER Experiment Name: At_Germinating_Seeds_cDNA_P Parameter: Tissue Value: Germinating Seeds
  misc_feature: MA Experiment ID: 108595 Result: Down-regulated in Transcription
  misc_feature: MA Experiment 108595 PARAMETER Experiment Name: At_Ler-pi_Ovule_cDNA_P Parameter: Plant Line Value: null
  misc_feature: MA Experiment ID: 20000069 Result: Down-regulated in Transcription
  misc_feature: MA Experiment 20000069 PARAMETER Experiment Name: At_100uM_ABA_Mutants_cDNA_P Parameter: Plant Line Value: CS23
  misc_feature: MA Experiment 20000069 PARAMETER Experiment Name: At_100uM_ABA_Mutants_cDNA_P Parameter: Timepoint (hr) Value: 6
  misc_feature: MA Experiment 20000069 PARAMETER Experiment Name: At_100uM_ABA_Mutants_cDNA_P Parameter: Tissue Value: Aerial
  misc_feature: MA Experiment 20000069 PARAMETER Experiment Name: At_100uM_ABA_Mutants_cDNA_P Parameter: Treatment Value: 100uM ABA vs. No Treatment
  misc_feature: MA Experiment ID: 20000070 Result: Down-regulated in Transcription
  misc_feature: MA Experiment 20000070 PARAMETER Experiment Name: At_100uM_ABA_Mutants_cDNA_P Parameter: Plant Line Value: CS24
  misc_feature: MA Experiment 20000070 PARAMETER Experiment Name: At_100uM_ABA_Mutants_cDNA_P Parameter: Timepoint (hr) Value: 6
  misc_feature: MA Experiment 20000070 PARAMETER Experiment Name: At_100uM_ABA_Mutants_cDNA_P Parameter: Tissue Value: Aerial
  misc_feature: MA Experiment 20000070 PARAMETER Experiment Name: At_100uM_ABA_Mutants_cDNA_P Parameter: Treatment Value: 100uM ABA vs. No Treatment
  misc_feature: MA Experiment ID: 20000071 Result: Down-regulated in Transcription
  misc_feature: MA Experiment 20000071 PARAMETER Experiment Name: At_100uM_ABA_Mutants_cDNA_P Parameter: Plant Line Value: CS8104
  misc_feature: MA Experiment 20000071 PARAMETER Experiment Name: At_100uM_ABA_Mutants_cDNA_P Parameter: Timepoint (hr) Value: 6
  misc_feature: MA Experiment 20000071 PARAMETER Experiment Name: At_100uM_ABA_Mutants_cDNA_P Parameter: Tissue Value: Aerial
  misc_feature: MA Experiment 20000071 PARAMETER Experiment Name: At_100uM_ABA_Mutants_cDNA_P Parameter: Treatment Value: 100uM ABA vs. No Treatment
  misc_feature: MA Experiment ID: 20000072 Result: Down-regulated in Transcription
  misc_feature: MA Experiment 20000072 PARAMETER Experiment Name: At_100uM_ABA_Mutants_cDNA_P Parameter: Plant Line Value: CS8105
  misc_feature: MA Experiment 20000072 PARAMETER Experiment Name: At_100uM_ABA_Mutants_cDNA_P Parameter: Timepoint (hr) Value: 6
  misc_feature: MA Experiment 20000072 PARAMETER Experiment Name: At_100uM_ABA_Mutants_cDNA_P Parameter: Tissue Value: Aerial
  misc_feature: MA Experiment 20000072 PARAMETER Experiment Name: At_100uM_ABA_Mutants_cDNA_P Parameter: Treatment Value: 100uM ABA vs. No Treatment
  misc_feature: MA Experiment ID: 20000086 Result: Down-regulated in Transcription
  misc_feature: MA Experiment 20000086 PARAMETER Experiment Name: At_100uM_ABA_Mutants_cDNA_P Parameter: Plant Line Value: CS22
  misc_feature: MA Experiment 20000086 PARAMETER Experiment Name: At_100uM_ABA_Mutants_cDNA_P Parameter: Timepoint (hr) Value: 6
  misc_feature: MA Experiment 20000086 PARAMETER Experiment Name: At_100uM_ABA_Mutants_cDNA_P Parameter: Tissue Value: Aerial
  misc_feature: MA Experiment 20000086 PARAMETER Experiment Name: At_100uM_ABA_Mutants_cDNA_P Parameter: Treatment Value: 100uM ABA vs. No Treatment
  misc_feature: MA Experiment ID: 20000087 Result: Down-regulated in Transcription
  misc_feature: MA Experiment 20000087 PARAMETER Experiment Name: At_100uM_ABA_Mutants_cDNA_P Parameter: Plant Line Value: WS
  misc_feature: MA Experiment 20000087 PARAMETER Experiment Name: At_100uM_ABA_Mutants_cDNA_P Parameter: Timepoint (hr) Value: 6
  misc_feature: MA Experiment 20000087 PARAMETER Experiment Name: At_100uM_ABA_Mutants_cDNA_P Parameter: Tissue Value: Aerial
  misc_feature: MA Experiment 20000087 PARAMETER Experiment Name: At_100uM_ABA_Mutants_cDNA_P Parameter: Treatment Value: 100uM ABA vs. No Treatment
  misc_feature: MA Experiment ID: 20000088 Result: Down-regulated in Transcription
  misc_feature: MA Experiment 20000088 PARAMETER Experiment Name: At_100uM_ABA_Mutants_cDNA_P Parameter: Plant Line Value: Landsberg
  misc_feature: MA Experiment 20000088 PARAMETER Experiment Name: At_100uM_ABA_Mutants_cDNA_P Parameter: Timepoint (hr) Value: 6
  misc_feature: MA Experiment 20000088 PARAMETER Experiment Name: At_100uM_ABA_Mutants_cDNA_P Parameter: Tissue Value: Aerial
  misc_feature: MA Experiment 20000088 PARAMETER Experiment Name: At_100uM_ABA_Mutants_cDNA_P Parameter: Treatment Value: 100uM ABA vs. No Treatment
  misc_feature: MA Experiment ID: 20000089 Result: Down-regulated in Transcription
  misc_feature: MA Experiment ID: 20000090 Result: Down-regulated in Transcription
  misc_feature: MA Experiment ID: 20000117 Result: Down-regulated in Transcription
  misc_feature: MA Experiment 20000117 PARAMETER Experiment Name: At_100uM_ABA_Mutants_cDNA_P Parameter: Plant Line Value: Columbia
  misc_feature: MA Experiment 20000117 PARAMETER Experiment Name: At_100uM_ABA_Mutants_cDNA_P Parameter: Timepoint (hr) Value: 6
  misc_feature: MA Experiment 20000117 PARAMETER Experiment Name: At_100uM_ABA_Mutants_cDNA_P Parameter: Tissue Value: Aerial
  misc_feature: MA Experiment 20000117 PARAMETER Experiment Name: At_100uM_ABA_Mutants_cDNA_P Parameter: Treatment Value: 100uM ABA vs. No Treatment
  misc_feature: MA Experiment ID: 20000234 Result: Up-regulated in Transcription
  misc_feature: MA Experiment 20000234 PARAMETER Experiment Name: At_Siliques_P Parameter: Age (day) Value: 21
  misc_feature: MA Experiment 20000234 PARAMETER Experiment Name: At_Siliques_P Parameter: Organism Value: A. thaliana
  misc_feature: MA Experiment 20000234 PARAMETER Experiment Name: At_Siliques_P Parameter: Plant Line Value: WS
  misc_feature: MA Experiment 20000234 PARAMETER Experiment Name: At_Siliques_P Parameter: Tissue Value: Less Than 5mm Siliques vs. Whole Plant
  misc_feature: MA Experiment ID: 20000264 Result: Up-regulated in Transcription
  misc_feature: MA Experiment 20000264 PARAMETER Experiment Name: At_Open_Flower_P Parameter: Age (day) Value: 21
  misc_feature: MA Experiment 20000264 PARAMETER Experiment Name: At_Open_Flower_P Parameter: Plant Line Value: WS
  misc_feature: MA Experiment 20000264 PARAMETER Experiment Name: At_Open_Flower_P Parameter: Tissue Value: Open Flower vs. Whole Plant
  misc_feature: MA Experiment ID: 20000265 Result: Up-regulated in Transcription
  misc_feature: MA Experiment 20000265 PARAMETER Experiment Name: At_Open_Flower_P Parameter: Age (day) Value: 21
  misc_feature: MA Experiment 20000265 PARAMETER Experiment Name: At_Open_Flower_P Parameter: Plant Line Value: WS
  misc_feature: MA Experiment 20000265 PARAMETER Experiment Name: At_Open_Flower_P Parameter: Tissue Value: Closed Flower vs. Whole Plant
  misc_feature: MA Experiment ID: 20000438 Result: Up-regulated in Transcription
  misc_feature: MA Experiment 20000438 PARAMETER Experiment Name: At_Shoots__P Parameter: Age (day) Value: 14
  misc_feature: MA Experiment 20000438 PARAMETER Experiment Name: At_Shoots__P Parameter: Tissue Value: Shoots vs. Whole Plant
  misc_feature: MA Experiment ID: 20000496 Result: Up-regulated in Transcription
  misc_feature: MA Experiment 20000496 PARAMETER Experiment Name: At_Guard_Cells_P Parameter: Harvest Date Value: 7/19/2002
  misc_feature: MA Experiment 20000496 PARAMETER Experiment Name: At_Guard_Cells_P Parameter: Organism Value: Canola
  misc_feature: MA Experiment 20000496 PARAMETER Experiment Name: At_Guard_Cells_P Parameter: Tissue Value: Guard Cells vs. Leaves
  misc_feature: MA Experiment ID: 20001248 Result: Down-regulated in Transcription
  misc_feature: MA Experiment 20001248 PARAMETER Experiment Name: At_Far-red-induction_P Parameter: Age (day) Value: 7
  misc_feature: MA Experiment 20001248 PARAMETER Experiment Name: At_Far-red-induction_P Parameter: Light Value: Far-red vs. White
  misc_feature: MA Experiment 20001248 PARAMETER Experiment Name: At_Far-red-induction_P Parameter: Organism Value: A. thaliana
  misc_feature: MA Experiment 20001248 PARAMETER Experiment Name: At_Far-red-induction_P Parameter: Plant Line Value: Columbia
  misc_feature: MA Experiment 20001248 PARAMETER Experiment Name: At_Far-red-induction_P Parameter: Timepoint (hr) Value: 4
  misc_feature: MA Experiment 20001248 PARAMETER Experiment Name: At_Far-red-induction_P Parameter: Tissue Value: Whole Plant
  misc_feature: MA Experiment ID: 20001450 Result: Down-regulated in Transcription
  misc_feature: MA Experiment 20001450 PARAMETER Experiment Name: At_Far-red-induction_P Parameter: Age (day) Value: 7
  misc_feature: MA Experiment 20001450 PARAMETER Experiment Name: At_Far-red-induction_P Parameter: Light Value: Far-red vs. White
  misc_feature: MA Experiment 20001450 PARAMETER Experiment Name: At_Far-red-induction_P Parameter: Organism Value: A. thaliana
  misc_feature: MA Experiment 20001450 PARAMETER Experiment Name: At_Far-red-induction_P Parameter: Plant Line Value: Columbia
  misc_feature: MA Experiment 20001450 PARAMETER Experiment Name: At_Far-red-induction_P Parameter: Timepoint (hr) Value: 8
  misc_feature: MA Experiment 20001450 PARAMETER Experiment Name: At_Far-red-induction_P Parameter: Tissue Value: Whole Plant
acctttctgtttacacgattcttcttcttcttcttcttcttctttagatgtcttcttcctccattgtcatctacctctctacacttcattttcttgttggaagaagatcgattaccggtgactcattcttagtgatgacagtataatgtctgatgcttattatcatcatcatcatcatcggagacattcttcctcttcacgtctatggattttaatgccggagttcccatgtcttctctttcacctttgatgaatcaagatgcaatgtggcaaatgaatttgagttcagatgaaacaatggaaactggttcttaccctgaacgaccaggagagcctgattgttcttattacataagaactggtctttgtagatttggctctacttgtcggttcaaccatcctcgtgatcgggaactggttatagctactgcaaggatgagaggagaataccctgaaaggattggtcagcctgaatgcgagtactatttgaagacaggaacctgcaagtttggagtaacatgtaagtttcatcatccaaggaacaaagctgggattgctggaagagtctctctcaatatgttaggctatcctctacgctcgaatgaggttgattgtgcttatttcctaagaaccggacactgtaaatttggtggtacttgtaaattcaaccaccctcagcctcaaccaaccaacatgatggttcctacctcagggcaacagtcttatccttggtcaagagcttcttttattgccagccctcgttggcaagatccgtctagctacgcttccttaatcatgcctcaaggagttgtcccggttcaaggatggaacccttacagtggtcagctcggctcagtttctccttcaggtaccggaaatgatcaaaactacagaaatttacagcagaacgagacaatagagtcaggctctcagtctcaaggatcattctcgggttacaatccgggatcctctgttccgctaggagggtattatgcattgccgagggaaaatgtgttcccggagagaccaggacaacccgaatgccaattctacatgaagacaggtgactgcaaatttggcacagtttgcaaatttcaccatcctagagacagacaagctcctcctcctgattgtctcttaagctccattggcctccccttacgcccgggagaaccgttgtgtgtgttctatacacgctatggaatctgcaaatttggtccaagctgtaaatttgatcacccaatgcgagtattcacatacgacaacacagcttcagagacagatgaggtagtggaaacatcaacagggaaatctagaagactctctgtgtctgaaacaagacaagcagcaacaacatcctctggtaaagacactaccattgataatacacagcagtgaagaaacaaaggaagaagaagaagagcttttaaacaagaagaaaaacaaaagctttttgatttttcaaaagaggaatctgtaaattctcattttcatttagtctctcaagcatttattaataatgtatagaggtgatttatacaactgatcttgatcttgatctgatcgccattgttgtaatattcttttggcgaatcaggttcaataaaattgaaagtaatttccctc

SEQ ID NO: 97861 - protein, 397 aa, Arabidopsis thaliana; identical to SEQ ID NO: 87445
  peptide (1)..(397): Ceres Seq. ID no. 13576409
  misc_feature (275)..(301): Pfam Name: Zinc finger C-x8-C-x5-C-x3-H type (and similar) Pfam Description: Zinc finger C-x8-C-x5-C-x3-H type (and similar)
  misc_feature (1)..(397): Homolog of NCBI NO: 11288371 NR Description: zinc finger protein 1 [imported] - Arabidopsis >gi|4928917|gb|AAD33769.1|AF138743_1 zinc finger protein 1
  misc_feature (1)..(397): Homolog of NCBI NO: 18396338 NR Description: zinc finger protein 1 (zfn1) [Arabidopsis >gi|26451016|dbj|BAC42614.1| putative zinc finger protein 1 zfn1
  misc_feature (21)..(397): Homolog of NCBI NO: 6728979 NR Description: zinc finger protein 1 (zfn1) [Arabidopsis
  misc_feature (18)..(397): Homolog of NCBI NO: 11288368 NR Description: zinc finger protein [imported] - garden pea
  misc_feature (18)..(357): Homolog of NCBI NO: 30690809 NR Description: expressed protein [Arabidopsis thaliana]
  misc_feature (1)..(300): Homolog of NCBI NO: 30685903 NR Description: zinc finger protein 3 (gb|AAD27875.1)
  misc_feature (1)..(300): Homolog of NCBI NO: 22326848 NR Description: zinc finger protein 3 (gb|AAD27875.1) thaliana] >gi|4689376|gb|AAD27875.1|AF138872_1 zinc finger
  misc_feature (30)..(360): Homolog of NCBI NO: 34902926 NR Description: putative zinc finger protein [Oryza sativa
  misc_feature (21)..(300): Homolog of NCBI NO: 21536865 NR Description: zinc finger protein 3 [Arabidopsis thaliana]
  misc_feature (75)..(393): Homolog of NCBI NO: 21536865 NR Description: zinc finger protein 3 [Arabidopsis thaliana]

SEQ ID NO: 97862 - protein, 389 aa, Arabidopsis thaliana; identical to SEQ ID NO: 87446
  peptide (1)..(389): Ceres Seq. ID no. 13576410
  misc_feature (267)..(293): Pfam Name: Zinc finger C-x8-C-x5-C-x3-H type (and similar) Pfam Description: Zinc finger C-x8-C-x5-C-x3-H type (and similar)
  misc_feature (1)..(389): Homolog of NCBI NO: 11288371 NR Description: zinc finger protein 1 [imported] - Arabidopsis >gi|4928917|gb|AAD33769.1|AF138743_1 zinc finger protein 1
  misc_feature (1)..(389): Homolog of NCBI NO: 18396338 NR Description: zinc finger protein 1 (zfn1) [Arabidopsis >gi|26451016|dbj|BAC42614.1| putative zinc finger protein 1 zfn1
  misc_feature (13)..(389): Homolog of NCBI NO: 6728979 NR Description: zinc finger protein 1 (zfn1) [Arabidopsis
  misc_feature (10)..(389): Homolog of NCBI NO: 11288368 NR Description: zinc finger protein [imported] - garden pea
  misc_feature (10)..(349): Homolog of NCBI NO: 30690809 NR Description: expressed protein [Arabidopsis thaliana]
  misc_feature (1)..(292): Homolog of NCBI NO: 30685903 NR Description: zinc finger protein 3 (gb|AAD27875.1)
  misc_feature (1)..(292): Homolog of NCBI NO: 22326848 NR Description: zinc finger protein 3 (gb|AAD27875.1) thaliana] >gi|4689376|gb|AAD27875.1|AF138872_1 zinc finger
  misc_feature (22)..(352): Homolog of NCBI NO: 34902926 NR Description: putative zinc finger protein [Oryza sativa
  misc_feature (13)..(292): Homolog of NCBI NO: 21536865 NR Description: zinc finger protein 3 [Arabidopsis thaliana]
  misc_feature (67)..(385): Homolog of NCBI NO: 21536865 NR Description: zinc finger protein 3 [Arabidopsis thaliana]

SEQ ID NO: 97863 - protein, 382 aa, Arabidopsis thaliana; identical to SEQ ID NO: 87447
  peptide (1)..(382): Ceres Seq. ID no. 13576411
  misc_feature (260)..(286): Pfam Name: Zinc finger C-x8-C-x5-C-x3-H type (and similar) Pfam Description: Zinc finger C-x8-C-x5-C-x3-H type (and similar)
  misc_feature (1)..(382): Homolog of NCBI NO: 11288371 NR Description: zinc finger protein 1 [imported] - Arabidopsis >gi|4928917|gb|AAD33769.1|AF138743_1 zinc finger protein 1
  misc_feature (1)..(382): Homolog of NCBI NO: 18396338 NR Description: zinc finger protein 1 (zfn1) [Arabidopsis >gi|26451016|dbj|BAC42614.1| putative zinc finger protein 1 zfn1
  misc_feature (6)..(382): Homolog of NCBI NO: 6728979 NR Description: zinc finger protein 1 (zfn1) [Arabidopsis
  misc_feature (3)..(382): Homolog of NCBI NO: 11288368 NR Description: zinc finger protein [imported] - garden pea
  misc_feature (3)..(342): Homolog of NCBI NO: 30690809 NR Description: expressed protein [Arabidopsis thaliana]
  misc_feature (1)..(285): Homolog of NCBI NO: 30685903 NR Description: zinc finger protein 3 (gb|AAD27875.1)
  misc_feature (1)..(285): Homolog of NCBI NO: 22326848 NR Description: zinc finger protein 3 (gb|AAD27875.1) thaliana] >gi|4689376|gb|AAD27875.1|AF138872_1 zinc finger
  misc_feature (15)..(345): Homolog of NCBI NO: 34902926 NR Description: putative zinc finger protein [Oryza sativa
  misc_feature (6)..(285): Homolog of NCBI NO: 21536865 NR Description: zinc finger protein 3 [Arabidopsis thaliana]
  misc_feature (60)..(378): Homolog of NCBI NO: 21536865 NR Description: zinc finger protein 3 [Arabidopsis thaliana]

SEQ ID NO: 97864 - DNA, 759 bp, Arabidopsis thaliana
  misc_feature (1)..(759): Ceres Seq. ID no. 13576419
  misc_feature: MA Experiment ID: 108434 Result: Up-regulated in Transcription
  misc_feature: MA Experiment 108434 PARAMETER Experiment Name: At_Root_Tips_cDNA_P Parameter: Tissue Value: Root Tips
  misc_feature: MA Experiment ID: 108462 Result: Down-regulated in Transcription
  misc_feature: MA Experiment 108462 PARAMETER Experiment Name: At_Germinating_Seeds_cDNA_P Parameter: Age (day) Value: 2 vs. 0
  misc_feature: MA Experiment 108462 PARAMETER Experiment Name: At_Germinating_Seeds_cDNA_P Parameter: Tissue Value: Germinating Seeds
  misc_feature: MA Experiment ID: 108463 Result: Down-regulated in Transcription
  misc_feature: MA Experiment 108463 PARAMETER Experiment Name: At_Germinating_Seeds_cDNA_P Parameter: Age (day) Value: 3 vs. 0
  misc_feature: MA Experiment 108463 PARAMETER Experiment Name: At_Germinating_Seeds_cDNA_P Parameter: Tissue Value: Germinating Seeds
  misc_feature: MA Experiment ID: 108464 Result: Down-regulated in Transcription
  misc_feature: MA Experiment 108464 PARAMETER Experiment Name: At_Germinating_Seeds_cDNA_P Parameter: Age (day) Value: 4 vs. 0
  misc_feature: MA Experiment 108464 PARAMETER Experiment Name: At_Germinating_Seeds_cDNA_P Parameter: Tissue Value: Germinating Seeds
  misc_feature: MA Experiment ID: 108561 Result: Down-regulated in Transcription
  misc_feature: MA Experiment 108561 PARAMETER Experiment Name: At_100uM_ABA_cDNA_P Parameter: Timepoint (hr) Value: 6
  misc_feature: MA Experiment 108561 PARAMETER Experiment Name: At_100uM_ABA_cDNA_P Parameter: Tissue Value: Aerial
  misc_feature: MA Experiment 108561 PARAMETER Experiment Name: At_100uM_ABA_cDNA_P Parameter: Treatment Value: 100uM ABA vs. No Treatment
  misc_feature: MA Experiment ID: 108573 Result: Down-regulated in Transcription
  misc_feature: MA Experiment 108573 PARAMETER Experiment Name: At_Drought_cDNA_P Parameter: Timepoint (hr) Value: 6
  misc_feature: MA Experiment 108573 PARAMETER Experiment Name: At_Drought_cDNA_P Parameter: Tissue Value: Aerial
  misc_feature: MA Experiment 108573 PARAMETER Experiment Name: At_Drought_cDNA_P Parameter: Treatment Value: Drought vs. No Drought
  misc_feature: MA Experiment ID: 108576 Result: Down-regulated in Transcription
  misc_feature: MA Experiment 108576 PARAMETER Experiment Name: At_42deg_Heat_cDNA_P Parameter: Temperature (deg C) Value: 42 vs. 22
  misc_feature: MA Experiment 108576 PARAMETER Experiment Name: At_42deg_Heat_cDNA_P Parameter: Timepoint (hr) Value: 1
  misc_feature: MA Experiment 108576 PARAMETER Experiment Name: At_42deg_Heat_cDNA_P Parameter: Tissue Value: Aerial
  misc_feature: MA Experiment ID: 108577 Result: Down-regulated in Transcription
  misc_feature: MA Experiment 108577 PARAMETER Experiment Name: At_42deg_Heat_cDNA_P Parameter: Temperature (deg C) Value: 42 vs. 22
  misc_feature: MA Experiment 108577 PARAMETER Experiment Name: At_42deg_Heat_cDNA_P Parameter: Timepoint (hr) Value: 6
  misc_feature: MA Experiment 108577 PARAMETER Experiment Name: At_42deg_Heat_cDNA_P Parameter: Tissue Value: Aerial
  misc_feature: MA Experiment ID: 108579 Result: Up-regulated in Transcription
  misc_feature: MA Experiment 108579 PARAMETER Experiment Name: At_4deg_Cold_cDNA_P Parameter: Temperature (deg C) Value: 4 vs. 22
  misc_feature: MA Experiment 108579 PARAMETER Experiment Name: At_4deg_Cold_cDNA_P Parameter: Timepoint (hr) Value: 6
  misc_feature: MA Experiment 108579 PARAMETER Experiment Name: At_4deg_Cold_cDNA_P Parameter: Tissue Value: Aerial
  misc_feature: MA Experiment ID: 108585 Result: Down-regulated in Transcription
  misc_feature: MA Experiment 108585 PARAMETER Experiment Name: At_5mM_NaNP_cDNA_P Parameter: Timepoint (hr) Value: 6
  misc_feature: MA Experiment 108585 PARAMETER Experiment Name: At_5mM_NaNP_cDNA_P Parameter: Tissue Value: Aerial
  misc_feature: MA Experiment 108585 PARAMETER Experiment Name: At_5mM_NaNP_cDNA_P Parameter: Treatment Value: null
  misc_feature: MA Experiment ID: 108595 Result: Down-regulated in Transcription
  misc_feature: MA Experiment 108595 PARAMETER Experiment Name: At_Ler-pi_Ovule_cDNA_P Parameter: Plant Line Value: null
  misc_feature: MA Experiment ID: 108609 Result: Down-regulated in Transcription
  misc_feature: MA Experiment 108609 PARAMETER Experiment Name: At_100uM_ABA_cDNA_P Parameter: Timepoint (hr) Value: 24
  misc_feature: MA Experiment 108609 PARAMETER Experiment Name: At_100uM_ABA_cDNA_P Parameter: Tissue Value: Aerial
  misc_feature: MA Experiment 108609 PARAMETER Experiment Name: At_100uM_ABA_cDNA_P Parameter: Treatment Value: 100uM ABA vs. No Treatment
  misc_feature: MA Experiment ID: 20000069 Result: Down-regulated in Transcription
  misc_feature: MA Experiment 20000069 PARAMETER Experiment Name: At_100uM_ABA_Mutants_cDNA_P Parameter: Plant Line Value: CS23
  misc_feature: MA Experiment 20000069 PARAMETER Experiment Name: At_100uM_ABA_Mutants_cDNA_P Parameter: Timepoint (hr) Value: 6
  misc_feature: MA Experiment 20000069 PARAMETER Experiment Name: At_100uM_ABA_Mutants_cDNA_P Parameter: Tissue Value: Aerial
  misc_feature: MA Experiment 20000069 PARAMETER Experiment Name: At_100uM_ABA_Mutants_cDNA_P Parameter: Treatment Value: 100uM ABA vs. No Treatment
  misc_feature: MA Experiment ID: 20000070 Result: Down-regulated in Transcription
  misc_feature: MA Experiment 20000070 PARAMETER Experiment Name: At_100uM_ABA_Mutants_cDNA_P Parameter: Plant Line Value: CS24
  misc_feature: MA Experiment 20000070 PARAMETER Experiment Name: At_100uM_ABA_Mutants_cDNA_P Parameter: Timepoint (hr) Value: 6
  misc_feature: MA Experiment 20000070 PARAMETER Experiment Name: At_100uM_ABA_Mutants_cDNA_P Parameter: Tissue Value: Aerial
  misc_feature: MA Experiment 20000070 PARAMETER Experiment Name: At_100uM_ABA_Mutants_cDNA_P Parameter: Treatment Value: 100uM ABA vs. No Treatment
  misc_feature: MA Experiment ID: 20000071 Result: Down-regulated in Transcription
  misc_feature: MA Experiment 20000071 PARAMETER Experiment Name: At_100uM_ABA_Mutants_cDNA_P Parameter: Plant Line Value: CS8104
  misc_feature: MA Experiment 20000071 PARAMETER Experiment Name: At_100uM_ABA_Mutants_cDNA_P Parameter: Timepoint (hr) Value: 6
  misc_feature: MA Experiment 20000071 PARAMETER Experiment Name: At_100uM_ABA_Mutants_cDNA_P Parameter: Tissue Value: Aerial
  misc_feature: MA Experiment 20000071 PARAMETER Experiment Name: At_100uM_ABA_Mutants_cDNA_P Parameter: Treatment Value: 100uM ABA vs. No Treatment
  misc_feature: MA Experiment ID: 20000087 Result: Down-regulated in Transcription
  misc_feature: MA Experiment 20000087 PARAMETER Experiment Name: At_100uM_ABA_Mutants_cDNA_P Parameter: Plant Line Value: WS
  misc_feature: MA Experiment 20000087 PARAMETER Experiment Name: At_100uM_ABA_Mutants_cDNA_P Parameter: Timepoint (hr) Value: 6
  misc_feature: MA Experiment 20000087 PARAMETER Experiment Name: At_100uM_ABA_Mutants_cDNA_P Parameter: Tissue Value: Aerial
  misc_feature: MA Experiment 20000087 PARAMETER Experiment Name: At_100uM_ABA_Mutants_cDNA_P Parameter: Treatment Value: 100uM ABA vs. No Treatment
  misc_feature: MA Experiment ID: 20000090 Result: Up-regulated in Transcription
  misc_feature: MA Experiment ID: 20000112 Result: Down-regulated in Transcription
  misc_feature: MA Experiment 20000112 PARAMETER Experiment Name: At_42deg_Heat_cDNA_P Parameter: Temperature (deg C) Value: 42 vs. 22
  misc_feature: MA Experiment 20000112 PARAMETER Experiment Name: At_42deg_Heat_cDNA_P Parameter: Timepoint (hr) Value: 2
  misc_feature: MA Experiment 20000112 PARAMETER Experiment Name: At_42deg_Heat_cDNA_P Parameter: Tissue Value: Aerial
  misc_feature: MA Experiment ID: 20000113 Result: Down-regulated in Transcription
  misc_feature: MA Experiment 20000113 PARAMETER Experiment Name: At_42deg_Heat_cDNA_P Parameter: Temperature (deg C) Value: 42 vs. 22
  misc_feature: MA Experiment 20000113 PARAMETER Experiment Name: At_42deg_Heat_cDNA_P Parameter: Timepoint (hr) Value: 8
  misc_feature: MA Experiment 20000113 PARAMETER Experiment Name: At_42deg_Heat_cDNA_P Parameter: Tissue Value: Aerial
  misc_feature: MA Experiment ID: 20000117 Result: Down-regulated in Transcription
  misc_feature: MA Experiment 20000117 PARAMETER Experiment Name: At_100uM_ABA_Mutants_cDNA_P Parameter: Plant Line Value: Columbia
  misc_feature: MA Experiment 20000117 PARAMETER Experiment Name: At_100uM_ABA_Mutants_cDNA_P Parameter: Timepoint (hr) Value: 6
  misc_feature: MA Experiment 20000117 PARAMETER Experiment Name: At_100uM_ABA_Mutants_cDNA_P Parameter: Tissue Value: Aerial
  misc_feature: MA Experiment 20000117 PARAMETER Experiment Name: At_100uM_ABA_Mutants_cDNA_P Parameter: Treatment Value: 100uM ABA vs. No Treatment
  misc_feature: MA Experiment ID: 20000144 Result: Down-regulated in Transcription
  misc_feature: MA Experiment 20000144 PARAMETER Experiment Name: At_42deg_Heat_cDNA_P Parameter: Temperature (deg C) Value: 42 vs. 22
  misc_feature: MA Experiment 20000144 PARAMETER Experiment Name: At_42deg_Heat_cDNA_P Parameter: Timepoint (hr) Value: 1
  misc_feature: MA Experiment 20000144 PARAMETER Experiment Name: At_42deg_Heat_cDNA_P Parameter: Tissue Value: Aerial
  misc_feature: MA Experiment ID: 20001560 Result: Up-regulated in Transcription
  misc_feature: MA Experiment 20001560 PARAMETER Experiment Name: At_Drought_Soil_Dry_P Parameter: Age (day) Value: 28
  misc_feature: MA Experiment 20001560 PARAMETER Experiment Name: At_Drought_Soil_Dry_P Parameter: Organism Value: A. thaliana
  misc_feature: MA Experiment 20001560 PARAMETER Experiment Name: At_Drought_Soil_Dry_P Parameter: Plant Line Value: WS
  misc_feature: MA Experiment 20001560 PARAMETER Experiment Name: At_Drought_Soil_Dry_P Parameter: Post Timepoint (hr) Value: None
  misc_feature: MA Experiment 20001560 PARAMETER Experiment Name: At_Drought_Soil_Dry_P Parameter: Post-Treatment Value: None
  misc_feature: MA Experiment 20001560 PARAMETER Experiment Name: At_Drought_Soil_Dry_P Parameter: Timepoint (day) Value: 14
  misc_feature: MA Experiment 20001560 PARAMETER Experiment Name: At_Drought_Soil_Dry_P Parameter: Treatment Value: Drought vs. No Drought
atcacaacaacaacaattcgacctcaattgaaattagggtttctctgcaactccacaaacagactcttaacaaaacttcgattcccaatttcaacaatggcttgcgtaaacgaaccatcacctaaactccaaaagctcgaccgaaacggaatccatggcgattcatcaccatcaccattcttcaaagtgaagaaactctccgagaaagctgttataccaacacgcggctcaccactctccgctggatacgatctctcaagtgcggtggattcaaaagttccagcgagaggtaaagcgcttatcccaacggatctaagtatcgctgttcccgaaggaacttacgcgagaattgcgccgagatctggtttggcttggaaacattcgattgatgttggtgctggtgtgattgatgctgattatagaggacctgttggtgtgattttgtttaatcattctgatgctgattttgaggttaagttcggtgatcgaatcgcgcagttgattatcgagaagattgtgactcctgatgttgttgaggttgatgatttggatgagactgttcgtggtgatggtggttttggttctactggtgtctaagtgataatcatcttcttcgtttatgaatgtgttttggtttttaatttcgtcgaacagtttgtgggcattattattgtactatctctttgcttcatctttagactattcaaacaaactctcactgttttttttctttgttgggctacaaaatgaatcaattac

SEQ ID NO: 97865 - protein, 198 aa, Arabidopsis thaliana
  peptide (1)..(198): Ceres Seq. ID no. 13576420
  misc_feature (68)..(197): Pfam Name: dUTPase Pfam Description: dUTPase
  misc_feature (33)..(198): Homolog of NCBI NO: 15232681 NR Description: dUTP pyrophosphatase-related protein [Arabidopsis
  misc_feature (36)..(198): Homolog of NCBI NO: 416922 NR Description: Deoxyuridine 5'-triphosphate nucleotidohydrolase (dUTP pyrophosphatase) (P18) >gi|282947|pir||JQ1599 dUTP
  misc_feature (52)..(198): Homolog of NCBI NO: 31126720 NR Description: putative deoxyuridine triphosphatase [Oryza
  misc_feature (54)..(198): Homolog of NCBI NO: 38566986 NR Description: probable dUTP pyrophosphatase [Neurospora crassa]
  misc_feature (61)..(198): Homolog of NCBI NO: 19114785 NR Description: deoxyuridine 5'-triphosphate nucleotidohydrolase
  misc_feature (55)..(197): Homolog of NCBI NO: 40746988 NR Description: hypothetical protein AN0271.2 [Aspergillus
  misc_feature (65)..(198): Homolog of NCBI NO: 19921126 NR Description: CG4584-PA [Drosophila melanogaster]
  misc_feature (65)..(198): Homolog of NCBI NO: 24583610 NR Description: CG4584-PB [Drosophila melanogaster]
  misc_feature (65)..(198): Homolog of NCBI NO: 38047903 NR Description: similar to Drosophila melanogaster BcDNA:LD08534
  misc_feature (62)..(197): Homolog of NCBI NO: 1169437 NR Description: Deoxyuridine 5'-triphosphate nucleotidohydrolase (dUTP pyrophosphatase) >gi|2118161|pir||S51498 dUTP diphosphatase
ITTTTIRPQLKLGFLCNSTNRLLTKLRFPISTMACVNEPSPKLQKLDRNGIHGDSSPSPFFKVKKLSEKAVIPTRGSPLSAGYDLSSAVDSKVPARGKALIPTDLSIAVPEGTYARIAPRSGLAWKHSIDVGAGVIDADYRGPVGVILFNHSDADFEVKFGDRIAQLIIEKIVTPDVVEVDDLDETVRGDGGFGSTGV

SEQ ID NO: 97866 - protein, 166 aa, Arabidopsis thaliana; identical to SEQ ID NO: 30604
  peptide (1)..(166): Ceres Seq. ID no. 13576421
  misc_feature (36)..(165): Pfam Name: dUTPase Pfam Description: dUTPase
  misc_feature (1)..(166): Homolog of NCBI NO: 15232681 NR Description: dUTP pyrophosphatase-related protein [Arabidopsis
  misc_feature (4)..(166): Homolog of NCBI NO: 416922 NR Description: Deoxyuridine 5'-triphosphate nucleotidohydrolase (dUTP pyrophosphatase) (P18) >gi|282947|pir||JQ1599 dUTP
  misc_feature (20)..(166): Homolog of NCBI NO: 31126720 NR Description: putative deoxyuridine triphosphatase [Oryza
  misc_feature (22)..(166): Homolog of NCBI NO: 38566986 NR Description: probable dUTP pyrophosphatase [Neurospora crassa]
  misc_feature (29)..(166): Homolog of NCBI NO: 19114785 NR Description: deoxyuridine 5'-triphosphate nucleotidohydrolase
  misc_feature (23)..(165): Homolog of NCBI NO: 40746988 NR Description: hypothetical protein AN0271.2 [Aspergillus
  misc_feature (33)..(166): Homolog of NCBI NO: 19921126 NR Description: CG4584-PA [Drosophila melanogaster]
  misc_feature (33)..(166): Homolog of NCBI NO: 24583610 NR Description: CG4584-PB [Drosophila melanogaster]
  misc_feature (33)..(166): Homolog of NCBI NO: 38047903 NR Description: similar to Drosophila melanogaster BcDNA:LD08534
  misc_feature (30)..(165): Homolog of NCBI NO: 1169437 NR Description: Deoxyuridine 5'-triphosphate nucleotidohydrolase (dUTP pyrophosphatase) >gi|2118161|pir||S51498 dUTP diphosphatase

SEQ ID NO: 97867 - DNA, 937 bp, Arabidopsis thaliana
  misc_feature (1)..(937): Ceres Seq. ID no. 13576426
  misc_feature: MA Experiment ID: 108434 Result: Up-regulated in Transcription
  misc_feature: MA Experiment 108434 PARAMETER Experiment Name: At_Root_Tips_cDNA_P Parameter: Tissue Value: Root Tips
  misc_feature: MA Experiment ID: 108462 Result: Down-regulated in Transcription
  misc_feature: MA Experiment 108462 PARAMETER Experiment Name: At_Germinating_Seeds_cDNA_P Parameter: Age (day) Value: 2 vs. 0
  misc_feature: MA Experiment 108462 PARAMETER Experiment Name: At_Germinating_Seeds_cDNA_P Parameter: Tissue Value: Germinating Seeds
  misc_feature: MA Experiment ID: 108463 Result: Down-regulated in Transcription
  misc_feature: MA Experiment 108463 PARAMETER Experiment Name: At_Germinating_Seeds_cDNA_P Parameter: Age (day) Value: 3 vs. 0
  misc_feature: MA Experiment 108463 PARAMETER Experiment Name: At_Germinating_Seeds_cDNA_P Parameter: Tissue Value: Germinating Seeds
  misc_feature: MA Experiment ID: 108464 Result: Down-regulated in Transcription
  misc_feature: MA Experiment 108464 PARAMETER Experiment Name: At_Germinating_Seeds_cDNA_P Parameter: Age (day) Value: 4 vs. 0
  misc_feature: MA Experiment 108464 PARAMETER Experiment Name: At_Germinating_Seeds_cDNA_P Parameter: Tissue Value: Germinating Seeds
  misc_feature: MA Experiment ID: 108573 Result: Down-regulated in Transcription
  misc_feature: MA Experiment 108573 PARAMETER Experiment Name: At_Drought_cDNA_P Parameter: Timepoint (hr) Value: 6
  misc_feature: MA Experiment 108573 PARAMETER Experiment Name: At_Drought_cDNA_P Parameter: Tissue Value: Aerial
  misc_feature: MA Experiment 108573 PARAMETER Experiment Name: At_Drought_cDNA_P Parameter: Treatment Value: Drought vs. No Drought
  misc_feature: MA Experiment ID: 108595 Result: Down-regulated in Transcription
  misc_feature: MA Experiment 108595 PARAMETER Experiment Name: At_Ler-pi_Ovule_cDNA_P Parameter: Plant Line Value: null
  misc_feature: MA Experiment ID: 20000071 Result: Down-regulated in Transcription
  misc_feature: MA Experiment 20000071 PARAMETER Experiment Name: At_100uM_ABA_Mutants_cDNA_P Parameter: Plant Line Value: CS8104
  misc_feature: MA Experiment 20000071 PARAMETER Experiment Name: At_100uM_ABA_Mutants_cDNA_P Parameter: Timepoint (hr) Value: 6
  misc_feature: MA Experiment 20000071 PARAMETER Experiment Name: At_100uM_ABA_Mutants_cDNA_P Parameter: Tissue Value: Aerial
  misc_feature: MA Experiment 20000071 PARAMETER Experiment Name: At_100uM_ABA_Mutants_cDNA_P Parameter: Treatment Value: 100uM ABA vs. No Treatment
  misc_feature: MA Experiment ID: 20000072 Result: Down-regulated in Transcription
  misc_feature: MA Experiment 20000072 PARAMETER Experiment Name: At_100uM_ABA_Mutants_cDNA_P Parameter: Plant Line Value: CS8105
  misc_feature: MA Experiment 20000072 PARAMETER Experiment Name: At_100uM_ABA_Mutants_cDNA_P Parameter: Timepoint (hr) Value: 6
  misc_feature: MA Experiment 20000072 PARAMETER Experiment Name: At_100uM_ABA_Mutants_cDNA_P Parameter: Tissue Value: Aerial
  misc_feature: MA Experiment 20000072 PARAMETER Experiment Name: At_100uM_ABA_Mutants_cDNA_P Parameter: Treatment Value: 100uM ABA vs. No Treatment
  misc_feature: MA Experiment ID: 20000087 Result: Down-regulated in Transcription
  misc_feature: MA Experiment 20000087 PARAMETER Experiment Name: At_100uM_ABA_Mutants_cDNA_P Parameter: Plant Line Value: WS
  misc_feature: MA Experiment 20000087 PARAMETER Experiment Name: At_100uM_ABA_Mutants_cDNA_P Parameter: Timepoint (hr) Value: 6
  misc_feature: MA Experiment 20000087 PARAMETER Experiment Name: At_100uM_ABA_Mutants_cDNA_P Parameter: Tissue Value: Aerial
  misc_feature: MA Experiment 20000087 PARAMETER Experiment Name: At_100uM_ABA_Mutants_cDNA_P Parameter: Treatment Value: 100uM ABA vs. No Treatment
  misc_feature: MA Experiment ID: 20000111 Result: Up-regulated in Transcription
  misc_feature: MA Experiment 20000111 PARAMETER Experiment Name: At_42deg_Heat_cDNA_P Parameter: Temperature (deg C) Value: 42 vs. 22
  misc_feature: MA Experiment 20000111 PARAMETER Experiment Name: At_42deg_Heat_cDNA_P Parameter: Timepoint (hr) Value: 6
  misc_feature: MA Experiment 20000111 PARAMETER Experiment Name: At_42deg_Heat_cDNA_P Parameter: Tissue Value: Aerial
  misc_feature: MA Experiment ID: 20000113 Result: Up-regulated in Transcription
  misc_feature: MA Experiment 20000113 PARAMETER Experiment Name: At_42deg_Heat_cDNA_P Parameter: Temperature (deg C) Value: 42 vs. 22
  misc_feature: MA Experiment 20000113 PARAMETER Experiment Name: At_42deg_Heat_cDNA_P Parameter: Timepoint (hr) Value: 8
  misc_feature: MA Experiment 20000113 PARAMETER Experiment Name: At_42deg_Heat_cDNA_P Parameter: Tissue Value: Aerial
  misc_feature: MA Experiment ID: 20000173 Result: Up-regulated in Transcription
  misc_feature: MA Experiment 20000173 PARAMETER Experiment Name: At_42deg_Heat_P Parameter: Age (day) Value: 14
  misc_feature: MA Experiment 20000173 PARAMETER Experiment Name: At_42deg_Heat_P Parameter: Organism Value: A. thaliana
  misc_feature: MA Experiment 20000173 PARAMETER Experiment Name: At_42deg_Heat_P Parameter: Plant Line Value: WS
  misc_feature: MA Experiment 20000173 PARAMETER Experiment Name: At_42deg_Heat_P Parameter: Temperature (deg C) Value: 42 vs. 22
  misc_feature: MA Experiment 20000173 PARAMETER Experiment Name: At_42deg_Heat_P Parameter: Timepoint (hr) Value: 6
  misc_feature: MA Experiment 20000173 PARAMETER Experiment Name: At_42deg_Heat_P Parameter: Tissue Value: Aerial
  misc_feature: MA Experiment ID: 20000437 Result: Down-regulated in Transcription
  misc_feature: MA Experiment 20000437 PARAMETER Experiment Name: At_Drought_P Parameter: Age (day) Value: 8
  misc_feature: MA Experiment 20000437 PARAMETER Experiment Name: At_Drought_P Parameter: Organism Value: A. thaliana
  misc_feature: MA Experiment 20000437 PARAMETER Experiment Name: At_Drought_P Parameter: Plant Line Value: WS
  misc_feature: MA Experiment 20000437 PARAMETER Experiment Name: At_Drought_P Parameter: Timepoint (hr) Value: 24
  misc_feature: MA Experiment 20000437 PARAMETER Experiment Name: At_Drought_P Parameter: Tissue Value: Whole Plant
  misc_feature: MA Experiment 20000437 PARAMETER Experiment Name: At_Drought_P Parameter: Treatment Value: Drought vs. No Drought
  misc_feature: MA Experiment ID: 20000439 Result: Down-regulated in Transcription
  misc_feature: MA Experiment 20000439 PARAMETER Experiment Name: At_Roots__P Parameter: Age (day) Value: 14 vs. 21
  misc_feature: MA Experiment 20000439 PARAMETER Experiment Name: At_Roots__P Parameter: Organism Value: A. thaliana
  misc_feature: MA Experiment 20000439 PARAMETER Experiment Name: At_Roots__P Parameter: Tissue Value: Roots vs. Whole Plant
  misc_feature: MA Experiment ID: 20000573 Result: Down-regulated in Transcription
  misc_feature: MA Experiment 20000573 PARAMETER Experiment Name: At_100uM_ABA_Mutants__P Parameter: Organism Value: A. thaliana
  misc_feature: MA Experiment 20000573 PARAMETER Experiment Name: At_100uM_ABA_Mutants__P Parameter: Plant Line Value: CS22 vs. Ler wt
  misc_feature: MA Experiment 20000573 PARAMETER Experiment Name: At_100uM_ABA_Mutants__P Parameter: Timepoint (hr) Value: N/A
  misc_feature: MA Experiment 20000573 PARAMETER Experiment Name: At_100uM_ABA_Mutants__P Parameter: Tissue Value: Whole Plant
  misc_feature: MA Experiment 20000573 PARAMETER Experiment Name: At_100uM_ABA_Mutants__P Parameter: Treatment Value: None
  misc_feature: MA Experiment ID: 20000574 Result: Down-regulated in Transcription
  misc_feature: MA Experiment 20000574 PARAMETER Experiment Name: At_100uM_ABA_Mutants__P Parameter: Organism Value: A. thaliana
  misc_feature: MA Experiment 20000574 PARAMETER Experiment Name: At_100uM_ABA_Mutants__P Parameter: Plant Line Value: CS23 vs. Ler wt
  misc_feature: MA Experiment 20000574 PARAMETER Experiment Name: At_100uM_ABA_Mutants__P Parameter: Timepoint (hr) Value: N/A
  misc_feature: MA Experiment 20000574 PARAMETER Experiment Name: At_100uM_ABA_Mutants__P Parameter: Tissue Value: Whole Plant
  misc_feature: MA Experiment 20000574 PARAMETER Experiment Name: At_100uM_ABA_Mutants__P Parameter: Treatment Value: None
  misc_feature: MA Experiment ID: 20000794 Result: Down-regulated in Transcription
  misc_feature: MA Experiment 20000794 PARAMETER Experiment Name: At_Petals_P Parameter: Age (day) Value: 23-25 days
  misc_feature: MA Experiment 20000794 PARAMETER Experiment Name: At_Petals_P Parameter: Plant Line Value: WS
  misc_feature: MA Experiment 20000794 PARAMETER Experiment Name: At_Petals_P Parameter: Tissue Value: Petals vs. Whole plant
  misc_feature: MA Experiment ID: 20001248 Result: Down-regulated in Transcription
  misc_feature: MA Experiment 20001248 PARAMETER Experiment Name: At_Far-red-induction_P Parameter: Age (day) Value: 7
  misc_feature: MA Experiment 20001248 PARAMETER Experiment Name: At_Far-red-induction_P Parameter: Light Value: Far-red vs. White
  misc_feature: MA Experiment 20001248 PARAMETER Experiment Name: At_Far-red-induction_P Parameter: Organism Value: A. thaliana
  misc_feature: MA Experiment 20001248 PARAMETER Experiment Name: At_Far-red-induction_P Parameter: Plant Line Value: Columbia
  misc_feature: MA Experiment 20001248 PARAMETER Experiment Name: At_Far-red-induction_P Parameter: Timepoint (hr) Value: 4
  misc_feature: MA Experiment 20001248 PARAMETER Experiment Name: At_Far-red-induction_P Parameter: Tissue Value: Whole Plant
  misc_feature: MA Experiment ID: 20001558 Result: Up-regulated in Transcription
  misc_feature: MA Experiment 20001558 PARAMETER Experiment Name: At_Drought_Soil_Dry_P Parameter: Age (day) Value: 27
  misc_feature: MA Experiment 20001558 PARAMETER Experiment Name: At_Drought_Soil_Dry_P Parameter: Organism Value: A. thaliana
  misc_feature: MA Experiment 20001558 PARAMETER Experiment Name: At_Drought_Soil_Dry_P Parameter: Plant Line Value: WS
  misc_feature: MA Experiment 20001558 PARAMETER Experiment Name: At_Drought_Soil_Dry_P Parameter: Post Timepoint (hr) Value: 6
  misc_feature: MA Experiment 20001558 PARAMETER Experiment Name: At_Drought_Soil_Dry_P Parameter: Post-Treatment Value: Re-Water vs. No Drought
  misc_feature: MA Experiment 20001558 PARAMETER Experiment Name: At_Drought_Soil_Dry_P Parameter: Timepoint (day) Value: 13
  misc_feature: MA Experiment 20001558 PARAMETER Experiment Name: At_Drought_Soil_Dry_P Parameter: Treatment Value: Drought vs. No Drought
  misc_feature: MA Experiment ID: 20001560 Result: Up-regulated in Transcription
  misc_feature: MA Experiment 20001560 PARAMETER Experiment Name: At_Drought_Soil_Dry_P Parameter: Age (day) Value: 28
  misc_feature: MA Experiment 20001560 PARAMETER Experiment Name: At_Drought_Soil_Dry_P Parameter: Organism Value: A. thaliana
  misc_feature: MA Experiment 20001560 PARAMETER Experiment Name: At_Drought_Soil_Dry_P Parameter: Plant Line Value: WS
  misc_feature: MA Experiment 20001560 PARAMETER Experiment Name: At_Drought_Soil_Dry_P Parameter: Post Timepoint (hr) Value: None
  misc_feature: MA Experiment 20001560 PARAMETER Experiment Name: At_Drought_Soil_Dry_P Parameter: Post-Treatment Value: None
  misc_feature: MA Experiment 20001560 PARAMETER Experiment Name: At_Drought_Soil_Dry_P Parameter: Timepoint (day) Value: 14
  misc_feature: MA Experiment 20001560 PARAMETER Experiment Name: At_Drought_Soil_Dry_P Parameter: Treatment Value: Drought vs. No Drought
acagtcgtcactcaccacctcaccgttccttatccatttggctgacgcaaaatcgaatcggaaccctaaaatctctccgaaagccatgtctcctcctcctgctgtagtcactgaatctgccgatggacaacctgagcaaccaccggttaccgccattgctgaagagctggagaaaaagcttcagactgatgaaccgattgtagaagatgttaaagatgatgaagacgatgatgatgatgacgaagaagaggaagacgacgatgctcaaggtgtaagtggaagttcaaagcagagtagaagtgaaaagaagagtaggaaggcgatgttgaagctcggtatgaaacctgtcactggtgttagtcgagtaaccatcaagagaacgaaaaacgttctcttctttatctctaagcctgatgtctttaagagcccgcattcagaaacctatgttatattcggtgaggccaagatcgaggatttgagctctcagcttcaaacgcaagctgctcaacagtttaggatgcctgaaattggagccacatctcagagagcagaggcatcgacagccactgtagaagcacaggtggaagaagatgaagaggaaatcgatgagaccggtgtggaggctcgtgacattgacttggtcatgactcaggctggagtttctcgtagcaaagcggttaaagcactcaagagtcacgatggagacattgtaagtgcaataatggaactcactacttgagagttaagagagattgagtctctatgctttattcacttgcagattgttttcaaatacttttggatttatcaggaaattggattattgttgtccttacgagtatctaatctagtttgtttgttatgatgcttatgcagtatctgagttgtactctgtttttcacgacaatgtattggagaaaatacatatcaaaattcg

SEQ ID NO: 97868 - protein, 245 aa, Arabidopsis thaliana
  peptide (1)..(245): Ceres Seq. ID no. 13576427
  misc_feature (99)..(158): Pfam Name: NAC domain Pfam Description: NAC domain
  misc_feature (29)..(245): Homolog of NCBI NO: 15229149 NR Description: alpha NAC-related protein [Arabidopsis thaliana]
  misc_feature (29)..(245): Homolog of NCBI NO: 13899101 NR Description: alpha NAC-like protein [Arabidopsis thaliana]
  misc_feature (33)..(245): Homolog of NCBI NO: 15235122 NR Description: alpha NAC -related [Arabidopsis thaliana]
  misc_feature (33)..(244): Homolog of NCBI NO: 34902238 NR Description: Putative nascent polypeptide associated complex
  misc_feature (90)..(245): Homolog of NCBI NO: 4115918 NR Description: similar to nascent polypeptide associated complex
  misc_feature (33)..(91): Homolog of NCBI NO: 4115918 NR Description: similar to nascent polypeptide associated complex
  misc_feature (45)..(245): Homolog of NCBI NO: 15230476 NR Description: nascent polypeptide associated complex alpha -related [Arabidopsis thaliana] nascent polypeptide associated complex alpha chain, putative;
  misc_feature (43)..(245): Homolog of NCBI NO: 18398710 NR Description: expressed protein [Arabidopsis thaliana]
  misc_feature (43)..(245): Homolog of NCBI NO: 21536597 NR Description: putative alpha NAC [Arabidopsis thaliana]
  misc_feature (45)..(245): Homolog of NCBI NO: 6752882 NR Description: nascent polypeptide associated complex alpha
QSSLTTSPFLIHLADAKSNRNPKISPKAMSPPPAVVTESADGQPEQPPVTAIAEELEKKLQTDEPIVEDVKDDEDDDDDDEEEEDDDAQGVSGSSKQSRSEKKSRKAMLKLGMKPVTGVSRVTIKRTKNVLFFISKPDVFKSPHSETYVIFGEAKIEDLSSQLQTQAAQQFRMPEIGATSQRAEASTATVEAQVEEDEEEIDETGVEARDIDLVMTQAGVSRSKAVKALKSHDGDIVSAIMELTT

SEQ ID NO: 97869 - protein, 217 aa, Arabidopsis thaliana
  peptide (1)..(217): Ceres Seq. ID no. 13576428
  misc_feature (71)..(130): Pfam Name: NAC domain Pfam Description: NAC domain
  misc_feature (1)..(217): Homolog of NCBI NO: 15229149 NR Description: alpha NAC-related protein [Arabidopsis thaliana]
  misc_feature (1)..(217): Homolog of NCBI NO: 13899101 NR Description: alpha NAC-like protein [Arabidopsis thaliana]
  misc_feature (5)..(217): Homolog of NCBI NO: 15235122 NR Description: alpha NAC -related [Arabidopsis thaliana]
  misc_feature (5)..(216): Homolog of NCBI NO: 34902238 NR Description: Putative nascent polypeptide associated complex
  misc_feature (62)..(217): Homolog of NCBI NO: 4115918 NR Description: similar to nascent polypeptide associated complex
  misc_feature (5)..(63): Homolog of NCBI NO: 4115918 NR Description: similar to nascent polypeptide associated complex
  misc_feature (17)..(217): Homolog of NCBI NO: 15230476 NR Description: nascent polypeptide associated complex alpha -related [Arabidopsis thaliana] nascent polypeptide associated complex alpha chain, putative;
  misc_feature (15)..(217): Homolog of NCBI NO: 18398710 NR Description: expressed protein [Arabidopsis thaliana]
  misc_feature (15)..(217): Homolog of NCBI NO: 21536597 NR Description: putative alpha NAC [Arabidopsis thaliana]
  misc_feature (17)..(217): Homolog of NCBI NO: 6752882 NR Description: nascent polypeptide associated complex alpha
MSPPPAVVTESADGQPEQPPVTAIAEELEKKLQTDEPIVEDVKDDEDDDDDDEEEEDDDAQGVSGSSKQSRSEKKSRKAMLKLGMKPVTGVSRVTIKRTKNVLFFISKPDVFKSPHSETYVIFGEAKIEDLSSQLQTQAAQQFRMPEIGATSQRAEASTATVEAQVEEDEEEIDETGVEARDIDLVMTQAGVSRSKAVKALKSHDGDIVSAIMELTT

SEQ ID NO: 97870 - protein, 138 aa, Arabidopsis thaliana
  peptide (1)..(138): Ceres Seq. ID no. 13576429
  misc_feature (1)..(51): Pfam Name: NAC domain Pfam Description: NAC domain
  misc_feature (1)..(138): Homolog of NCBI NO: 15229149 NR Description: alpha NAC-related protein [Arabidopsis thaliana]
  misc_feature (1)..(138): Homolog of NCBI NO: 13899101 NR Description: alpha NAC-like protein [Arabidopsis thaliana]
  misc_feature (1)..(138): Homolog of NCBI NO: 15235122 NR Description: alpha NAC -related [Arabidopsis thaliana]
  misc_feature (1)..(137): Homolog of NCBI NO: 34902238 NR Description: Putative nascent polypeptide associated complex
  misc_feature (1)..(138): Homolog of NCBI NO: 4115918 NR Description: similar to nascent polypeptide associated complex
  misc_feature (1)..(138): Homolog of NCBI NO: 15230476 NR Description: nascent polypeptide associated complex alpha -related [Arabidopsis thaliana] nascent polypeptide associated complex alpha chain, putative;
  misc_feature (1)..(138): Homolog of NCBI NO: 18398710 NR Description: expressed protein [Arabidopsis thaliana]
  misc_feature (1)..(138): Homolog of NCBI NO: 21536597 NR Description: putative alpha NAC [Arabidopsis thaliana]
  misc_feature (1)..(138): Homolog of NCBI NO: 6752882 NR Description: nascent polypeptide associated complex alpha
  misc_feature (1)..(137): Homolog of NCBI NO: 34907258 NR Description: putative nascent polypeptide associated complex
MLKLGMKPVTGVSRVTIKRTKNVLFFISKPDVFKSPHSETYVIFGEAKIEDLSSQLQTQAAQQFRMPEIGATSQRAEASTATVEAQVEEDEEEIDETGVEARDIDLVMTQAGVSRSKAVKALKSHDGDIVSAIMELTT

SEQ ID NO: 97871 - DNA, 1222 bp, Arabidopsis thaliana
  misc_feature (1)..(1222): Ceres Seq. ID no. 13576448
  misc_feature: MA Experiment ID: 20000184 Result: Down-regulated in Transcription
  misc_feature: MA Experiment 20000184 PARAMETER Experiment Name: At_Shoots__P Parameter: Age (day) Value: 7
  misc_feature: MA Experiment 20000184 PARAMETER Experiment Name: At_Shoots__P Parameter: Tissue Value: Shoots vs. Whole Plant
  misc_feature: MA Experiment ID: 20000234 Result: Up-regulated in Transcription
  misc_feature: MA Experiment 20000234 PARAMETER Experiment Name: At_Siliques_P Parameter: Age (day) Value: 21
  misc_feature: MA Experiment 20000234 PARAMETER Experiment Name: At_Siliques_P Parameter: Organism Value: A. thaliana
  misc_feature: MA Experiment 20000234 PARAMETER Experiment Name: At_Siliques_P Parameter: Plant Line Value: WS
  misc_feature: MA Experiment 20000234 PARAMETER Experiment Name: At_Siliques_P Parameter: Tissue Value: Less Than 5mm Siliques vs. Whole Plant
  misc_feature: MA Experiment ID: 20000264 Result: Up-regulated in Transcription
  misc_feature: MA Experiment 20000264 PARAMETER Experiment Name: At_Open_Flower_P Parameter: Age (day) Value: 21
  misc_feature: MA Experiment 20000264 PARAMETER Experiment Name: At_Open_Flower_P Parameter: Plant Line Value: WS
  misc_feature: MA Experiment 20000264 PARAMETER Experiment Name: At_Open_Flower_P Parameter: Tissue Value: Open Flower vs. Whole Plant
  misc_feature: MA Experiment ID: 20000265 Result: Up-regulated in Transcription
  misc_feature: MA Experiment 20000265 PARAMETER Experiment Name: At_Open_Flower_P Parameter: Age (day) Value: 21
  misc_feature: MA Experiment 20000265 PARAMETER Experiment Name: At_Open_Flower_P Parameter: Plant Line Value: WS
  misc_feature: MA Experiment 20000265 PARAMETER Experiment Name: At_Open_Flower_P Parameter: Tissue Value: Closed Flower vs. Whole Plant
  misc_feature: MA Experiment ID: 20000286 Result: Up-regulated in Transcription
  misc_feature: MA Experiment 20000286 PARAMETER Experiment Name: At_Open_Flower_P Parameter: Age (day) Value: 21
  misc_feature: MA Experiment 20000286 PARAMETER Experiment Name: At_Open_Flower_P Parameter: Plant Line Value: WS
  misc_feature: MA Experiment 20000286 PARAMETER Experiment Name: At_Open_Flower_P Parameter: Tissue Value: Half Open vs. Whole Plant
  misc_feature: MA Experiment ID: 20000439 Result: Down-regulated in Transcription
  misc_feature: MA Experiment 20000439 PARAMETER Experiment Name: At_Roots__P Parameter: Age (day) Value: 14 vs. 21
  misc_feature: MA Experiment 20000439 PARAMETER Experiment Name: At_Roots__P Parameter: Organism Value: A. thaliana
  misc_feature: MA Experiment 20000439 PARAMETER Experiment Name: At_Roots__P Parameter: Tissue Value: Roots vs. Whole Plant
  misc_feature: MA Experiment ID: 20000495 Result: Up-regulated in Transcription
  misc_feature: MA Experiment 20000495 PARAMETER Experiment Name: At_Guard_Cells_P Parameter: Harvest Date Value: 8/2/2002
  misc_feature: MA Experiment 20000495 PARAMETER Experiment Name: At_Guard_Cells_P Parameter: Organism Value: A. thaliana
  misc_feature: MA Experiment 20000495 PARAMETER Experiment Name: At_Guard_Cells_P Parameter: Tissue Value: Guard Cells vs. Leaves
  misc_feature: MA Experiment ID: 20000794 Result: Up-regulated in Transcription
  misc_feature: MA Experiment 20000794 PARAMETER Experiment Name: At_Petals_P Parameter: Age (day) Value: 23-25 days
  misc_feature: MA Experiment 20000794 PARAMETER Experiment Name: At_Petals_P Parameter: Plant Line Value: WS
  misc_feature: MA Experiment 20000794 PARAMETER Experiment Name: At_Petals_P Parameter: Tissue Value: Petals vs. Whole plant
  misc_feature: MA Experiment ID: 20001757 Result: Down-regulated in Transcription
  misc_feature: MA Experiment 20001757 PARAMETER Experiment Name: At_50mM_NH4NO3_L-to-H_P Parameter: Timepoint (hr) Value: 6
  misc_feature: MA Experiment 20001757 PARAMETER Experiment Name: At_50mM_NH4NO3_L-to-H_P Parameter: Tissue Value: Leaf
  misc_feature: MA Experiment 20001757 PARAMETER Experiment Name: At_50mM_NH4NO3_L-to-H_P Parameter: Treatment Value: 50mM NH4NO3 vs 100mM Mannitol
  misc_feature: MA Experiment ID: 20001905 Result: Up-regulated in Transcription
  misc_feature: MA Experiment 20001905 PARAMETER Experiment Name: At_Drought_Reproduction_P Parameter: Age (day) Value: 40
  misc_feature: MA Experiment 20001905 PARAMETER Experiment Name: At_Drought_Reproduction_P Parameter: Organism Value: A. thaliana
  misc_feature: MA Experiment 20001905 PARAMETER Experiment Name: At_Drought_Reproduction_P Parameter: Plant Line Value: WS
  misc_feature: MA Experiment 20001905 PARAMETER Experiment Name: At_Drought_Reproduction_P Parameter: Timepoint (day) Value: 10
  misc_feature: MA Experiment 20001905 PARAMETER Experiment Name: At_Drought_Reproduction_P Parameter: Tissue Value: Rosettes
  misc_feature: MA Experiment 20001905 PARAMETER Experiment Name: At_Drought_Reproduction_P Parameter: Treatment Value: Drought vs. No Drought
attgcccaaaaagaaacagaaacttttctccgagaatcctcatttctccgttgaaaaaaggaccttgagaggaaatgtttcactgtttctagggttcttataatccacttcctcatcattagagaatggaaaatctcctcttctctttgatatttcttcggatttcgcttatgtcctgaatctcttgaagacccaattgaaaaaatctcaactttttttctcccggcgtttccggcgatatacaatgcggattctcgtgaatctcattctcttctccttgattcctctggcgttctccaatgaaaactccagctcgtatctcattgcgcgaccattgatcttcgaaacccagctcaagaacataaacgacaatgtcaatctacattgcacgagctggagattcgcggcggagacaaacaatctcgctccatggaaaaccattccagctgaatgcgccgattacgtgaaagattacctgatgggtgaaggttacgtcgtcgatgtggagagagtctccgaagaagctaaggtttacgcgagcagcttcgaatctaacggtgacgggaaagacatttggattttcgatattgatgagacgttattgtcgaatcttccttattacatggaacacggttgtgggttggaagtttttgatcattcaaagtttgatatgtgggtagagaaagggatagcacctgctatagcaccaagcttgaagctttaccaaaaggttatacatttggggtacaaagttatcttgcttacagggcgtagagagaaccaccgggttatcactgtcgaaaacctgcgcaatgccggtttccataactgggacaagcttattctgagatcgttggatgatcggaacaaaacagcgaccatgtacaagtcagagaagagagaggagatggtgaaagaagggtataggatcagaggcaattcaggtgaccaatggagtgatttgttgggttctgcaatgtcagaaagatccttcaaacttccaaatccaatgtattatatcccctgaaggggatcaactagaatcaggaggcaattcaggttactaaatggagcaacctactgtttttgaagtttgggttgccatgtaatcacttgcaataaatatatgtactaatgactgcatcggcttgcgtgtctaaatttgtagcttattgaaaactttttgtggttaaagacgaatccagttaactaacataagttt

SEQ ID NO: 97872 - protein, 260 aa, Arabidopsis thaliana; identical to SEQ ID NO: 21236
  peptide (1)..(260): Ceres Seq. ID no. 13576449
  misc_feature (32)..(260): Pfam Name: HAD superfamily, subfamily IIIB (Acid phosphatase) Pfam Description: HAD superfamily, subfamily IIIB (Acid
  misc_feature (1)..(260): Homolog of NCBI NO: 15234949 NR Description: acid phosphatase - like protein [Arabidopsis
  misc_feature (1)..(260): Homolog of NCBI NO: 15241412 NR Description: acid phosphatase [Arabidopsis thaliana]
  misc_feature (1)..(259): Homolog of NCBI NO: 445113 NR Description: acid phosphatase 1
  misc_feature (1)..(259): Homolog of NCBI NO: 130718 NR Description: Acid phosphatase precursor 1
  misc_feature (47)..(260): Homolog of NCBI NO: 15233504 NR Description: acid phosphatase-related protein [Arabidopsis
  misc_feature (37)..(259): Homolog of NCBI NO: 15233526 NR Description: acid phosphatase-related protein [Arabidopsis
  misc_feature (53)..(226): Homolog of NCBI NO: 7705154 NR Description: acid phosphatase-1(1); Apase-1(1) [Lycopersicon

SEQ ID NO: 97873 - protein, 182 aa, Arabidopsis thaliana; identical to SEQ ID NO: 21237
  peptide (1)..(182): Ceres Seq. ID no. 13576450
  misc_feature (1)..(182): Pfam Name: HAD superfamily, subfamily IIIB (Acid phosphatase) Pfam Description: HAD superfamily, subfamily IIIB (Acid
  misc_feature (1)..(182): Homolog of NCBI NO: 15234949 NR Description: acid phosphatase - like protein [Arabidopsis
  misc_feature (1)..(182): Homolog of NCBI NO: 15241412 NR Description: acid phosphatase [Arabidopsis thaliana]
  misc_feature (1)..(181): Homolog of NCBI NO: 445113 NR Description: acid phosphatase 1
  misc_feature (1)..(181): Homolog of NCBI NO: 130718 NR Description: Acid phosphatase precursor 1
  misc_feature (1)..(182): Homolog of NCBI NO: 15233504 NR Description: acid phosphatase-related protein [Arabidopsis
  misc_feature (1)..(181): Homolog of NCBI NO: 15233526 NR Description: acid phosphatase-related protein [Arabidopsis
  misc_feature (1)..(148): Homolog of NCBI NO: 7705154 NR Description: acid phosphatase-1(1); Apase-1(1) [Lycopersicon

SEQ ID NO: 97874 - protein, 134 aa, Arabidopsis thaliana; identical to SEQ ID NO: 21238
  peptide (1)..(134): Ceres Seq. ID no. 13576451
  misc_feature (1)..(134): Pfam Name: HAD superfamily, subfamily IIIB (Acid phosphatase) Pfam Description: HAD superfamily, subfamily IIIB (Acid
  misc_feature (1)..(134): Homolog of NCBI NO: 15234949 NR Description: acid phosphatase - like protein [Arabidopsis
  misc_feature (1)..(134): Homolog of NCBI NO: 15241412 NR Description: acid phosphatase [Arabidopsis thaliana]
  misc_feature (1)..(133): Homolog of NCBI NO: 445113 NR Description: acid phosphatase 1
  misc_feature (1)..(133): Homolog of NCBI NO: 130718 NR Description: Acid phosphatase precursor 1
  misc_feature (1)..(134): Homolog of NCBI NO: 15233504 NR Description: acid phosphatase-related protein [Arabidopsis
  misc_feature (1)..(133): Homolog of NCBI NO: 15233526 NR Description: acid phosphatase-related protein [Arabidopsis
  misc_feature (1)..(100): Homolog of NCBI NO: 7705154 NR Description: acid phosphatase-1(1); Apase-1(1) [Lycopersicon

SEQ ID NO: 97875 - DNA, 1125 bp, Arabidopsis thaliana
  misc_feature (1)..(1125): Ceres Seq. ID no. 13576452
  misc_feature: MA Experiment ID: 20000224 Result: Up-regulated in Transcription
  misc_feature: MA Experiment ID: 20000265 Result: Down-regulated in Transcription
  misc_feature: MA Experiment 20000265 PARAMETER Experiment Name: At_Open_Flower_P Parameter: Age (day) Value: 21
  misc_feature: MA Experiment 20000265 PARAMETER Experiment Name: At_Open_Flower_P Parameter: Plant Line Value: WS
  misc_feature: MA Experiment 20000265 PARAMETER Experiment Name: At_Open_Flower_P Parameter: Tissue Value: Closed Flower vs. Whole Plant
  misc_feature: MA Experiment ID: 20000452 Result: Up-regulated in Transcription
  misc_feature: MA Experiment 20000452 PARAMETER Experiment Name: At_CS6879_Shoots-Roots_P Parameter: Age (day) Value: 14
  misc_feature: MA Experiment 20000452 PARAMETER Experiment Name: At_CS6879_Shoots-Roots_P Parameter: Organism Value: A. thaliana
  misc_feature: MA Experiment 20000452 PARAMETER Experiment Name: At_CS6879_Shoots-Roots_P Parameter: Plant Line Value: CS6879 vs. WS
  misc_feature: MA Experiment 20000452 PARAMETER Experiment Name: At_CS6879_Shoots-Roots_P Parameter: Tissue Value: Shoots
acacaagtgacatcgtcggaggagaaaaggtagtgccaatattagccggcgattcagatggagacggtggtcgataaagatgttctgaagtcttccggggctgagcttcttcccgacggacgtcgaggtttacgcatccatgactgggagatcgaaaccctccgcggcacgattctcacttctctcgctgtcgaagagtgggaaaaaaagcttaagacatctcacttacctgaaatggtttttggcgagaatgcattagtccttaaacacttaggtagcaacactaagattcattttaatgcgtttgacgcactagctggttggaagcaggaagggcttccacctgttgaagttcctgctgcagcacaatggaaattcaggagcaagccgtctcagcaggtgatactagattatgattacacgtttacaacgccatactgtggaagtgaagtagttgagaaagacaaagaaacgcaggttgaggcaaaagctaatccaaagggggaagctactcttcagtgggagaactgtgaagatcagattgatttggctgctctctcacttaaagaacctattctcttctatgatgaggtagttttgtatgaagatgaactggctgacaatggagtgtcacttctgactgtgaaagtgagagtcatgccaagctcatggttcctcctcttgcgattttggctgagagttgatggtgtgcttatgagattgagagagacgagaatgcattataggtttggcgaagatgaggcaccaactgttcttcgtgaaaactgttggagagaagcaacatttcagtctctatctgcgaaagggtatccagttgacttagcagtctggagcgacccgagctccatcagtcagaggcttccagtgattaagcatacgacacagaaactgaagatccctagtaaagtttaagctgtttataaagttgcaaattatatctaaaagagcgtaccgatgagctttctttacagccaaacaaactacttactattgaatttgttaatgtaaggagttactccactgacttattgtggtggtttcatatgaacattcaaacccttttcacgttgttcttacactcttattgttccctaccttgttccc

SEQ ID NO: 97876 - protein, 291 aa, Arabidopsis thaliana
  peptide (1)..(291): Ceres Seq. ID no. 13576453
  misc_feature (60)..(255): Pfam Name: TIP41-like family Pfam Description: TIP41-like family
  misc_feature (1)..(291): Homolog of NCBI NO: 22329154 NR Description: expressed protein [Arabidopsis thaliana] unknown protein [Arabidopsis thaliana]
  misc_feature (60)..(291): Homolog of NCBI NO: 7485322 NR Description: hypothetical protein F10M10.40 - Arabidopsis >gi|4455172|emb|CAB36704.1| putative protein [Arabidopsis >gi|7270377|emb|CAB80144.1| putative protein [Arabidopsis
  misc_feature (10)..(289): Homolog of NCBI NO: 14488361 NR Description: unknown protein [Oryza sativa (japonica
  misc_feature (30)..(291): Homolog of NCBI NO: 23097250 NR Description: similar to CG9578 gene product; yeast YPR037W and
  misc_feature (30)..(291): Homolog of NCBI NO: 21704010 NR Description: similar to CG9578 gene product [Mus musculus] similar to CG9578 gene product [Mus musculus]
  misc_feature (30)..(291): Homolog of NCBI NO: 34880821 NR Description: similar to CG9578-like [Rattus norvegicus]
  misc_feature (30)..(288): Homolog of NCBI NO: 34784442 NR Description: Unknown (protein for MGC:66327) [Danio rerio]
  misc_feature (133)..(285): Homolog of NCBI NO: 40739133 NR Description: hypothetical protein AN5814.2 [Aspergillus
  misc_feature (15)..(117): Homolog of NCBI NO: 40739133 NR Description: hypothetical protein AN5814.2 [Aspergillus
  misc_feature (9)..(279): Homolog of NCBI NO: 6325297 NR Description: SDF1 the first obserwed null phenotype was DeFiciency; Tip41p [Saccharomyces cerevisiae]
METVVDKDVLKSSGAELLPDGRRGLRIHDWEIETLRGTILTSLAVEEWEKKLKTSHLPEMVFGENALVLKHLGSNTKIHFNAFDALAGWKQEGLPPVEVPAAAQWKFRSKPSQQVILDYDYTFTTPYCGSEVVEKDKETQVEAKANPKGEATLQWENCEDQIDLAALSLKEPILFYDEVVLYEDELADNGVSLLTVKVRVMPSSWFLLLRFWLRVDGVLMRLRETRMHYRFGEDEAPTVLRENCWREATFQSLSAKGYPVDLAVWSDPSSISQRLPVIKHTTQKLKIPSKV

SEQ ID NO: 97877 - protein, 232 aa, Arabidopsis thaliana
  peptide (1)..(232): Ceres Seq. ID no. 13576454
  misc_feature (1)..(196): Pfam Name: TIP41-like family Pfam Description: TIP41-like family
  misc_feature (1)..(232): Homolog of NCBI NO: 22329154 NR Description: expressed protein [Arabidopsis thaliana] unknown protein [Arabidopsis thaliana]
  misc_feature (1)..(232): Homolog of NCBI NO: 7485322 NR Description: hypothetical protein F10M10.40 - Arabidopsis >gi|4455172|emb|CAB36704.1| putative protein [Arabidopsis >gi|7270377|emb|CAB80144.1| putative protein [Arabidopsis
  misc_feature (1)..(230): Homolog of NCBI NO: 14488361 NR Description: unknown protein [Oryza sativa (japonica
  misc_feature (1)..(232): Homolog of NCBI NO: 23097250 NR Description: similar to CG9578 gene product; yeast YPR037W and
  misc_feature (1)..(232): Homolog of NCBI NO: 21704010 NR Description: similar to CG9578 gene product [Mus musculus] similar to CG9578 gene product [Mus musculus]
  misc_feature (1)..(232): Homolog of NCBI NO: 34880821 NR Description: similar to CG9578-like [Rattus norvegicus]
  misc_feature (1)..(229): Homolog of NCBI NO: 34784442 NR Description: Unknown (protein for MGC:66327) [Danio rerio]
  misc_feature (74)..(226): Homolog of NCBI NO: 40739133 NR Description: hypothetical protein AN5814.2 [Aspergillus
  misc_feature (1)..(58): Homolog of NCBI NO: 40739133 NR Description: hypothetical protein AN5814.2 [Aspergillus
  misc_feature (1)..(220): Homolog of NCBI NO: 6325297 NR Description: SDF1 the first obserwed null phenotype was DeFiciency; Tip41p [Saccharomyces cerevisiae]
MVFGENALVLKHLGSNTKIHFNAFDALAGWKQEGLPPVEVPAAAQWKFRSKPSQQVILDYDYTFTTPYCGSEVVEKDKETQVEAKANPKGEATLQWENCEDQIDLAALSLKEPILFYDEVVLYEDELADNGVSLLTVKVRVMPSSWFLLLRFWLRVDGVLMRLRETRMHYRFGEDEAPTVLRENCWREATFQSLSAKGYPVDLAVWSDPSSISQRLPVIKHTTQKLKIPSKV

SEQ ID NO: 97878 - DNA, 880 bp, Arabidopsis thaliana
  misc_feature (1)..(880): Ceres Seq. ID no. 13576459
  misc_feature: MA Experiment ID: 108462 Result: Down-regulated in Transcription
  misc_feature: MA Experiment 108462 PARAMETER Experiment Name: At_Germinating_Seeds_cDNA_P Parameter: Age (day) Value: 2 vs. 0
  misc_feature: MA Experiment 108462 PARAMETER Experiment Name: At_Germinating_Seeds_cDNA_P Parameter: Tissue Value: Germinating Seeds
  misc_feature: MA Experiment ID: 108463 Result: Down-regulated in Transcription
  misc_feature: MA Experiment 108463 PARAMETER Experiment Name: At_Germinating_Seeds_cDNA_P Parameter: Age (day) Value: 3 vs. 0
  misc_feature: MA Experiment 108463 PARAMETER Experiment Name: At_Germinating_Seeds_cDNA_P Parameter: Tissue Value: Germinating Seeds
  misc_feature: MA Experiment ID: 108464 Result: Down-regulated in Transcription
  misc_feature: MA Experiment 108464 PARAMETER Experiment Name: At_Germinating_Seeds_cDNA_P Parameter: Age (day) Value: 4 vs. 0
  misc_feature: MA Experiment 108464 PARAMETER Experiment Name: At_Germinating_Seeds_cDNA_P Parameter: Tissue Value: Germinating Seeds
  misc_feature: MA Experiment ID: 108573 Result: Up-regulated in Transcription
  misc_feature: MA Experiment 108573 PARAMETER Experiment Name: At_Drought_cDNA_P Parameter: Timepoint (hr) Value: 6
  misc_feature: MA Experiment 108573 PARAMETER Experiment Name: At_Drought_cDNA_P Parameter: Tissue Value: Aerial
  misc_feature: MA Experiment 108573 PARAMETER Experiment Name: At_Drought_cDNA_P Parameter: Treatment Value: Drought vs. No Drought
aaacgtttcttcgaaagatcaattaacaaaacaatcatcttcttcctcaatttcttcttctacttctcatctcttttctgttcttctttgttaaacccaatctgggtctatcatcgtcttcgaggagcctgcgtgctagggtttctccgccttcttccttcccttattttagatctcaaaaggtagaagcagctcattacaggaaccatgatgtcctttgaaatgaatgaccggaaaaaaatcgggttaggcctgacaggatttggcgtattcttctcgtttttgggaatagtctttgtctttgataagggattacttgccatgggaaatattcttttcatctcgggggttagtctaaccattggcttcaagtctaccatgcagttcttcatgaagcgtcaaaattataagggaaccatctcttttggcgtcggtttcttctttgttatcatcgggtggcctatcttgggaatgatgttggagacctatggctttttcgtactcttcagtggcttctggcctaccttggcagtctttgctcagaagatacccgttctcggttggattattcagcaaccatatattagatcgttctttgacaagtaccggggcaagcgtgtgccggtctagtcttccatcccgagtagagagacgattcactgagctagatgcagctgaacaggcgattaaagtttttggaagaagaagttggtgactcctgtagaaaactaaaaccataggagaaagaaaataggaaggaaaagaacgtacaatttgaagctgtgtgtctatgtacttgagagaaaaactcagtgacttaatgctctttgatggagtttgtaaacgttttggttgtttaactctgacaaatcggttagcc

SEQ ID NO: 97879 - protein, 140 aa, Arabidopsis thaliana; identical to SEQ ID NO: 25588
  peptide (1)..(140): Ceres Seq. ID no. 13576460
  misc_feature (30)..(130): Pfam Name: Got1-like family Pfam Description: Got1-like family
  misc_feature (1)..(140): Homolog of NCBI NO: 15229139 NR Description: expressed protein [Arabidopsis thaliana]
  misc_feature (1)..(128): Homolog of NCBI NO: 12324443 NR Description: unknown protein; 50647-51606 [Arabidopsis
  misc_feature (1)..(140): Homolog of NCBI NO: 30678779 NR Description: expressed protein [Arabidopsis thaliana]
  misc_feature (1)..(128): Homolog of NCBI NO: 33146513 NR Description: NFkB activating protein-like [Oryza sativa
  misc_feature (1)..(100): Homolog of NCBI NO: 6714435 NR Description: unknown protein [Arabidopsis thaliana]
  misc_feature (1)..(132): Homolog of NCBI NO: 26384022 NR Description: unnamed protein product [Mus musculus]
  misc_feature (6)..(132): Homolog of NCBI NO: 13385354 NR Description: CGI-141 protein; EST AA407874 [Mus musculus]
  misc_feature (1)..(132): Homolog of NCBI NO: 7634779 NR Description: HDCMA39P [Homo sapiens]
  misc_feature (6)..(132): Homolog of NCBI NO: 7705636 NR Description: CGI-141 protein [Homo sapiens]
  misc_feature (5)..(127): Homolog of NCBI NO: 24642432 NR Description: CG32576-PA [Drosophila melanogaster]

SEQ ID NO: 97880 - protein, 139 aa, Arabidopsis thaliana; identical to SEQ ID NO: 25589
  peptide (1)..(139): Ceres Seq. ID no. 13576461
  misc_feature (29)..(129): Pfam Name: Got1-like family Pfam Description: Got1-like family
  misc_feature (1)..(139): Homolog of NCBI NO: 15229139 NR Description: expressed protein [Arabidopsis thaliana]
  misc_feature (1)..(127): Homolog of NCBI NO: 12324443 NR Description: unknown protein; 50647-51606 [Arabidopsis
  misc_feature (1)..(139): Homolog of NCBI NO: 30678779 NR Description: expressed protein [Arabidopsis thaliana]
  misc_feature (1)..(127): Homolog of NCBI NO: 33146513 NR Description: NFkB activating protein-like [Oryza sativa
  misc_feature (1)..(99): Homolog of NCBI NO: 6714435 NR Description: unknown protein [Arabidopsis thaliana]
  misc_feature (1)..(131): Homolog of NCBI NO: 26384022 NR Description: unnamed protein product [Mus musculus]
  misc_feature (5)..(131): Homolog of NCBI NO: 13385354 NR Description: CGI-141 protein; EST AA407874 [Mus musculus]
  misc_feature (1)..(131): Homolog of NCBI NO: 7634779 NR Description: HDCMA39P [Homo sapiens]
  misc_feature (5)..(131): Homolog of NCBI NO: 7705636 NR Description: CGI-141 protein [Homo sapiens]
  misc_feature (4)..(126): Homolog of NCBI NO: 24642432 NR Description: CG32576-PA [Drosophila melanogaster]

SEQ ID NO: 97881 - protein, 135 aa, Arabidopsis thaliana; identical to SEQ ID NO: 25590
  peptide (1)..(135): Ceres Seq. ID no. 13576462
  misc_feature (25)..(125): Pfam Name: Got1-like family Pfam Description: Got1-like family
  misc_feature (1)..(135): Homolog of NCBI NO: 15229139 NR Description: expressed protein [Arabidopsis thaliana]
  misc_feature (1)..(123): Homolog of NCBI NO: 12324443 NR Description: unknown protein; 50647-51606 [Arabidopsis
  misc_feature (1)..(135): Homolog of NCBI NO: 30678779 NR Description: expressed protein [Arabidopsis thaliana]
  misc_feature (1)..(123): Homolog of NCBI NO: 33146513 NR Description: NFkB activating protein-like [Oryza sativa
  misc_feature (1)..(95): Homolog of NCBI NO: 6714435 NR Description: unknown protein [Arabidopsis thaliana]
  misc_feature (1)..(127): Homolog of NCBI NO: 26384022 NR Description: unnamed protein product [Mus musculus]
  misc_feature (1)..(127): Homolog of NCBI NO: 13385354 NR Description: CGI-141 protein; EST AA407874 [Mus musculus]
  misc_feature (1)..(127): Homolog of NCBI NO: 7634779 NR Description: HDCMA39P [Homo sapiens]
  misc_feature (1)..(127): Homolog of NCBI NO: 7705636 NR Description: CGI-141 protein [Homo sapiens]
  misc_feature (1)..(122): Homolog of NCBI NO: 24642432 NR Description: CG32576-PA [Drosophila melanogaster]

SEQ ID NO: 97882 - DNA, 895 bp, Arabidopsis thaliana
  misc_feature (1)..(895): Ceres Seq. ID no. 13576469
  misc_feature: MA Experiment ID: 108577 Result: Up-regulated in Transcription
  misc_feature: MA Experiment 108577 PARAMETER Experiment Name: At_42deg_Heat_cDNA_P Parameter: Temperature (deg C) Value: 42 vs. 22
  misc_feature: MA Experiment 108577 PARAMETER Experiment Name: At_42deg_Heat_cDNA_P Parameter: Timepoint (hr) Value: 6
  misc_feature: MA Experiment 108577 PARAMETER Experiment Name: At_42deg_Heat_cDNA_P Parameter: Tissue Value: Aerial
  misc_feature: MA Experiment ID: 20000169 Result: Down-regulated in Transcription
  misc_feature: MA Experiment 20000169 PARAMETER Experiment Name: At_100uM_ABA_P Parameter: Age (day) Value: 14
  misc_feature: MA Experiment 20000169 PARAMETER Experiment Name: At_100uM_ABA_P Parameter: Organism Value: A. thaliana
  misc_feature: MA Experiment 20000169 PARAMETER Experiment Name: At_100uM_ABA_P Parameter: Plant Line Value: WS
  misc_feature: MA Experiment 20000169 PARAMETER Experiment Name: At_100uM_ABA_P Parameter: Timepoint (hr) Value: 6
  misc_feature: MA Experiment 20000169 PARAMETER Experiment Name: At_100uM_ABA_P Parameter: Tissue Value: Aerial
  misc_feature: MA Experiment 20000169 PARAMETER Experiment Name: At_100uM_ABA_P Parameter: Treatment Value: 100uM ABA vs. No Treatment
  misc_feature: MA Experiment ID: 20000180 Result: Up-regulated in Transcription
  misc_feature: MA Experiment 20000180 PARAMETER Experiment Name: At_Germinating_Seeds_P Parameter: Age (hr) Value: 24 vs. 0
  misc_feature: MA Experiment 20000180 PARAMETER Experiment Name: At_Germinating_Seeds_P Parameter: Tissue Value: Germinating Seeds
  misc_feature: MA Experiment ID: 20000182 Result: Down-regulated in Transcription
  misc_feature: MA Experiment 20000182 PARAMETER Experiment Name: At_2mM_SA_P Parameter: Age (day) Value: 14
  misc_feature: MA Experiment 20000182 PARAMETER Experiment Name: At_2mM_SA_P Parameter: Organism Value: A. thaliana
  misc_feature: MA Experiment 20000182 PARAMETER Experiment Name: At_2mM_SA_P Parameter: Plant Line Value: WS
  misc_feature: MA Experiment 20000182 PARAMETER Experiment Name: At_2mM_SA_P Parameter: Timepoint (hr) Value: 6
  misc_feature: MA Experiment 20000182 PARAMETER Experiment Name: At_2mM_SA_P Parameter: Tissue Value: Aerial
  misc_feature: MA Experiment 20000182 PARAMETER Experiment Name: At_2mM_SA_P Parameter: Treatment Value: 2mM SA vs. No Treatment
  misc_feature: MA Experiment ID: 20000185 Result: Down-regulated in Transcription
  misc_feature: MA Experiment 20000185 PARAMETER Experiment Name: At_Roots__P Parameter: Age (day) Value: 7 vs. 21
  misc_feature: MA Experiment 20000185 PARAMETER Experiment Name: At_Roots__P Parameter: Organism Value: A. thaliana
  misc_feature: MA Experiment 20000185 PARAMETER Experiment Name: At_Roots__P Parameter: Tissue Value: Roots vs. Whole Plant
  misc_feature: MA Experiment ID: 20000214 Result: Up-regulated in Transcription
  misc_feature: MA Experiment 20000214 PARAMETER Experiment Name: At_4deg_Cold_P Parameter: Timepoint (hr) Value: 6
  misc_feature: MA Experiment ID: 20000437 Result: Down-regulated in Transcription
  misc_feature: MA Experiment 20000437 PARAMETER Experiment Name: At_Drought_P Parameter: Age (day) Value: 8
  misc_feature: MA Experiment 20000437 PARAMETER Experiment Name: At_Drought_P Parameter: Organism Value: A. thaliana
  misc_feature: MA Experiment 20000437 PARAMETER Experiment Name: At_Drought_P Parameter: Plant Line Value: WS
  misc_feature: MA Experiment 20000437 PARAMETER Experiment Name: At_Drought_P Parameter: Timepoint (hr) Value: 24
  misc_feature: MA Experiment 20000437 PARAMETER Experiment Name: At_Drought_P Parameter: Tissue Value: Whole Plant
  misc_feature: MA Experiment 20000437 PARAMETER Experiment Name: At_Drought_P Parameter: Treatment Value: Drought vs. No Drought
  misc_feature: MA Experiment ID: 20000439 Result: Down-regulated in Transcription
  misc_feature: MA Experiment 20000439 PARAMETER Experiment Name: At_Roots__P Parameter: Age (day) Value: 14 vs. 21
  misc_feature: MA Experiment 20000439 PARAMETER Experiment Name: At_Roots__P Parameter: Organism Value: A. thaliana
  misc_feature: MA Experiment 20000439 PARAMETER Experiment Name: At_Roots__P Parameter: Tissue Value: Roots vs. Whole Plant
  misc_feature: MA Experiment ID: 20000441 Result: Down-regulated in Transcription
  misc_feature: MA Experiment 20000441 PARAMETER Experiment Name: At_1uM_BR-BRZ__P Parameter: Tissue Value: Shoot Apices
  misc_feature: MA Experiment 20000441 PARAMETER Experiment Name: At_1uM_BR-BRZ__P Parameter: Treatment Value: 1uM BR vs. No Treatment
  misc_feature: MA Experiment ID: 20000453 Result: Down-regulated in Transcription
  misc_feature: MA Experiment 20000453 PARAMETER Experiment Name: At_100uM_ABA_P Parameter: Age (day) Value: 15
  misc_feature: MA Experiment 20000453 PARAMETER Experiment Name: At_100uM_ABA_P Parameter: Organism Value: A. thaliana
  misc_feature: MA Experiment 20000453 PARAMETER Experiment Name: At_100uM_ABA_P Parameter: Plant Line Value: WS
  misc_feature: MA Experiment 20000453 PARAMETER Experiment Name: At_100uM_ABA_P Parameter: Timepoint (hr) Value: 24
  misc_feature: MA Experiment 20000453 PARAMETER Experiment Name: At_100uM_ABA_P Parameter: Tissue Value: Aerial
  misc_feature: MA Experiment 20000453 PARAMETER Experiment Name: At_100uM_ABA_P Parameter: Treatment Value: 100uM ABA vs. No Treatment
  misc_feature: MA Experiment ID: 20000527 Result: Up-regulated in Transcription
  misc_feature: MA Experiment 20000527 PARAMETER Experiment Name: At_10percent_PEG_P Parameter: Age (day) Value: 20
  misc_feature: MA Experiment 20000527 PARAMETER Experiment Name: At_10percent_PEG_P Parameter: Organism Value: A. thaliana
  misc_feature: MA Experiment 20000527 PARAMETER Experiment Name: At_10percent_PEG_P Parameter: Plant Line Value: WS
  misc_feature: MA Experiment 20000527 PARAMETER Experiment Name: At_10percent_PEG_P Parameter: Timepoint (day) Value: 20
  misc_feature: MA Experiment 20000527 PARAMETER Experiment Name: At_10percent_PEG_P Parameter: Tissue Value: Whole Plant
  misc_feature: MA Experiment 20000527 PARAMETER Experiment Name: At_10percent_PEG_P Parameter: Treatment Value: 10percent PEG vs. No Treatment
  misc_feature: MA Experiment ID: 20000573 Result: Up-regulated in Transcription
  misc_feature: MA Experiment 20000573 PARAMETER Experiment Name: At_100uM_ABA_Mutants__P Parameter: Organism Value: A. thaliana
  misc_feature: MA Experiment 20000573 PARAMETER Experiment Name: At_100uM_ABA_Mutants__P Parameter: Plant Line Value: CS22 vs. Ler wt
  misc_feature: MA Experiment 20000573 PARAMETER Experiment Name: At_100uM_ABA_Mutants__P Parameter: Timepoint (hr) Value: N/A
  misc_feature: MA Experiment 20000573 PARAMETER Experiment Name: At_100uM_ABA_Mutants__P Parameter: Tissue Value: Whole Plant
  misc_feature: MA Experiment 20000573 PARAMETER Experiment Name: At_100uM_ABA_Mutants__P Parameter: Treatment Value: None
  misc_feature: MA Experiment ID: 20000574 Result: Up-regulated in Transcription
  misc_feature: MA Experiment 20000574 PARAMETER Experiment Name: At_100uM_ABA_Mutants__P Parameter: Organism Value: A. thaliana
  misc_feature: MA Experiment 20000574 PARAMETER Experiment Name: At_100uM_ABA_Mutants__P Parameter: Plant Line Value: CS23 vs. Ler wt
  misc_feature: MA Experiment 20000574 PARAMETER Experiment Name: At_100uM_ABA_Mutants__P Parameter: Timepoint (hr) Value: N/A
  misc_feature: MA Experiment 20000574 PARAMETER Experiment Name: At_100uM_ABA_Mutants__P Parameter: Tissue Value: Whole Plant
  misc_feature: MA Experiment 20000574 PARAMETER Experiment Name: At_100uM_ABA_Mutants__P Parameter: Treatment Value: None
  misc_feature: MA Experiment ID: 20000794 Result: Down-regulated in Transcription
  misc_feature: MA Experiment 20000794 PARAMETER Experiment Name: At_Petals_P Parameter: Age (day) Value: 23-25 days
  misc_feature: MA Experiment 20000794 PARAMETER Experiment Name: At_Petals_P Parameter: Plant Line Value: WS
  misc_feature: MA Experiment 20000794 PARAMETER Experiment Name: At_Petals_P Parameter: Tissue Value: Petals vs. Whole plant
  misc_feature: MA Experiment ID: 20001247 Result: Down-regulated in Transcription
  misc_feature: MA Experiment 20001247 PARAMETER Experiment Name: At_Far-red-induction_P Parameter: Age (day) Value: 7
  misc_feature: MA Experiment 20001247 PARAMETER Experiment Name: At_Far-red-induction_P Parameter: Light Value: Far-red vs. White
  misc_feature: MA Experiment 20001247 PARAMETER Experiment Name: At_Far-red-induction_P Parameter: Organism Value: A. thaliana
  misc_feature: MA Experiment 20001247 PARAMETER Experiment Name: At_Far-red-induction_P Parameter: Plant Line Value: Columbia
  misc_feature: MA Experiment 20001247 PARAMETER Experiment Name: At_Far-red-induction_P Parameter: Timepoint (hr) Value: 1
  misc_feature: MA Experiment 20001247 PARAMETER Experiment Name: At_Far-red-induction_P Parameter: Tissue Value: Whole Plant
  misc_feature: MA Experiment ID: 20001451 Result: Down-regulated in Transcription
  misc_feature: MA Experiment 20001451 PARAMETER Experiment Name: At_Far-red-induction_P Parameter: Age (day) Value: 7
  misc_feature: MA Experiment 20001451 PARAMETER Experiment Name: At_Far-red-induction_P Parameter: Light Value: Far-red vs. White
  misc_feature: MA Experiment 20001451 PARAMETER Experiment Name: At_Far-red-induction_P Parameter: Organism Value: A. thaliana
  misc_feature: MA Experiment 20001451 PARAMETER Experiment Name: At_Far-red-induction_P Parameter: Plant Line Value: Columbia
  misc_feature: MA Experiment 20001451 PARAMETER Experiment Name: At_Far-red-induction_P Parameter: Timepoint (hr) Value: 24
  misc_feature: MA Experiment 20001451 PARAMETER Experiment Name: At_Far-red-induction_P Parameter: Tissue Value: Whole Plant
  misc_feature: MA Experiment ID: 20001555 Result: Down-regulated in Transcription
  misc_feature: MA Experiment 20001555 PARAMETER Experiment Name: At_Drought_Soil_Dry_P Parameter: Age (day) Value: 24
  misc_feature: MA Experiment 20001555 PARAMETER Experiment Name: At_Drought_Soil_Dry_P Parameter: Organism Value: A. thaliana
  misc_feature: MA Experiment 20001555 PARAMETER Experiment Name: At_Drought_Soil_Dry_P Parameter: Plant Line Value: WS
  misc_feature: MA Experiment 20001555 PARAMETER Experiment Name: At_Drought_Soil_Dry_P Parameter: Post Timepoint (hr) Value: None
  misc_feature: MA Experiment 20001555 PARAMETER Experiment Name: At_Drought_Soil_Dry_P Parameter: Post-Treatment Value: None
  misc_feature: MA Experiment 20001555 PARAMETER Experiment Name: At_Drought_Soil_Dry_P Parameter: Timepoint (day) Value: 10
  misc_feature: MA Experiment 20001555 PARAMETER Experiment Name: At_Drought_Soil_Dry_P Parameter: Treatment Value: Drought vs. No Drought
  misc_feature: MA Experiment ID: 20001556 Result: Down-regulated in Transcription
  misc_feature: MA Experiment 20001556 PARAMETER Experiment Name: At_Drought_Soil_Dry_P Parameter: Age (day) Value: 26
  misc_feature: MA Experiment 20001556 PARAMETER Experiment Name: At_Drought_Soil_Dry_P Parameter: Organism Value: A. thaliana
  misc_feature: MA Experiment 20001556 PARAMETER Experiment Name: At_Drought_Soil_Dry_P Parameter: Plant Line Value: WS
  misc_feature: MA Experiment 20001556 PARAMETER Experiment Name: At_Drought_Soil_Dry_P Parameter: Post Timepoint (hr) Value: None
  misc_feature: MA Experiment 20001556 PARAMETER Experiment Name: At_Drought_Soil_Dry_P Parameter: Post-Treatment Value: None
  misc_feature: MA Experiment 20001556 PARAMETER Experiment Name: At_Drought_Soil_Dry_P Parameter: Timepoint (day) Value: 12
  misc_feature: MA Experiment 20001556 PARAMETER Experiment Name: At_Drought_Soil_Dry_P Parameter: Treatment Value: Drought vs. No Drought
  misc_feature: MA Experiment ID: 20001559 Result: Down-regulated in Transcription
  misc_feature: MA Experiment 20001559 PARAMETER Experiment Name: At_Drought_Soil_Dry_P Parameter: Age (day) Value: 28
  misc_feature: MA Experiment 20001559 PARAMETER Experiment Name: At_Drought_Soil_Dry_P Parameter: Organism Value: A. thaliana
  misc_feature: MA Experiment 20001559 PARAMETER Experiment Name: At_Drought_Soil_Dry_P Parameter: Plant Line Value: WS
  misc_feature: MA Experiment 20001559 PARAMETER Experiment Name: At_Drought_Soil_Dry_P Parameter: Post Timepoint (hr) Value: 29
  misc_feature: MA Experiment 20001559 PARAMETER Experiment Name: At_Drought_Soil_Dry_P Parameter: Post-Treatment Value: Re-Water vs. No Drought
  misc_feature: MA Experiment 20001559 PARAMETER Experiment Name: At_Drought_Soil_Dry_P Parameter: Timepoint (day) Value: 14
  misc_feature: MA Experiment 20001559 PARAMETER Experiment Name: At_Drought_Soil_Dry_P Parameter: Treatment Value: Drought vs. No Drought
  misc_feature: MA Experiment ID: 20001761 Result: Up-regulated in Transcription
  misc_feature: MA Experiment 20001761 PARAMETER Experiment Name: At_50mM_NH4NO3_L-to-H_P Parameter: Timepoint (hr) Value: 4
  misc_feature: MA Experiment 20001761 PARAMETER Experiment Name: At_50mM_NH4NO3_L-to-H_P Parameter: Tissue Value: Siliques
  misc_feature: MA Experiment 20001761 PARAMETER Experiment Name: At_50mM_NH4NO3_L-to-H_P Parameter: Treatment Value: 50mM NH4NO3 vs 100mM Mannitol
  misc_feature: MA Experiment ID: 20001906 Result: Down-regulated in Transcription
  misc_feature: MA Experiment 20001906 PARAMETER Experiment Name: At_Drought_Reproduction_P Parameter: Age (day) Value: 35
  misc_feature: MA Experiment 20001906 PARAMETER Experiment Name: At_Drought_Reproduction_P Parameter: Organism Value: A. thaliana
  misc_feature: MA Experiment 20001906 PARAMETER Experiment Name: At_Drought_Reproduction_P Parameter: Plant Line Value: WS
  misc_feature: MA Experiment 20001906 PARAMETER Experiment Name: At_Drought_Reproduction_P Parameter: Timepoint (day) Value: 5
  misc_feature: MA Experiment 20001906 PARAMETER Experiment Name: At_Drought_Reproduction_P Parameter: Tissue Value: Siliques
  misc_feature: MA Experiment 20001906 PARAMETER Experiment Name: At_Drought_Reproduction_P Parameter: Treatment Value: Drought vs. No Drought
  misc_feature: MA Experiment ID: 20001908 Result: Down-regulated in Transcription
  misc_feature: MA Experiment 20001908 PARAMETER Experiment Name: At_Drought_Reproduction_P Parameter: Age (day) Value: 40
  misc_feature: MA Experiment 20001908 PARAMETER Experiment Name: At_Drought_Reproduction_P Parameter: Organism Value: A. thaliana
  misc_feature: MA Experiment 20001908 PARAMETER Experiment Name: At_Drought_Reproduction_P Parameter: Plant Line Value: WS
  misc_feature: MA Experiment 20001908 PARAMETER Experiment Name: At_Drought_Reproduction_P Parameter: Timepoint (day) Value: 10
  misc_feature: MA Experiment 20001908 PARAMETER Experiment Name: At_Drought_Reproduction_P Parameter: Tissue Value: Siliques
  misc_feature: MA Experiment 20001908 PARAMETER Experiment Name: At_Drought_Reproduction_P Parameter: Treatment Value: Drought vs. No Drought
  misc_feature: MA Experiment ID: 20001911 Result: Down-regulated in Transcription
  misc_feature: MA Experiment 20001911 PARAMETER Experiment Name: At_Drought_Reproduction_P Parameter: Age (day) Value: 40
  misc_feature: MA Experiment 20001911 PARAMETER Experiment Name: At_Drought_Reproduction_P Parameter: Organism Value: A. thaliana
  misc_feature: MA Experiment 20001911 PARAMETER Experiment Name: At_Drought_Reproduction_P Parameter: Plant Line Value: WS
  misc_feature: MA Experiment 20001911 PARAMETER Experiment Name: At_Drought_Reproduction_P Parameter: Timepoint (day) Value: 10
  misc_feature: MA Experiment 20001911 PARAMETER Experiment Name: At_Drought_Reproduction_P Parameter: Tissue Value: Flowers
  misc_feature: MA Experiment 20001911 PARAMETER Experiment Name: At_Drought_Reproduction_P Parameter: Treatment Value: Drought vs. No Drought
ataacttcaacaaaagctcttatctataaaacattctaaagaaaaatgaagatgataatccaaattttcttcatcatctccctcatttcaaccatctcttttgcctctgttcaagacttttgtgtagctgacccaaagggtcctcaaagcccatcaggttactcttgcaagaaccctgaccaagtcaccgaaaatgactttgcatttaccggcctcggcacagctggaaacacttccaacatcattaaagccgcagtgactccagcctttgctcctgcttacgcaggcatcaatggccttggcgtatctctggctcgtcttgacttagccggtggtggtgtcatccctctccacactcatcctggtgcttctgaggtccttgtagtcattcaaggcaccatttgcgccggatttatctcctccgccaacaaagtttacttgaagactctcaacagaggagattctatggtgtttcctcaaggacttcttcattttcagctaaactctgggaaaggccctgccttggcctttgtcgcattcggaagctcctccccagggctccaaattctaccatttgctctgtttgcaaacgatttgccttcagaacttgttgaagccacaacgttccttagcgatgcagaagttaagaagcttaagggtgtgcttgggggaactaattaagcttctcttagtttcattgttcatttttttaaaaatgtggttgtgcgttttgttatttcgagttcctttagcattttgagtttgtttcttctaatgatttggtttttctttatgagttgttattgttctcaatgtttcattttatagtctctttggcttcaaattgtaataactaataagcattatattgcagatttctaagtagcttgtcaac

SEQ ID NO: 97883 - protein, 211 aa, Arabidopsis thaliana
  peptide (1)..(211): Ceres Seq. ID no. 13576470
  misc_feature (55)..(201): Pfam Name: Cupin Pfam Description: Cupin
  misc_feature (1)..(211): Homolog of NCBI NO: 15242028 NR Description: germin-like protein (AtGER3) [Arabidopsis
  misc_feature (1)..(211): Homolog of NCBI NO: 1755154 NR Description: germin-like protein [Arabidopsis thaliana]
  misc_feature (1)..(211): Homolog of NCBI NO: 1169944 NR Description: Germin-like protein 1 precursor
  misc_feature (24)..(211): Homolog of NCBI NO: 1755188 NR Description: germin-like protein [Arabidopsis thaliana]
  misc_feature (1)..(210): Homolog of NCBI NO: 13277342 NR Description: Germin-like protein [Pisum sativum]
  misc_feature (3)..(211): Homolog of NCBI NO: 18203684 NR Description: Auxin-binding protein ABP19a precursor
  misc_feature (3)..(211): Homolog of NCBI NO: 18201940 NR Description: Auxin-binding protein ABP20 precursor
  misc_feature (3)..(211): Homolog of NCBI NO: 18201941 NR Description: Auxin-binding protein ABP19b precursor
  misc_feature (3)..(210): Homolog of NCBI NO: 30841320 NR Description: auxin binding protein [Gossypium hirsutum]
  misc_feature (3)..(210): Homolog of NCBI NO: 21492648 NR Description: fiber protein GLP1 [Gossypium hirsutum]
MKMIIQIFFIISLISTISFASVQDFCVADPKGPQSPSGYSCKNPDQVTENDFAFTGLGTAGNTSNIIKAAVTPAFAPAYAGINGLGVSLARLDLAGGGVIPLHTHPGASEVLVVIQGTICAGFISSANKVYLKTLNRGDSMVFPQGLLHFQLNSGKGPALAFVAFGSSSPGLQILPFALFANDLPSELVEATTFLSDAEVKKLKGVLGGTN

SEQ ID NO: 97884 - protein, 209 aa, Arabidopsis thaliana
  peptide (1)..(209): Ceres Seq. ID no. 13576471
  misc_feature (53)..(199): Pfam Name: Cupin Pfam Description: Cupin
  misc_feature (1)..(209): Homolog of NCBI NO: 15242028 NR Description: germin-like protein (AtGER3) [Arabidopsis
  misc_feature (1)..(209): Homolog of NCBI NO: 1755154 NR Description: germin-like protein [Arabidopsis thaliana]
  misc_feature (1)..(209): Homolog of NCBI NO: 1169944 NR Description: Germin-like protein 1 precursor
  misc_feature (22)..(209): Homolog of NCBI NO: 1755188 NR Description: germin-like protein [Arabidopsis thaliana]
  misc_feature (1)..(208): Homolog of NCBI NO: 13277342 NR Description: Germin-like protein [Pisum sativum]
  misc_feature (1)..(209): Homolog of NCBI NO: 18203684 NR Description: Auxin-binding protein ABP19a precursor
  misc_feature (1)..(209): Homolog of NCBI NO: 18201940 NR Description: Auxin-binding protein ABP20 precursor
  misc_feature (1)..(209): Homolog of NCBI NO: 18201941 NR Description: Auxin-binding protein ABP19b precursor
  misc_feature (1)..(208): Homolog of NCBI NO: 30841320 NR Description: auxin binding protein [Gossypium hirsutum]
  misc_feature (1)..(208): Homolog of NCBI NO: 21492648 NR Description: fiber protein GLP1 [Gossypium hirsutum]
MIIQIFFIISLISTISFASVQDFCVADPKGPQSPSGYSCKNPDQVTENDFAFTGLGTAGNTSNIIKAAVTPAFAPAYAGINGLGVSLARLDLAGGGVIPLHTHPGASEVLVVIQGTICAGFISSANKVYLKTLNRGDSMVFPQGLLHFQLNSGKGPALAFVAFGSSSPGLQILPFALFANDLPSELVEATTFLSDAEVKKLKGVLGGTN

SEQ ID NO: 97885 - DNA, 1150 bp, Arabidopsis thaliana
  misc_feature (1)..(1150): Ceres Seq. ID no. 13576472
  misc_feature: MA Experiment ID: 108434 Result: Down-regulated in Transcription
  misc_feature: MA Experiment 108434 PARAMETER Experiment Name: At_Root_Tips_cDNA_P Parameter: Tissue Value: Root Tips
  misc_feature: MA Experiment ID: 108469 Result: Up-regulated in Transcription
  misc_feature: MA Experiment ID: 20000113 Result: Up-regulated in Transcription
  misc_feature: MA Experiment 20000113 PARAMETER Experiment Name: At_42deg_Heat_cDNA_P Parameter: Temperature (deg C) Value: 42 vs. 22
  misc_feature: MA Experiment 20000113 PARAMETER Experiment Name: At_42deg_Heat_cDNA_P Parameter: Timepoint (hr) Value: 8
  misc_feature: MA Experiment 20000113 PARAMETER Experiment Name: At_42deg_Heat_cDNA_P Parameter: Tissue Value: Aerial
  misc_feature: MA Experiment ID: 20000182 Result: Up-regulated in Transcription
  misc_feature: MA Experiment 20000182 PARAMETER Experiment Name: At_2mM_SA_P Parameter: Age (day) Value: 14
  misc_feature: MA Experiment 20000182 PARAMETER Experiment Name: At_2mM_SA_P Parameter: Organism Value: A. thaliana
  misc_feature: MA Experiment 20000182 PARAMETER Experiment Name: At_2mM_SA_P Parameter: Plant Line Value: WS
  misc_feature: MA Experiment 20000182 PARAMETER Experiment Name: At_2mM_SA_P Parameter: Timepoint (hr) Value: 6
  misc_feature: MA Experiment 20000182 PARAMETER Experiment Name: At_2mM_SA_P Parameter: Tissue Value: Aerial
  misc_feature: MA Experiment 20000182 PARAMETER Experiment Name: At_2mM_SA_P Parameter: Treatment Value: 2mM SA vs. No Treatment
  misc_feature: MA Experiment ID: 20001560 Result: Down-regulated in Transcription
  misc_feature: MA Experiment 20001560 PARAMETER Experiment Name: At_Drought_Soil_Dry_P Parameter: Age (day) Value: 28
  misc_feature: MA Experiment 20001560 PARAMETER Experiment Name: At_Drought_Soil_Dry_P Parameter: Organism Value: A. thaliana
  misc_feature: MA Experiment 20001560 PARAMETER Experiment Name: At_Drought_Soil_Dry_P Parameter: Plant Line Value: WS
  misc_feature: MA Experiment 20001560 PARAMETER Experiment Name: At_Drought_Soil_Dry_P Parameter: Post Timepoint (hr) Value: None
  misc_feature: MA Experiment 20001560 PARAMETER Experiment Name: At_Drought_Soil_Dry_P Parameter: Post-Treatment Value: None
  misc_feature: MA Experiment 20001560 PARAMETER Experiment Name: At_Drought_Soil_Dry_P Parameter: Timepoint (day) Value: 14
  misc_feature: MA Experiment 20001560 PARAMETER Experiment Name: At_Drought_Soil_Dry_P Parameter: Treatment Value: Drought vs. No Drought
atttcccacaccaatcgcataatcgatttcttccaacttcaataaaggggaaccaacgtaaccctaattttgctttctcctctttgttcagaaaattttccctttactctcaaattccttttcgatttccctctcttaaacctccgaaagctcacatggcgtctcgaaactatcggtgggagctcttcgcagcttcgttaaccctaaccttagctttgattcacctggtcgaagcaaactccgaaggagatgctctctacgctcttcgccggagtttgacagatccagaccatgtcctccagagctgggatccaactcttgttaatccttgtacctggttccatgtcacctgtaaccaagacaaccgcgtcactcgtgtggatttgggaaattcaaacctctctggacatcttgcgcctgagcttgggaagcttgaacatttacagtatctagagctctacaaaaacaacatccaaggaactataccttccgaacttggaaatctgaagaatctcatcagcttggatctgtacaacaacaatcttacagggatagttcccacttctttgggaaaattgaagtctctggtctttttacggcttaatgacaaccgattgaccggtccaatccctagagcactcacggcaatcccaagccttaaagttgttgacgtctcaagcaatgatttgtgtggaacaatcccaacaaacggaccctttgctcacattcctttacagaactttgagaacaacccgagattggagggaccggaattactcggtcttgcaagctacgacactaactgcacctgaaacaactggcaaaacctgaaaatgaagaattggggggtgaccttgtaagaacacttcaccactttatcaaatatcacatctattatgtaataagtatatatatgtagtaaaaacaaaaaaaatgaagaatcgaatcggtaatatcatctggtctcaattgagaacttcgaggtctgtatgtaaaatttctaaatgcgattttcgcttactgtaatgttcggttgtgggattctgagaagtaacatttgtattggtatggtatcaagttgttctgccttgtctgcatttaacacttgtgttttagatctgttatataaagccaaaaaaggttttgtgtg

SEQ ID NO: 97886 - protein, 269 aa, Arabidopsis thaliana
  peptide (1)..(269): Ceres Seq. ID no. 13576473
  misc_feature (218)..(251): Pfam Name: Leucine Rich Repeat Pfam Description: Leucine Rich Repeat
  misc_feature (52)..(269): Homolog of NCBI NO: 15242153 NR Description: leucine rich repeat protein (LRP), putative thaliana] >gi|11762126|gb|AAG40341.1|AF324989_1 AT5g21090 thaliana] >gi|13899097|gb|AAK48970.1|AF370543_1 Unknown protein
  misc_feature (52)..(269): Homolog of NCBI NO: 34146800 NR Description: At3g43740 [Arabidopsis thaliana]
  misc_feature (62)..(269): Homolog of NCBI NO: 30385250 NR Description: leucine-rich repeat protein [x Citrofortunella
  misc_feature (59)..(269): Homolog of NCBI NO: 7489030 NR Description: leucine-rich repeat protein LRP - tomato
  misc_feature (61)..(268): Homolog of NCBI NO: 29468120 NR Description: leucine-rich repeat protein [Oryza sativa]
  misc_feature (59)..(268): Homolog of NCBI NO: 34903344 NR Description: unnamed protein product [Oryza sativa (japonica group)] >gi|6498429|dbj|BAA87832.1| unnamed protein product
  misc_feature (61)..(268): Homolog of NCBI NO: 27497122 NR Description: floral organ regulator 1 [Oryza sativa (japonica
  misc_feature (63)..(268): Homolog of NCBI NO: 34896972 NR Description: putative leucine-rich repeat protein [Oryza
  misc_feature (57)..(256): Homolog of NCBI NO: 40253600 NR Description: putative somatic embryogenesis receptor kinase 1
  misc_feature (57)..(256): Homolog of NCBI NO: 38679443 NR Description: benzothiadiazole-induced somatic embryogenesis
FPHQSHNRFLPTSIKGNQRNPNFAFSSLFRKFSLYSQIPFRFPSLKPPKAHMASRNYRWELFAASLTLTLALIHLVEANSEGDALYALRRSLTDPDHVLQSWDPTLVNPCTWFHVTCNQDNRVTRVDLGNSNLSGHLAPELGKLEHLQYLELYKNNIQGTIPSELGNLKNLISLDLYNNNLTGIVPTSLGKLKSLVFLRLNDNRLTGPIPRALTAIPSLKVVDVSSNDLCGTIPTNGPFAHIPLQNFENNPRLEGPELLGLASYDTNCT

SEQ ID NO: 97887 - protein, 218 aa, Arabidopsis thaliana; identical to SEQ ID NO: 21774
  peptide (1)..(218): Ceres Seq. ID no. 13576474
  misc_feature (167)..(200): Pfam Name: Leucine Rich Repeat Pfam Description: Leucine Rich Repeat
  misc_feature (1)..(218): Homolog of NCBI NO: 15242153 NR Description: leucine rich repeat protein (LRP), putative thaliana] >gi|11762126|gb|AAG40341.1|AF324989_1 AT5g21090 thaliana] >gi|13899097|gb|AAK48970.1|AF370543_1 Unknown protein
  misc_feature (1)..(218): Homolog of NCBI NO: 34146800 NR Description: At3g43740 [Arabidopsis thaliana]
  misc_feature (11)..(218): Homolog of NCBI NO: 30385250 NR Description: leucine-rich repeat protein [x Citrofortunella
  misc_feature (8)..(218): Homolog of NCBI NO: 7489030 NR Description: leucine-rich repeat protein LRP - tomato
  misc_feature (10)..(217): Homolog of NCBI NO: 29468120 NR Description: leucine-rich repeat protein [Oryza sativa]
  misc_feature (8)..(217): Homolog of NCBI NO: 34903344 NR Description: unnamed protein product [Oryza sativa (japonica group)] >gi|6498429|dbj|BAA87832.1| unnamed protein product
  misc_feature (10)..(217): Homolog of NCBI NO: 27497122 NR Description: floral organ regulator 1 [Oryza sativa (japonica
  misc_feature (12)..(217): Homolog of NCBI NO: 34896972 NR Description: putative leucine-rich repeat protein [Oryza
  misc_feature (6)..(205): Homolog of NCBI NO: 40253600 NR Description: putative somatic embryogenesis receptor kinase 1
  misc_feature (6)..(205): Homolog of NCBI NO: 38679443 NR Description: benzothiadiazole-induced somatic embryogenesis

SEQ ID NO: 97888 - DNA, 668 bp, Arabidopsis thaliana
  misc_feature (1)..(668): Ceres Seq. ID no. 13576475
  misc_feature: MA Experiment ID: 108434 Result: Up-regulated in Transcription
  misc_feature: MA Experiment 108434 PARAMETER Experiment Name: At_Root_Tips_cDNA_P Parameter: Tissue Value: Root Tips
  misc_feature: MA Experiment ID: 108435 Result: Up-regulated in Transcription
  misc_feature: MA Experiment 108435 PARAMETER Experiment Name: At_stm_Mutants_cDNA_P Parameter: Plant Line Value: wt Landsburg vs stm
  misc_feature: MA Experiment 108435 PARAMETER Experiment Name: At_stm_Mutants_cDNA_P Parameter: Tissue Value: Shoot Apical Meristem Region
  misc_feature: MA Experiment ID: 108573 Result: Down-regulated in Transcription
  misc_feature: MA Experiment 108573 PARAMETER Experiment Name: At_Drought_cDNA_P Parameter: Timepoint (hr) Value: 6
  misc_feature: MA Experiment 108573 PARAMETER Experiment Name: At_Drought_cDNA_P Parameter: Tissue Value: Aerial
  misc_feature: MA Experiment 108573 PARAMETER Experiment Name: At_Drought_cDNA_P Parameter: Treatment Value: Drought vs. No Drought
  misc_feature: MA Experiment ID: 108577 Result: Down-regulated in Transcription
  misc_feature: MA Experiment 108577 PARAMETER Experiment Name: At_42deg_Heat_cDNA_P Parameter: Temperature (deg C) Value: 42 vs. 22
  misc_feature: MA Experiment 108577 PARAMETER Experiment Name: At_42deg_Heat_cDNA_P Parameter: Timepoint (hr) Value: 6
  misc_feature: MA Experiment 108577 PARAMETER Experiment Name: At_42deg_Heat_cDNA_P Parameter: Tissue Value: Aerial
  misc_feature: MA Experiment ID: 108585 Result: Down-regulated in Transcription
  misc_feature: MA Experiment 108585 PARAMETER Experiment Name: At_5mM_NaNP_cDNA_P Parameter: Timepoint (hr) Value: 6
  misc_feature: MA Experiment 108585 PARAMETER Experiment Name: At_5mM_NaNP_cDNA_P Parameter: Tissue Value: Aerial
  misc_feature: MA Experiment 108585 PARAMETER Experiment Name: At_5mM_NaNP_cDNA_P Parameter: Treatment Value: null
  misc_feature: MA Experiment ID: 20000093 Result: Down-regulated in Transcription
  misc_feature: MA Experiment 20000093 PARAMETER Experiment Name: At_42deg_Heat_cDNA_P Parameter: Temperature (deg C) Value: 42 vs. 22
  misc_feature: MA Experiment 20000093 PARAMETER Experiment Name: At_42deg_Heat_cDNA_P Parameter: Timepoint (hr) Value: 0.5
  misc_feature: MA Experiment 20000093 PARAMETER Experiment Name: At_42deg_Heat_cDNA_P Parameter: Tissue Value: Aerial
  misc_feature: MA Experiment ID: 20000111 Result: Down-regulated in Transcription
  misc_feature: MA Experiment 20000111 PARAMETER Experiment Name: At_42deg_Heat_cDNA_P Parameter: Temperature (deg C) Value: 42 vs. 22
  misc_feature: MA Experiment 20000111 PARAMETER Experiment Name: At_42deg_Heat_cDNA_P Parameter: Timepoint (hr) Value: 6
  misc_feature: MA Experiment 20000111 PARAMETER Experiment Name: At_42deg_Heat_cDNA_P Parameter: Tissue Value: Aerial
  misc_feature: MA Experiment ID: 20000112 Result: Down-regulated in Transcription
  misc_feature: MA Experiment 20000112 PARAMETER Experiment Name: At_42deg_Heat_cDNA_P Parameter: Temperature (deg C) Value: 42 vs. 22
  misc_feature: MA Experiment 20000112 PARAMETER Experiment Name: At_42deg_Heat_cDNA_P Parameter: Timepoint (hr) Value: 2
  misc_feature: MA Experiment 20000112 PARAMETER Experiment Name: At_42deg_Heat_cDNA_P Parameter: Tissue Value: Aerial
  misc_feature: MA Experiment ID: 20000113 Result: Down-regulated in Transcription
  misc_feature: MA Experiment 20000113 PARAMETER Experiment Name: At_42deg_Heat_cDNA_P Parameter: Temperature (deg C) Value: 42 vs. 22
  misc_feature: MA Experiment 20000113 PARAMETER Experiment Name: At_42deg_Heat_cDNA_P Parameter: Timepoint (hr) Value: 8
  misc_feature: MA Experiment 20000113 PARAMETER Experiment Name: At_42deg_Heat_cDNA_P Parameter: Tissue Value: Aerial
  misc_feature: MA Experiment ID: 20000117 Result: Down-regulated in Transcription
  misc_feature: MA Experiment 20000117 PARAMETER Experiment Name: At_100uM_ABA_Mutants_cDNA_P Parameter: Plant Line Value: Columbia
  misc_feature: MA Experiment 20000117 PARAMETER Experiment Name: At_100uM_ABA_Mutants_cDNA_P Parameter: Timepoint (hr) Value: 6
  misc_feature: MA Experiment 20000117 PARAMETER Experiment Name: At_100uM_ABA_Mutants_cDNA_P Parameter: Tissue Value: Aerial
  misc_feature: MA Experiment 20000117 PARAMETER Experiment Name: At_100uM_ABA_Mutants_cDNA_P Parameter: Treatment Value: 100uM ABA vs. No Treatment
  misc_feature: MA Experiment ID: 20000144 Result: Down-regulated in Transcription
  misc_feature: MA Experiment 20000144 PARAMETER Experiment Name: At_42deg_Heat_cDNA_P Parameter: Temperature (deg C) Value: 42 vs. 22
  misc_feature: MA Experiment 20000144 PARAMETER Experiment Name: At_42deg_Heat_cDNA_P Parameter: Timepoint (hr) Value: 1
  misc_feature: MA Experiment 20000144 PARAMETER Experiment Name: At_42deg_Heat_cDNA_P Parameter: Tissue Value: Aerial
  misc_feature: MA Experiment ID: 20000171 Result: Down-regulated in Transcription
  misc_feature: MA Experiment 20000171 PARAMETER Experiment Name: At_42deg_Heat_P Parameter: Age (day) Value: 14
  misc_feature: MA Experiment 20000171 PARAMETER Experiment Name: At_42deg_Heat_P Parameter: Organism Value: A. thaliana
  misc_feature: MA Experiment 20000171 PARAMETER Experiment Name: At_42deg_Heat_P Parameter: Plant Line Value: WS
  misc_feature: MA Experiment 20000171 PARAMETER Experiment Name: At_42deg_Heat_P Parameter: Temperature (deg C) Value: 42 vs. 22
  misc_feature: MA Experiment 20000171 PARAMETER Experiment Name: At_42deg_Heat_P Parameter: Timepoint (hr) Value: 1
  misc_feature: MA Experiment 20000171 PARAMETER Experiment Name: At_42deg_Heat_P Parameter: Tissue Value: Aerial
  misc_feature: MA Experiment ID: 20000173 Result: Down-regulated in Transcription
  misc_feature: MA Experiment 20000173 PARAMETER Experiment Name: At_42deg_Heat_P Parameter: Age (day) Value: 14
  misc_feature: MA Experiment 20000173 PARAMETER Experiment Name: At_42deg_Heat_P Parameter: Organism Value: A. thaliana
  misc_feature: MA Experiment 20000173 PARAMETER Experiment Name: At_42deg_Heat_P Parameter: Plant Line Value: WS
  misc_feature: MA Experiment 20000173 PARAMETER Experiment Name: At_42deg_Heat_P Parameter: Temperature (deg C) Value: 42 vs. 22
  misc_feature: MA Experiment 20000173 PARAMETER Experiment Name: At_42deg_Heat_P Parameter: Timepoint (hr) Value: 6
  misc_feature: MA Experiment 20000173 PARAMETER Experiment Name: At_42deg_Heat_P Parameter: Tissue Value: Aerial
  misc_feature: MA Experiment ID: 20000179 Result: Up-regulated in Transcription
  misc_feature: MA Experiment 20000179 PARAMETER Experiment Name: At_Germinating_Seeds_P Parameter: Age (hr) Value: 6 vs. 0
  misc_feature: MA Experiment 20000179 PARAMETER Experiment Name: At_Germinating_Seeds_P Parameter: Tissue Value: Germinating Seeds
  misc_feature: MA Experiment ID: 20000180 Result: Up-regulated in Transcription
  misc_feature: MA Experiment 20000180 PARAMETER Experiment Name: At_Germinating_Seeds_P Parameter: Age (hr) Value: 24 vs. 0
  misc_feature: MA Experiment 20000180 PARAMETER Experiment Name: At_Germinating_Seeds_P Parameter: Tissue Value: Germinating Seeds
  misc_feature: MA Experiment ID: 20000224 Result: Up-regulated in Transcription
  misc_feature: MA Experiment ID: 20000227 Result: Up-regulated in Transcription
  misc_feature: MA Experiment 20000227 PARAMETER Experiment Name: At_Root-Tips-vs-Tops_P Parameter: Tissue Value: Root Tips vs. Root Tops
  misc_feature: MA Experiment ID: 20000451 Result: Up-regulated in Transcription
  misc_feature: MA Experiment 20000451 PARAMETER Experiment Name: At_CS6879_Shoots-Roots_P Parameter: Age (day) Value: 14
  misc_feature: MA Experiment 20000451 PARAMETER Experiment Name: At_CS6879_Shoots-Roots_P Parameter: Organism Value: A. thaliana
  misc_feature: MA Experiment 20000451 PARAMETER Experiment Name: At_CS6879_Shoots-Roots_P Parameter: Plant Line Value: CS6879 vs. WS
  misc_feature: MA Experiment 20000451 PARAMETER Experiment Name: At_CS6879_Shoots-Roots_P Parameter: Tissue Value: Roots
  misc_feature: MA Experiment ID: 20000452 Result: Up-regulated in Transcription
  misc_feature: MA Experiment 20000452 PARAMETER Experiment Name: At_CS6879_Shoots-Roots_P Parameter: Age (day) Value: 14
  misc_feature: MA Experiment 20000452 PARAMETER Experiment Name: At_CS6879_Shoots-Roots_P Parameter: Organism Value: A. thaliana
  misc_feature: MA Experiment 20000452 PARAMETER Experiment Name: At_CS6879_Shoots-Roots_P Parameter: Plant Line Value: CS6879 vs. WS
  misc_feature: MA Experiment 20000452 PARAMETER Experiment Name: At_CS6879_Shoots-Roots_P Parameter: Tissue Value: Shoots
  misc_feature: MA Experiment ID: 20000573 Result: Down-regulated in Transcription
  misc_feature: MA Experiment 20000573 PARAMETER Experiment Name: At_100uM_ABA_Mutants__P Parameter: Organism Value: A. thaliana
  misc_feature: MA Experiment 20000573 PARAMETER Experiment Name: At_100uM_ABA_Mutants__P Parameter: Plant Line Value: CS22 vs. Ler wt
  misc_feature: MA Experiment 20000573 PARAMETER Experiment Name: At_100uM_ABA_Mutants__P Parameter: Timepoint (hr) Value: N/A
  misc_feature: MA Experiment 20000573 PARAMETER Experiment Name: At_100uM_ABA_Mutants__P Parameter: Tissue Value: Whole Plant
  misc_feature: MA Experiment 20000573 PARAMETER Experiment Name: At_100uM_ABA_Mutants__P Parameter: Treatment Value: None
  misc_feature: MA Experiment ID: 20000794 Result: Down-regulated in Transcription
  misc_feature: MA Experiment 20000794 PARAMETER Experiment Name: At_Petals_P Parameter: Age (day) Value: 23-25 days
  misc_feature: MA Experiment 20000794 PARAMETER Experiment Name: At_Petals_P Parameter: Plant Line Value: WS
  misc_feature: MA Experiment 20000794 PARAMETER Experiment Name: At_Petals_P Parameter: Tissue Value: Petals vs. Whole plant
  misc_feature: MA Experiment ID: 20001450 Result: Down-regulated in Transcription
  misc_feature: MA Experiment 20001450 PARAMETER Experiment Name: At_Far-red-induction_P Parameter: Age (day) Value: 7
  misc_feature: MA Experiment 20001450 PARAMETER Experiment Name: At_Far-red-induction_P Parameter: Light Value: Far-red vs. White
  misc_feature: MA Experiment 20001450 PARAMETER Experiment Name: At_Far-red-induction_P Parameter: Organism Value: A. thaliana
  misc_feature: MA Experiment 20001450 PARAMETER Experiment Name: At_Far-red-induction_P Parameter: Plant Line Value: Columbia
  misc_feature: MA Experiment 20001450 PARAMETER Experiment Name: At_Far-red-induction_P Parameter: Timepoint (hr) Value: 8
  misc_feature: MA Experiment 20001450 PARAMETER Experiment Name: At_Far-red-induction_P Parameter: Tissue Value: Whole Plant
  misc_feature: MA Experiment ID: 20001451 Result: Down-regulated in Transcription
  misc_feature: MA Experiment 20001451 PARAMETER Experiment Name: At_Far-red-induction_P Parameter: Age (day) Value: 7
  misc_feature: MA Experiment 20001451 PARAMETER Experiment Name: At_Far-red-induction_P Parameter: Light Value: Far-red vs. White
  misc_feature: MA Experiment 20001451 PARAMETER Experiment Name: At_Far-red-induction_P Parameter: Organism Value: A. thaliana
  misc_feature: MA Experiment 20001451 PARAMETER Experiment Name: At_Far-red-induction_P Parameter: Plant Line Value: Columbia
  misc_feature: MA Experiment 20001451 PARAMETER Experiment Name: At_Far-red-induction_P Parameter: Timepoint (hr) Value: 24
  misc_feature: MA Experiment 20001451 PARAMETER Experiment Name: At_Far-red-induction_P Parameter: Tissue Value: Whole Plant
  misc_feature: MA Experiment ID: 20001554 Result: Down-regulated in Transcription
  misc_feature: MA Experiment 20001554 PARAMETER Experiment Name: At_Drought_Soil_Dry_P Parameter: Age (day) Value: 21
  misc_feature: MA Experiment 20001554 PARAMETER Experiment Name: At_Drought_Soil_Dry_P Parameter: Organism Value: A. thaliana
  misc_feature: MA Experiment 20001554 PARAMETER Experiment Name: At_Drought_Soil_Dry_P Parameter: Plant Line Value: WS
  misc_feature: MA Experiment 20001554 PARAMETER Experiment Name: At_Drought_Soil_Dry_P Parameter: Post Timepoint (hr) Value: None
  misc_feature: MA Experiment 20001554 PARAMETER Experiment Name: At_Drought_Soil_Dry_P Parameter: Post-Treatment Value: None
  misc_feature: MA Experiment 20001554 PARAMETER Experiment Name: At_Drought_Soil_Dry_P Parameter: Timepoint (day) Value: 7
  misc_feature: MA Experiment 20001554 PARAMETER Experiment Name: At_Drought_Soil_Dry_P Parameter: Treatment Value: Drought vs. No Drought
  misc_feature: MA Experiment ID: 20001555 Result: Down-regulated in Transcription
  misc_feature: MA Experiment 20001555 PARAMETER Experiment Name: At_Drought_Soil_Dry_P Parameter: Age (day) Value: 24
  misc_feature: MA Experiment 20001555 PARAMETER Experiment Name: At_Drought_Soil_Dry_P Parameter: Organism Value: A. thaliana
  misc_feature: MA Experiment 20001555 PARAMETER Experiment Name: At_Drought_Soil_Dry_P Parameter: Plant Line Value: WS
  misc_feature: MA Experiment 20001555 PARAMETER Experiment Name: At_Drought_Soil_Dry_P Parameter: Post Timepoint (hr) Value: None
  misc_feature: MA Experiment 20001555 PARAMETER Experiment Name: At_Drought_Soil_Dry_P Parameter: Post-Treatment Value: None
  misc_feature: MA Experiment 20001555 PARAMETER Experiment Name: At_Drought_Soil_Dry_P Parameter: Timepoint (day) Value: 10
  misc_feature: MA Experiment 20001555 PARAMETER Experiment Name: At_Drought_Soil_Dry_P Parameter: Treatment Value: Drought vs. No Drought
  misc_feature: MA Experiment ID: 20001556 Result: Down-regulated in Transcription
  misc_feature: MA Experiment 20001556 PARAMETER Experiment Name: At_Drought_Soil_Dry_P Parameter: Age (day) Value: 26
  misc_feature: MA Experiment 20001556 PARAMETER Experiment Name: At_Drought_Soil_Dry_P Parameter: Organism Value: A. thaliana
  misc_feature: MA Experiment 20001556 PARAMETER Experiment Name: At_Drought_Soil_Dry_P Parameter: Plant Line Value: WS
  misc_feature: MA Experiment 20001556 PARAMETER Experiment Name: At_Drought_Soil_Dry_P Parameter: Post Timepoint (hr) Value: None
  misc_feature: MA Experiment 20001556 PARAMETER Experiment Name: At_Drought_Soil_Dry_P Parameter: Post-Treatment Value: None
  misc_feature: MA Experiment 20001556 PARAMETER Experiment Name: At_Drought_Soil_Dry_P Parameter: Timepoint (day) Value: 12
  misc_feature: MA Experiment 20001556 PARAMETER Experiment Name: At_Drought_Soil_Dry_P Parameter: Treatment Value: Drought vs. No Drought
  misc_feature: MA Experiment ID: 20001557 Result: Down-regulated in Transcription
  misc_feature: MA Experiment 20001557 PARAMETER Experiment Name: At_Drought_Soil_Dry_P Parameter: Age (day) Value: 27
  misc_feature: MA Experiment 20001557 PARAMETER Experiment Name: At_Drought_Soil_Dry_P Parameter: Organism Value: A. thaliana
  misc_feature: MA Experiment 20001557 PARAMETER Experiment Name: At_Drought_Soil_Dry_P Parameter: Plant Line Value: WS
  misc_feature: MA Experiment 20001557 PARAMETER Experiment Name: At_Drought_Soil_Dry_P Parameter: Post Timepoint (hr) Value: 3
  misc_feature: MA Experiment 20001557 PARAMETER Experiment Name: At_Drought_Soil_Dry_P Parameter: Post-Treatment Value: Re-Water vs. No Drought
  misc_feature: MA Experiment 20001557 PARAMETER Experiment Name: At_Drought_Soil_Dry_P Parameter: Timepoint (day) Value: 13
  misc_feature: MA Experiment 20001557 PARAMETER Experiment Name: At_Drought_Soil_Dry_P Parameter: Treatment Value: Drought vs. No Drought
  misc_feature: MA Experiment ID: 20001559 Result: Down-regulated in Transcription
  misc_feature: MA Experiment 20001559 PARAMETER Experiment Name: At_Drought_Soil_Dry_P Parameter: Age (day) Value: 28
  misc_feature: MA Experiment 20001559 PARAMETER Experiment Name: At_Drought_Soil_Dry_P Parameter: Organism Value: A. thaliana
  misc_feature: MA Experiment 20001559 PARAMETER Experiment Name: At_Drought_Soil_Dry_P Parameter: Plant Line Value: WS
  misc_feature: MA Experiment 20001559 PARAMETER Experiment Name: At_Drought_Soil_Dry_P Parameter: Post Timepoint (hr) Value: 29
  misc_feature: MA Experiment 20001559 PARAMETER Experiment Name: At_Drought_Soil_Dry_P Parameter: Post-Treatment Value: Re-Water vs. No Drought
  misc_feature: MA Experiment 20001559 PARAMETER Experiment Name: At_Drought_Soil_Dry_P Parameter: Timepoint (day) Value: 14
  misc_feature: MA Experiment 20001559 PARAMETER Experiment Name: At_Drought_Soil_Dry_P Parameter: Treatment Value: Drought vs. No Drought
  misc_feature: MA Experiment ID: 20001560 Result: Up-regulated in Transcription
  misc_feature: MA Experiment 20001560 PARAMETER Experiment Name: At_Drought_Soil_Dry_P Parameter: Age (day) Value: 28
  misc_feature: MA Experiment 20001560 PARAMETER Experiment Name: At_Drought_Soil_Dry_P Parameter: Organism Value: A. thaliana
  misc_feature: MA Experiment 20001560 PARAMETER Experiment Name: At_Drought_Soil_Dry_P Parameter: Plant Line Value: WS
  misc_feature: MA Experiment 20001560 PARAMETER Experiment Name: At_Drought_Soil_Dry_P Parameter: Post Timepoint (hr) Value: None
  misc_feature: MA Experiment 20001560 PARAMETER Experiment Name: At_Drought_Soil_Dry_P Parameter: Post-Treatment Value: None
  misc_feature: MA Experiment 20001560 PARAMETER Experiment Name: At_Drought_Soil_Dry_P Parameter: Timepoint (day) Value: 14
  misc_feature: MA Experiment 20001560 PARAMETER Experiment Name: At_Drought_Soil_Dry_P Parameter: Treatment Value: Drought vs. No Drought
aacagtatcaaatcaaaaccatcacagcaaaaaaaactcactccctagaaaagtttgaaaatggcgaaggcagataagaaaccagcggagaagaaaccggcagagaaaactccggcagccgaaccagcagcagcggcagagaagaaaccaaaagccggaaagaaactcccgaaggaaccagccggcgccggagacaagaagaagaagagatcaaagaagaacgttgagacatacaagatctacatcttcaaggtgttgaagcaagttcatccagatatcggaatctccagcaaagccatgggaatcatgaacagtttcatcaatgatatctttgagaaacttgctggtgagtcttcgaagcttgcgaggtacaacaagaagccgacgattacttctagggagattcagactgcggtgagacttgtgttgcctggagagttggcgaaacatgctgtttctgaagggactaaggcggttacgaagtttacgagttcttagatttggaatgtggttttgtaatggaggagaagtagtagtagtagttggaatgtgaaatagggtttatgcttttgggtatctttgagggttatgtaatatgggaattagggttttaatttatggcacggctatgaaatctacttaattttccaatgttcgattgcaatttc

SEQ ID NO: 97889 - protein, 145 aa, Arabidopsis thaliana
  peptide (1)..(145): Ceres Seq. ID no. 13576476
  misc_feature (26)..(144): Pfam Name: Core histone H2A/H2B/H3/H4 Pfam Description: Core histone H2A/H2B/H3/H4
  misc_feature (1)..(145): Homolog of NCBI NO: 15237148 NR Description: histone H2B, putative [Arabidopsis thaliana]
  misc_feature (1)..(145): Homolog of NCBI NO: 1617013 NR Description: histone H2B like protein [Arabidopsis thaliana]
  misc_feature (7)..(145): Homolog of NCBI NO: 7439754 NR Description: histone H2B-3 - tomato (fragment)
  misc_feature (3)..(145): Homolog of NCBI NO: 7387726 NR Description: Histone H2B >gi|7439759|pir||T09722 histone H2B1 upland cotton >gi|2558962|gb|AAB97163.1| histone H2B1 [Gossypium
  misc_feature (3)..(145): Homolog of NCBI NO: 15231313 NR Description: histone H2B, putative [Arabidopsis thaliana]
  misc_feature (3)..(145): Homolog of NCBI NO: 15231304 NR Description: histone H2B [Arabidopsis thaliana]
  misc_feature (3)..(145): Homolog of NCBI NO: 15238563 NR Description: histone H2B [Arabidopsis thaliana] Histone H2B >gi|9757912|dbj|BAB08359.1| contains similarity to H2B~gene_id:MMN10.15 [Arabidopsis thaliana]
  misc_feature (3)..(145): Homolog of NCBI NO: 15223016 NR Description: histone H2B, putative [Arabidopsis thaliana]
  misc_feature (3)..(145): Homolog of NCBI NO: 21617908 NR Description: histone H2B [Arabidopsis thaliana]
  misc_feature (3)..(145): Homolog of NCBI NO: 15226943 NR Description: histone H2B, putative [Arabidopsis thaliana]
MAKADKKPAEKKPAEKTPAAEPAAAAEKKPKAGKKLPKEPAGAGDKKKKRSKKNVETYKIYIFKVLKQVHPDIGISSKAMGIMNSFINDIFEKLAGESSKLARYNKKPTITSREIQTAVRLVLPGELAKHAVSEGTKAVTKFTSS

SEQ ID NO: 97890 - DNA, 1470 bp, Arabidopsis thaliana
  misc_feature (1)..(1470): Ceres Seq. ID no. 13576477
  misc_feature: MA Experiment ID: 108461 Result: Up-regulated in Transcription
  misc_feature: MA Experiment 108461 PARAMETER Experiment Name: At_Germinating_Seeds_cDNA_P Parameter: Age (day) Value: 1 vs. 0
  misc_feature: MA Experiment 108461 PARAMETER Experiment Name: At_Germinating_Seeds_cDNA_P Parameter: Tissue Value: Germinating Seeds
  misc_feature: MA Experiment ID: 108462 Result: Up-regulated in Transcription
  misc_feature: MA Experiment 108462 PARAMETER Experiment Name: At_Germinating_Seeds_cDNA_P Parameter: Age (day) Value: 2 vs. 0
  misc_feature: MA Experiment 108462 PARAMETER Experiment Name: At_Germinating_Seeds_cDNA_P Parameter: Tissue Value: Germinating Seeds
  misc_feature: MA Experiment ID: 108463 Result: Up-regulated in Transcription
  misc_feature: MA Experiment 108463 PARAMETER Experiment Name: At_Germinating_Seeds_cDNA_P Parameter: Age (day) Value: 3 vs. 0
  misc_feature: MA Experiment 108463 PARAMETER Experiment Name: At_Germinating_Seeds_cDNA_P Parameter: Tissue Value: Germinating Seeds
  misc_feature: MA Experiment ID: 108464 Result: Up-regulated in Transcription
  misc_feature: MA Experiment 108464 PARAMETER Experiment Name: At_Germinating_Seeds_cDNA_P Parameter: Age (day) Value: 4 vs. 0
  misc_feature: MA Experiment 108464 PARAMETER Experiment Name: At_Germinating_Seeds_cDNA_P Parameter: Tissue Value: Germinating Seeds
  misc_feature: MA Experiment ID: 108573 Result: Up-regulated in Transcription
  misc_feature: MA Experiment 108573 PARAMETER Experiment Name: At_Drought_cDNA_P Parameter: Timepoint (hr) Value: 6
  misc_feature: MA Experiment 108573 PARAMETER Experiment Name: At_Drought_cDNA_P Parameter: Tissue Value: Aerial
  misc_feature: MA Experiment 108573 PARAMETER Experiment Name: At_Drought_cDNA_P Parameter: Treatment Value: Drought vs. No Drought
  misc_feature: MA Experiment ID: 108574 Result: Down-regulated in Transcription
  misc_feature: MA Experiment 108574 PARAMETER Experiment Name: At_Wounding__cDNA_P Parameter: Timepoint (hr) Value: 1
  misc_feature: MA Experiment 108574 PARAMETER Experiment Name: At_Wounding__cDNA_P Parameter: Tissue Value: Aerial
  misc_feature: MA Experiment 108574 PARAMETER Experiment Name: At_Wounding__cDNA_P Parameter: Treatment Value: Wounding vs. No Wounding
  misc_feature: MA Experiment ID: 20000111 Result: Down-regulated in Transcription
  misc_feature: MA Experiment 20000111 PARAMETER Experiment Name: At_42deg_Heat_cDNA_P Parameter: Temperature (deg C) Value: 42 vs. 22
  misc_feature: MA Experiment 20000111 PARAMETER Experiment Name: At_42deg_Heat_cDNA_P Parameter: Timepoint (hr) Value: 6
  misc_feature: MA Experiment 20000111 PARAMETER Experiment Name: At_42deg_Heat_cDNA_P Parameter: Tissue Value: Aerial
  misc_feature: MA Experiment ID: 20000113 Result: Down-regulated in Transcription
  misc_feature: MA Experiment 20000113 PARAMETER Experiment Name: At_42deg_Heat_cDNA_P Parameter: Temperature (deg C) Value: 42 vs. 22
  misc_feature: MA Experiment 20000113 PARAMETER Experiment Name: At_42deg_Heat_cDNA_P Parameter: Timepoint (hr) Value: 8
  misc_feature: MA Experiment 20000113 PARAMETER Experiment Name: At_42deg_Heat_cDNA_P Parameter: Tissue Value: Aerial
  misc_feature: MA Experiment ID: 20000451 Result: Up-regulated in Transcription
  misc_feature: MA Experiment 20000451 PARAMETER Experiment Name: At_CS6879_Shoots-Roots_P Parameter: Age (day) Value: 14
  misc_feature: MA Experiment 20000451 PARAMETER Experiment Name: At_CS6879_Shoots-Roots_P Parameter: Organism Value: A. thaliana
  misc_feature: MA Experiment 20000451 PARAMETER Experiment Name: At_CS6879_Shoots-Roots_P Parameter: Plant Line Value: CS6879 vs. WS
  misc_feature: MA Experiment 20000451 PARAMETER Experiment Name: At_CS6879_Shoots-Roots_P Parameter: Tissue Value: Roots
  misc_feature: MA Experiment ID: 20000452 Result: Up-regulated in Transcription
  misc_feature: MA Experiment 20000452 PARAMETER Experiment Name: At_CS6879_Shoots-Roots_P Parameter: Age (day) Value: 14
  misc_feature: MA Experiment 20000452 PARAMETER Experiment Name: At_CS6879_Shoots-Roots_P Parameter: Organism Value: A. thaliana
  misc_feature: MA Experiment 20000452 PARAMETER Experiment Name: At_CS6879_Shoots-Roots_P Parameter: Plant Line Value: CS6879 vs. WS
  misc_feature: MA Experiment 20000452 PARAMETER Experiment Name: At_CS6879_Shoots-Roots_P Parameter: Tissue Value: Shoots
  misc_feature: MA Experiment ID: 20001248 Result: Up-regulated in Transcription
  misc_feature: MA Experiment 20001248 PARAMETER Experiment Name: At_Far-red-induction_P Parameter: Age (day) Value: 7
  misc_feature: MA Experiment 20001248 PARAMETER Experiment Name: At_Far-red-induction_P Parameter: Light Value: Far-red vs. White
  misc_feature: MA Experiment 20001248 PARAMETER Experiment Name: At_Far-red-induction_P Parameter: Organism Value: A. thaliana
  misc_feature: MA Experiment 20001248 PARAMETER Experiment Name: At_Far-red-induction_P Parameter: Plant Line Value: Columbia
  misc_feature: MA Experiment 20001248 PARAMETER Experiment Name: At_Far-red-induction_P Parameter: Timepoint (hr) Value: 4
  misc_feature: MA Experiment 20001248 PARAMETER Experiment Name: At_Far-red-induction_P Parameter: Tissue Value: Whole Plant
aaaagcaatttagaacttataaaaaggaaagccatttcttcggcatcctcttcaccaactggcataagcagaagaagaagaagaagacaacgacgacgactttgaagaagaacaaactcttccttcaatctcaatctctctctcagatgggttgtggtggaactttgttctacccacttctcataactctctccgttgctctaatcacttacaacatcatcatctccgctaatgctcctctcaaacaaggcttcccaggccgatcttcttcctccgatatctccattgacccagtcatcgaattaccacgtggcggcggatccagaaacaacgatggtaaaaggataagacttttccacacggcggtgacggcgtctgattccgtctataacacttggcaatgtagagttatgtactattggttcaaaaagattcaagcttctgctggacccggttctgaaatgggtgggtttactcggatcttgcattccggtaaaccggatcagtatatggatgagattcctacttttgttgctcagcctttaccttctgggatggatcagggttatgttgtgttgaataggccatgggcatttgtacaatggcttcaacaaacagatataaaagaagattatattttgatgtctgagcctgatcatatcattgttaaacctataccaaatttggctaaagatgggcttggagctgcgtttcctttcttttacattgaaccgaaaaagtatgagaaggtgttgaggaagtattatcctgaagtgagaggaccggttactaatatcgatccgataggaaactctcctgtcattgttggaaaggatgctttgaagaagattgctccaacttggatgaatgtttctttggctatgaagaaggatcctgaagcagacaaggcttttggatgggttcttgaaatgtatgcttatgctgtctcatctgcattgcatggtgttagcaatattctacacaaagacttcatgattcagccaccatgggatatagaggttggtgacaagtacatcatacactacacttatggatgtgattatgatatgaagggtaaattaacttatgggaaaatcggggaatggagatttgacaaaagatcgtatgatagcaaaccaccaccaaggaaccttacaatgcctccacctggtgtttcacaaagtgtggtaacactagtgaagatgataaatgaagccacggccaacataccaaactggggatcataaagagacagagagagagaaaccgtaatctatatgtacctgtgagttgctcctttcttttcaaaataccttgtcctgctctttagtttctcctttggttgtggctaggtttgtaacatatatagtgattcaaacaaagcatttctttggcattttacttctctaattcagtctggtctccactagattttgttgtcctctagcatctcaaaggataaattacaat

SEQ ID NO: 97891 - protein, 414 aa, Arabidopsis thaliana
  peptide (1)..(414): Ceres Seq. ID no. 13576478
  misc_feature (49)..(414): Homolog of NCBI NO: 22327055 NR Description: expressed protein [Arabidopsis thaliana] Unknown protein [Arabidopsis thaliana]
  misc_feature (59)..(414): Homolog of NCBI NO: 24413996 NR Description: hypothetical protein~similar to Arabidopsis
  misc_feature (49)..(412): Homolog of NCBI NO: 15240642 NR Description: expressed protein [Arabidopsis thaliana] expressed protein [Arabidopsis thaliana] putative protein [Arabidopsis thaliana]
  misc_feature (231)..(414): Homolog of NCBI NO: 30682704 NR Description: expressed protein [Arabidopsis thaliana]
  misc_feature (49)..(189): Homolog of NCBI NO: 30682704 NR Description: expressed protein [Arabidopsis thaliana]
  misc_feature (231)..(396): Homolog of NCBI NO: 25371351 NR Description: hypothetical protein At2g25260 [imported] - thaliana >gi|4567251|gb|AAD23665.1| unknown protein [Arabidopsis
  misc_feature (49)..(189): Homolog of NCBI NO: 25371351 NR Description: hypothetical protein At2g25260 [imported] - thaliana >gi|4567251|gb|AAD23665.1| unknown protein [Arabidopsis
  misc_feature (59)..(213): Homolog of NCBI NO: 34903224 NR Description: unnamed protein product [Oryza sativa (japonica group)] >gi|6815101|dbj|BAA90387.1| unnamed protein product
  misc_feature (119)..(375): Homolog of NCBI NO: 22330795 NR Description: expressed protein [Arabidopsis thaliana] unknown protein [Arabidopsis thaliana]
KQFRTYKKESHFFGILFTNWHKQKKKKKTTTTTLKKNKLFLQSQSLSQMGCGGTLFYPLLITLSVALITYNIIISANAPLKQGFPGRSSSSDISIDPVIELPRGGGSRNNDGKRIRLFHTAVTASDSVYNTWQCRVMYYWFKKIQASAGPGSEMGGFTRILHSGKPDQYMDEIPTFVAQPLPSGMDQGYVVLNRPWAFVQWLQQTDIKEDYILMSEPDHIIVKPIPNLAKDGLGAAFPFFYIEPKKYEKVLRKYYPEVRGPVTNIDPIGNSPVIVGKDALKKIAPTWMNVSLAMKKDPEADKAFGWVLEMYAYAVSSALHGVSNILHKDFMIQPPWDIEVGDKYIIHYTYGCDYDMKGKLTYGKIGEWRFDKRSYDSKPPPRNLTMPPPGVSQSVVTLVKMINEATANIPNWGS

SEQ ID NO: 97892 - protein, 366 aa, Arabidopsis thaliana
  peptide (1)..(366): Ceres Seq. ID no. 13576479
  misc_feature (1)..(366): Homolog of NCBI NO: 22327055 NR Description: expressed protein [Arabidopsis thaliana] Unknown protein [Arabidopsis thaliana]
  misc_feature (11)..(366): Homolog of NCBI NO: 24413996 NR Description: hypothetical protein~similar to Arabidopsis
  misc_feature (1)..(364): Homolog of NCBI NO: 15240642 NR Description: expressed protein [Arabidopsis thaliana] expressed protein [Arabidopsis thaliana] putative protein [Arabidopsis thaliana]
  misc_feature (183)..(366): Homolog of NCBI NO: 30682704 NR Description: expressed protein [Arabidopsis thaliana]
  misc_feature (1)..(141): Homolog of NCBI NO: 30682704 NR Description: expressed protein [Arabidopsis thaliana]
  misc_feature (183)..(348): Homolog of NCBI NO: 25371351 NR Description: hypothetical protein At2g25260 [imported] - thaliana >gi|4567251|gb|AAD23665.1| unknown protein [Arabidopsis
  misc_feature (1)..(141): Homolog of NCBI NO: 25371351 NR Description: hypothetical protein At2g25260 [imported] - thaliana >gi|4567251|gb|AAD23665.1| unknown protein [Arabidopsis
  misc_feature (11)..(165): Homolog of NCBI NO: 34903224 NR Description: unnamed protein product [Oryza sativa (japonica group)] >gi|6815101|dbj|BAA90387.1| unnamed protein product
  misc_feature (71)..(327): Homolog of NCBI NO: 22330795 NR Description: expressed protein [Arabidopsis thaliana] unknown protein [Arabidopsis thaliana]
MGCGGTLFYPLLITLSVALITYNIIISANAPLKQGFPGRSSSSDISIDPVIELPRGGGSRNNDGKRIRLFHTAVTASDSVYNTWQCRVMYYWFKKIQASAGPGSEMGGFTRILHSGKPDQYMDEIPTFVAQPLPSGMDQGYVVLNRPWAFVQWLQQTDIKEDYILMSEPDHIIVKPIPNLAKDGLGAAFPFFYIEPKKYEKVLRKYYPEVRGPVTNIDPIGNSPVIVGKDALKKIAPTWMNVSLAMKKDPEADKAFGWVLEMYAYAVSSALHGVSNILHKDFMIQPPWDIEVGDKYIIHYTYGCDYDMKGKLTYGKIGEWRFDKRSYDSKPPPRNLTMPPPGVSQSVVTLVKMINEATANIPNWGS

SEQ ID NO: 97893 - protein, 278 aa, Arabidopsis thaliana; identical to SEQ ID NO: 24715
  peptide (1)..(278): Ceres Seq. ID no. 13576480
  misc_feature (1)..(278): Homolog of NCBI NO: 22327055 NR Description: expressed protein [Arabidopsis thaliana] Unknown protein [Arabidopsis thaliana]
  misc_feature (1)..(278): Homolog of NCBI NO: 24413996 NR Description: hypothetical protein~similar to Arabidopsis
  misc_feature (1)..(276): Homolog of NCBI NO: 15240642 NR Description: expressed protein [Arabidopsis thaliana] expressed protein [Arabidopsis thaliana] putative protein [Arabidopsis thaliana]
  misc_feature (95)..(278): Homolog of NCBI NO: 30682704 NR Description: expressed protein [Arabidopsis thaliana]
  misc_feature (1)..(53): Homolog of NCBI NO: 30682704 NR Description: expressed protein [Arabidopsis thaliana]
  misc_feature (95)..(260): Homolog of NCBI NO: 25371351 NR Description: hypothetical protein At2g25260 [imported] - thaliana >gi|4567251|gb|AAD23665.1| unknown protein [Arabidopsis
  misc_feature (1)..(53): Homolog of NCBI NO: 25371351 NR Description: hypothetical protein At2g25260 [imported] - thaliana >gi|4567251|gb|AAD23665.1| unknown protein [Arabidopsis
  misc_feature (1)..(77): Homolog of NCBI NO: 34903224 NR Description: unnamed protein product [Oryza sativa (japonica group)] >gi|6815101|dbj|BAA90387.1| unnamed protein product
  misc_feature (1)..(239): Homolog of NCBI NO: 22330795 NR Description: expressed protein [Arabidopsis thaliana] unknown protein [Arabidopsis thaliana]

SEQ ID NO: 97894 - DNA, 789 bp, Arabidopsis thaliana
  misc_feature (1)..(789): Ceres Seq. ID no. 13576485
  misc_feature: MA Experiment ID: 20001904 Result: Up-regulated in Transcription
  misc_feature: MA Experiment 20001904 PARAMETER Experiment Name: At_Drought_Reproduction_P Parameter: Age (day) Value: 37
  misc_feature: MA Experiment 20001904 PARAMETER Experiment Name: At_Drought_Reproduction_P Parameter: Organism Value: A. thaliana
  misc_feature: MA Experiment 20001904 PARAMETER Experiment Name: At_Drought_Reproduction_P Parameter: Plant Line Value: WS
  misc_feature: MA Experiment 20001904 PARAMETER Experiment Name: At_Drought_Reproduction_P Parameter: Timepoint (day) Value: 7
  misc_feature: MA Experiment 20001904 PARAMETER Experiment Name: At_Drought_Reproduction_P Parameter: Tissue Value: Rosettes
  misc_feature: MA Experiment 20001904 PARAMETER Experiment Name: At_Drought_Reproduction_P Parameter: Treatment Value: Drought vs. No Drought
  misc_feature: MA Experiment ID: 20001905 Result: Up-regulated in Transcription
  misc_feature: MA Experiment 20001905 PARAMETER Experiment Name: At_Drought_Reproduction_P Parameter: Age (day) Value: 40
  misc_feature: MA Experiment 20001905 PARAMETER Experiment Name: At_Drought_Reproduction_P Parameter: Organism Value: A. thaliana
  misc_feature: MA Experiment 20001905 PARAMETER Experiment Name: At_Drought_Reproduction_P Parameter: Plant Line Value: WS
  misc_feature: MA Experiment 20001905 PARAMETER Experiment Name: At_Drought_Reproduction_P Parameter: Timepoint (day) Value: 10
  misc_feature: MA Experiment 20001905 PARAMETER Experiment Name: At_Drought_Reproduction_P Parameter: Tissue Value: Rosettes
  misc_feature: MA Experiment 20001905 PARAMETER Experiment Name: At_Drought_Reproduction_P Parameter: Treatment Value: Drought vs. No Drought
gcaaatcgtaaaccgccacaaaaccgaaaaaaacactaattgtgctttccctttagattcatttgtattttcttttggagcttttgaacaatggagtcatcacaagcaacgacgaagccaacgagaggagcaggaggaaggaaaggtggagataggaagaagagtgttagtaaatctgttaaagctggtcttcaatttcccgttggtcgtatcgctcgttacttgaagaaaggtcggtacgctctccgatacggttccggtgctccggtttacctcgccgccgttctcgaatacctagccgccgaggtacttgagctagctgggaacgcagcgagagataataagaagaacaggataaaccctaggcatctatgtttagcgataaggaacgatgaggaattggggagattgcttcatggagttactattgctagtggtggtgttcttccaaacattaatccagttcttcttcctaagaaatcaacagcttcttcttctcaagcggagaaagcttctgctaccaaatctcctaagaaggcttgataaagaatagtatcgatgttgctttttggttatattcggatcttagatgaagaagaagaagaagaagaaacaacttgttttttgttttagaggatttgtgtaggtatctgaaatcttcttctctttgttttggtttgtcttatgtaaaaaccatgggaagatgattatgtttgttaacgcaatttgtaatggaaaataattaagttctgggattagtaacttcatctgtctaattaatttctgggt

SEQ ID NO: 97895 - protein, 150 aa, Arabidopsis thaliana; identical to SEQ ID NO: 27208
  peptide (1)..(150): Ceres Seq. ID no. 13576486
  misc_feature (6)..(130): Pfam Name: Core histone H2A/H2B/H3/H4 Pfam Description: Core histone H2A/H2B/H3/H4
  misc_feature (1)..(150): Homolog of NCBI NO: 15241016 NR Description: histone H2A, putative [Arabidopsis thaliana] AT5g27670/F15A18_130 [Arabidopsis thaliana]
  misc_feature (1)..(150): Homolog of NCBI NO: 5777792 NR Description: histone H2A [Brassica napus]
  misc_feature (5)..(150): Homolog of NCBI NO: 27529852 NR Description: H2A histone [Nicotiana tabacum]
  misc_feature (8)..(150): Homolog of NCBI NO: 122003 NR Description: HISTONE H2A >gi|82089|pir||JQ1182 histone H2A.1 -
  misc_feature (6)..(150): Homolog of NCBI NO: 122006 NR Description: HISTONE H2A >gi|81906|pir||JQ1183 histone H2A -
  misc_feature (6)..(150): Homolog of NCBI NO: 729669 NR Description: Histone H2A >gi|2118992|pir||S60474 histone H2A -
  misc_feature (9)..(150): Homolog of NCBI NO: 122007 NR Description: Histone H2A >gi|100161|pir||S11498 histone H2A -
  misc_feature (9)..(150): Homolog of NCBI NO: 34914498 NR Description: putative histone H2A [Oryza sativa (japonica group)] >gi|13873032|dbj|BAB44136.1| putative histone H2A [Oryza
  misc_feature (9)..(150): Homolog of NCBI NO: 7649159 NR Description: histone H2A [Euphorbia esula]
  misc_feature (9)..(150): Homolog of NCBI NO: 729671 NR Description: Histone H2A >gi|7439704|pir||T02076 histone H2A -

SEQ ID NO: 97896 - DNA, 1066 bp, Arabidopsis thaliana
  misc_feature (1)..(1066): Ceres Seq. ID no. 13576487
  misc_feature: MA Experiment ID: 108461 Result: Up-regulated in Transcription
  misc_feature: MA Experiment 108461 PARAMETER Experiment Name: At_Germinating_Seeds_cDNA_P Parameter: Age (day) Value: 1 vs. 0
  misc_feature: MA Experiment 108461 PARAMETER Experiment Name: At_Germinating_Seeds_cDNA_P Parameter: Tissue Value: Germinating Seeds
  misc_feature: MA Experiment ID: 108462 Result: Up-regulated in Transcription
  misc_feature: MA Experiment 108462 PARAMETER Experiment Name: At_Germinating_Seeds_cDNA_P Parameter: Age (day) Value: 2 vs. 0
  misc_feature: MA Experiment 108462 PARAMETER Experiment Name: At_Germinating_Seeds_cDNA_P Parameter: Tissue Value: Germinating Seeds
  misc_feature: MA Experiment ID: 108464 Result: Up-regulated in Transcription
  misc_feature: MA Experiment 108464 PARAMETER Experiment Name: At_Germinating_Seeds_cDNA_P Parameter: Age (day) Value: 4 vs. 0
  misc_feature: MA Experiment 108464 PARAMETER Experiment Name: At_Germinating_Seeds_cDNA_P Parameter: Tissue Value: Germinating Seeds
  misc_feature: MA Experiment ID: 20000112 Result: Up-regulated in Transcription
  misc_feature: MA Experiment 20000112 PARAMETER Experiment Name: At_42deg_Heat_cDNA_P Parameter: Temperature (deg C) Value: 42 vs. 22
  misc_feature: MA Experiment 20000112 PARAMETER Experiment Name: At_42deg_Heat_cDNA_P Parameter: Timepoint (hr) Value: 2
  misc_feature: MA Experiment 20000112 PARAMETER Experiment Name: At_42deg_Heat_cDNA_P Parameter: Tissue Value: Aerial
  misc_feature: MA Experiment ID: 20000144 Result: Up-regulated in Transcription
  misc_feature: MA Experiment 20000144 PARAMETER Experiment Name: At_42deg_Heat_cDNA_P Parameter: Temperature (deg C) Value: 42 vs. 22
  misc_feature: MA Experiment 20000144 PARAMETER Experiment Name: At_42deg_Heat_cDNA_P Parameter: Timepoint (hr) Value: 1
  misc_feature: MA Experiment 20000144 PARAMETER Experiment Name: At_42deg_Heat_cDNA_P Parameter: Tissue Value: Aerial
  misc_feature: MA Experiment ID: 20000171 Result: Up-regulated in Transcription
  misc_feature: MA Experiment 20000171 PARAMETER Experiment Name: At_42deg_Heat_P Parameter: Age (day) Value: 14
  misc_feature: MA Experiment 20000171 PARAMETER Experiment Name: At_42deg_Heat_P Parameter: Organism Value: A. thaliana
  misc_feature: MA Experiment 20000171 PARAMETER Experiment Name: At_42deg_Heat_P Parameter: Plant Line Value: WS
  misc_feature: MA Experiment 20000171 PARAMETER Experiment Name: At_42deg_Heat_P Parameter: Temperature (deg C) Value: 42 vs. 22
  misc_feature: MA Experiment 20000171 PARAMETER Experiment Name: At_42deg_Heat_P Parameter: Timepoint (hr) Value: 1
  misc_feature: MA Experiment 20000171 PARAMETER Experiment Name: At_42deg_Heat_P Parameter: Tissue Value: Aerial
  misc_feature: MA Experiment ID: 20000495 Result: Up-regulated in Transcription
  misc_feature: MA Experiment 20000495 PARAMETER Experiment Name: At_Guard_Cells_P Parameter: Harvest Date Value: 8/2/2002
  misc_feature: MA Experiment 20000495 PARAMETER Experiment Name: At_Guard_Cells_P Parameter: Organism Value: A. thaliana
  misc_feature: MA Experiment 20000495 PARAMETER Experiment Name: At_Guard_Cells_P Parameter: Tissue Value: Guard Cells vs. Leaves
  misc_feature: MA Experiment ID: 20001911 Result: Down-regulated in Transcription
  misc_feature: MA Experiment 20001911 PARAMETER Experiment Name: At_Drought_Reproduction_P Parameter: Age (day) Value: 40
  misc_feature: MA Experiment 20001911 PARAMETER Experiment Name: At_Drought_Reproduction_P Parameter: Organism Value: A. thaliana
  misc_feature: MA Experiment 20001911 PARAMETER Experiment Name: At_Drought_Reproduction_P Parameter: Plant Line Value: WS
  misc_feature: MA Experiment 20001911 PARAMETER Experiment Name: At_Drought_Reproduction_P Parameter: Timepoint (day) Value: 10
  misc_feature: MA Experiment 20001911 PARAMETER Experiment Name: At_Drought_Reproduction_P Parameter: Tissue Value: Flowers
  misc_feature: MA Experiment 20001911 PARAMETER Experiment Name: At_Drought_Reproduction_P Parameter: Treatment Value: Drought vs. No Drought
atttcaaaccaaacagatttcaagaacacaaaaacagagttaaaactctcatctctcccaaaaaagatgcctttaagcaacaatgtaattggttgcataaacttcatcaccgtcctcctctccattccggtcatcggcgccggaatctggctagccataggaacagtaaactcatgcgtcaagcttcttcaatggccagtaataatcctcggagtcttaatcctcttagtgggtctcgctggtttcattggagggttttggagaatcacatggcttcttgttgtttacttaatcgccatgcttattctcattgtacttttgggttgccttgtcggatttatttacatggttaccataagaggctctggtcatccagaaccaagtagagcttatcttgagtatagtcttcaagatttctctggttggttacgtagaagagttcagagatcttataaatgggaaaggattcgtacttgtttgagtacaactaccatttgccctgaactaaatcagagatacactttggctcaagatttcttcaatgctcatcttgatcccattcaatctggttgctgcaagcccccaacaaaatgtggattcacatttgttaatcctacttattggataagtcccatagatatgtctgctgatatggattgtctaaattggagcaatgaccaaaacactttgtgttacacttgtgattcttgtaaagccggcttgctcgcaaatattaaggtagattggttaaaagcggatatctttctactcttggcgcttatcggattgattatcgtctacattatcgggtgctgcgcattccgtaatgcggaaactgaggatattttcaggaagtacaagcagggttatacttgatcaagatgagaagtttagtggcaaaactgcgaggaattttaatatttactggattcctgtattttagtttctctacgttttggcccctgtagtatgtttttgtgtgaactacctgaacattcgttgtaactggaagattatgttgtatatctatctttgatttgggtttgtgaaacttaactaattatct

SEQ ID NO: 97897 - protein, 291 aa, Arabidopsis thaliana
  peptide (1)..(291): Ceres Seq. ID no. 13576488
  misc_feature (25)..(263): Pfam Name: Tetraspanin family Pfam Description: Tetraspanin family
  misc_feature (23)..(291): Homolog of NCBI NO: 15237490 NR Description: senescence-associated protein, putative
  misc_feature (23)..(291): Homolog of NCBI NO: 17979386 NR Description: putative senescence-associated protein 5
  misc_feature (23)..(290): Homolog of NCBI NO: 15224802 NR Description: senescence-associated protein- related
  misc_feature (26)..(290): Homolog of NCBI NO: 20197174 NR Description: hypothetical protein [Arabidopsis thaliana]
  misc_feature (25)..(290): Homolog of NCBI NO: 29367553 NR Description: senescence-associated protein-like protein [Oryza
  misc_feature (26)..(276): Homolog of NCBI NO: 15234374 NR Description: senescence-associated protein, putative
  misc_feature (23)..(281): Homolog of NCBI NO: 15231187 NR Description: senescence-associated protein family [Arabidopsis
  misc_feature (25)..(287): Homolog of NCBI NO: 3551954 NR Description: senescence-associated protein 5 [Hemerocallis
  misc_feature (27)..(278): Homolog of NCBI NO: 15238641 NR Description: senescence-associated protein family [Arabidopsis
  misc_feature (26)..(281): Homolog of NCBI NO: 15234743 NR Description: senescence-associated protein family [Arabidopsis
ISNQTDFKNTKTELKLSSLPKKMPLSNNVIGCINFITVLLSIPVIGAGIWLAIGTVNSCVKLLQWPVIILGVLILLVGLAGFIGGFWRITWLLVVYLIAMLILIVLLGCLVGFIYMVTIRGSGHPEPSRAYLEYSLQDFSGWLRRRVQRSYKWERIRTCLSTTTICPELNQRYTLAQDFFNAHLDPIQSGCCKPPTKCGFTFVNPTYWISPIDMSADMDCLNWSNDQNTLCYTCDSCKAGLLANIKVDWLKADIFLLLALIGLIIVYIIGCCAFRNAETEDIFRKYKQGYT

SEQ ID NO: 97898 - protein, 269 aa, Arabidopsis thaliana; identical to SEQ ID NO: 79186
  peptide (1)..(269): Ceres Seq. ID no. 13576489
  misc_feature (3)..(241): Pfam Name: Tetraspanin family Pfam Description: Tetraspanin family
  misc_feature (1)..(269): Homolog of NCBI NO: 15237490 NR Description: senescence-associated protein, putative
  misc_feature (1)..(269): Homolog of NCBI NO: 17979386 NR Description: putative senescence-associated protein 5
  misc_feature (1)..(268): Homolog of NCBI NO: 15224802 NR Description: senescence-associated protein- related
  misc_feature (4)..(268): Homolog of NCBI NO: 20197174 NR Description: hypothetical protein [Arabidopsis thaliana]
  misc_feature (3)..(268): Homolog of NCBI NO: 29367553 NR Description: senescence-associated protein-like protein [Oryza
  misc_feature (4)..(254): Homolog of NCBI NO: 15234374 NR Description: senescence-associated protein, putative
  misc_feature (1)..(259): Homolog of NCBI NO: 15231187 NR Description: senescence-associated protein family [Arabidopsis
  misc_feature (3)..(265): Homolog of NCBI NO: 3551954 NR Description: senescence-associated protein 5 [Hemerocallis
  misc_feature (5)..(256): Homolog of NCBI NO: 15238641 NR Description: senescence-associated protein family [Arabidopsis
  misc_feature (4)..(259): Homolog of NCBI NO: 15234743 NR Description: senescence-associated protein family [Arabidopsis

SEQ ID NO: 97899 - protein, 192 aa, Arabidopsis thaliana; identical to SEQ ID NO: 79187
  peptide (1)..(192): Ceres Seq. ID no. 13576490
  misc_feature (1)..(164): Pfam Name: Tetraspanin family Pfam Description: Tetraspanin family
  misc_feature (1)..(192): Homolog of NCBI NO: 15237490 NR Description: senescence-associated protein, putative
  misc_feature (1)..(192): Homolog of NCBI NO: 17979386 NR Description: putative senescence-associated protein 5
  misc_feature (1)..(191): Homolog of NCBI NO: 15224802 NR Description: senescence-associated protein- related
  misc_feature (1)..(191): Homolog of NCBI NO: 20197174 NR Description: hypothetical protein [Arabidopsis thaliana]
  misc_feature (1)..(191): Homolog of NCBI NO: 29367553 NR Description: senescence-associated protein-like protein [Oryza
  misc_feature (1)..(177): Homolog of NCBI NO: 15234374 NR Description: senescence-associated protein, putative
  misc_feature (1)..(182): Homolog of NCBI NO: 15231187 NR Description: senescence-associated protein family [Arabidopsis
  misc_feature (1)..(188): Homolog of NCBI NO: 3551954 NR Description: senescence-associated protein 5 [Hemerocallis
  misc_feature (1)..(179): Homolog of NCBI NO: 15238641 NR Description: senescence-associated protein family [Arabidopsis
  misc_feature (1)..(182): Homolog of NCBI NO: 15234743 NR Description: senescence-associated protein family [Arabidopsis

SEQ ID NO: 97900 - DNA, 942 bp, Arabidopsis thaliana
  misc_feature (1)..(942): Ceres Seq. ID no. 13576491
  misc_feature: MA Experiment ID: 108434 Result: Down-regulated in Transcription
  misc_feature: MA Experiment 108434 PARAMETER Experiment Name: At_Root_Tips_cDNA_P Parameter: Tissue Value: Root Tips
  misc_feature: MA Experiment ID: 108461 Result: Up-regulated in Transcription
  misc_feature: MA Experiment 108461 PARAMETER Experiment Name: At_Germinating_Seeds_cDNA_P Parameter: Age (day) Value: 1 vs. 0
  misc_feature: MA Experiment 108461 PARAMETER Experiment Name: At_Germinating_Seeds_cDNA_P Parameter: Tissue Value: Germinating Seeds
  misc_feature: MA Experiment ID: 108462 Result: Up-regulated in Transcription
  misc_feature: MA Experiment 108462 PARAMETER Experiment Name: At_Germinating_Seeds_cDNA_P Parameter: Age (day) Value: 2 vs. 0
  misc_feature: MA Experiment 108462 PARAMETER Experiment Name: At_Germinating_Seeds_cDNA_P Parameter: Tissue Value: Germinating Seeds
  misc_feature: MA Experiment ID: 108463 Result: Up-regulated in Transcription
  misc_feature: MA Experiment 108463 PARAMETER Experiment Name: At_Germinating_Seeds_cDNA_P Parameter: Age (day) Value: 3 vs. 0
  misc_feature: MA Experiment 108463 PARAMETER Experiment Name: At_Germinating_Seeds_cDNA_P Parameter: Tissue Value: Germinating Seeds
  misc_feature: MA Experiment ID: 108464 Result: Up-regulated in Transcription
  misc_feature: MA Experiment 108464 PARAMETER Experiment Name: At_Germinating_Seeds_cDNA_P Parameter: Age (day) Value: 4 vs. 0
  misc_feature: MA Experiment 108464 PARAMETER Experiment Name: At_Germinating_Seeds_cDNA_P Parameter: Tissue Value: Germinating Seeds
  misc_feature: MA Experiment ID: 108573 Result: Down-regulated in Transcription
  misc_feature: MA Experiment 108573 PARAMETER Experiment Name: At_Drought_cDNA_P Parameter: Timepoint (hr) Value: 6
  misc_feature: MA Experiment 108573 PARAMETER Experiment Name: At_Drought_cDNA_P Parameter: Tissue Value: Aerial
  misc_feature: MA Experiment 108573 PARAMETER Experiment Name: At_Drought_cDNA_P Parameter: Treatment Value: Drought vs. No Drought
  misc_feature: MA Experiment ID: 108577 Result: Down-regulated in Transcription
  misc_feature: MA Experiment 108577 PARAMETER Experiment Name: At_42deg_Heat_cDNA_P Parameter: Temperature (deg C) Value: 42 vs. 22
  misc_feature: MA Experiment 108577 PARAMETER Experiment Name: At_42deg_Heat_cDNA_P Parameter: Timepoint (hr) Value: 6
  misc_feature: MA Experiment 108577 PARAMETER Experiment Name: At_42deg_Heat_cDNA_P Parameter: Tissue Value: Aerial
  misc_feature: MA Experiment ID: 108585 Result: Up-regulated in Transcription
  misc_feature: MA Experiment 108585 PARAMETER Experiment Name: At_5mM_NaNP_cDNA_P Parameter: Timepoint (hr) Value: 6
  misc_feature: MA Experiment 108585 PARAMETER Experiment Name: At_5mM_NaNP_cDNA_P Parameter: Tissue Value: Aerial
  misc_feature: MA Experiment 108585 PARAMETER Experiment Name: At_5mM_NaNP_cDNA_P Parameter: Treatment Value: null
  misc_feature: MA Experiment ID: 20000069 Result: Up-regulated in Transcription
  misc_feature: MA Experiment 20000069 PARAMETER Experiment Name: At_100uM_ABA_Mutants_cDNA_P Parameter: Plant Line Value: CS23
  misc_feature: MA Experiment 20000069 PARAMETER Experiment Name: At_100uM_ABA_Mutants_cDNA_P Parameter: Timepoint (hr) Value: 6
  misc_feature: MA Experiment 20000069 PARAMETER Experiment Name: At_100uM_ABA_Mutants_cDNA_P Parameter: Tissue Value: Aerial
  misc_feature: MA Experiment 20000069 PARAMETER Experiment Name: At_100uM_ABA_Mutants_cDNA_P Parameter: Treatment Value: 100uM ABA vs. No Treatment
  misc_feature: MA Experiment ID: 20000070 Result: Up-regulated in Transcription
  misc_feature: MA Experiment 20000070 PARAMETER Experiment Name: At_100uM_ABA_Mutants_cDNA_P Parameter: Plant Line Value: CS24
  misc_feature: MA Experiment 20000070 PARAMETER Experiment Name: At_100uM_ABA_Mutants_cDNA_P Parameter: Timepoint (hr) Value: 6
  misc_feature: MA Experiment 20000070 PARAMETER Experiment Name: At_100uM_ABA_Mutants_cDNA_P Parameter: Tissue Value: Aerial
  misc_feature: MA Experiment 20000070 PARAMETER Experiment Name: At_100uM_ABA_Mutants_cDNA_P Parameter: Treatment Value: 100uM ABA vs. No Treatment
  misc_feature: MA Experiment ID: 20000087 Result: Up-regulated in Transcription
  misc_feature: MA Experiment 20000087 PARAMETER Experiment Name: At_100uM_ABA_Mutants_cDNA_P Parameter: Plant Line Value: WS
  misc_feature: MA Experiment 20000087 PARAMETER Experiment Name: At_100uM_ABA_Mutants_cDNA_P Parameter: Timepoint (hr) Value: 6
  misc_feature: MA Experiment 20000087 PARAMETER Experiment Name: At_100uM_ABA_Mutants_cDNA_P Parameter: Tissue Value: Aerial
  misc_feature: MA Experiment 20000087 PARAMETER Experiment Name: At_100uM_ABA_Mutants_cDNA_P Parameter: Treatment Value: 100uM ABA vs. No Treatment
  misc_feature: MA Experiment ID: 20000089 Result: Up-regulated in Transcription
  misc_feature: MA Experiment ID: 20000090 Result: Up-regulated in Transcription
  misc_feature: MA Experiment ID: 20000111 Result: Down-regulated in Transcription
  misc_feature: MA Experiment 20000111 PARAMETER Experiment Name: At_42deg_Heat_cDNA_P Parameter: Temperature (deg C) Value: 42 vs. 22
  misc_feature: MA Experiment 20000111 PARAMETER Experiment Name: At_42deg_Heat_cDNA_P Parameter: Timepoint (hr) Value: 6
  misc_feature: MA Experiment 20000111 PARAMETER Experiment Name: At_42deg_Heat_cDNA_P Parameter: Tissue Value: Aerial
  misc_feature: MA Experiment ID: 20000112 Result: Down-regulated in Transcription
  misc_feature: MA Experiment 20000112 PARAMETER Experiment Name: At_42deg_Heat_cDNA_P Parameter: Temperature (deg C) Value: 42 vs. 22
  misc_feature: MA Experiment 20000112 PARAMETER Experiment Name: At_42deg_Heat_cDNA_P Parameter: Timepoint (hr) Value: 2
  misc_feature: MA Experiment 20000112 PARAMETER Experiment Name: At_42deg_Heat_cDNA_P Parameter: Tissue Value: Aerial
  misc_feature: MA Experiment ID: 20000113 Result: Down-regulated in Transcription
  misc_feature: MA Experiment 20000113 PARAMETER Experiment Name: At_42deg_Heat_cDNA_P Parameter: Temperature (deg C) Value: 42 vs. 22
  misc_feature: MA Experiment 20000113 PARAMETER Experiment Name: At_42deg_Heat_cDNA_P Parameter: Timepoint (hr) Value: 8
  misc_feature: MA Experiment 20000113 PARAMETER Experiment Name: At_42deg_Heat_cDNA_P Parameter: Tissue Value: Aerial
  misc_feature: MA Experiment ID: 20000117 Result: Up-regulated in Transcription
  misc_feature: MA Experiment 20000117 PARAMETER Experiment Name: At_100uM_ABA_Mutants_cDNA_P Parameter: Plant Line Value: Columbia
  misc_feature: MA Experiment 20000117 PARAMETER Experiment Name: At_100uM_ABA_Mutants_cDNA_P Parameter: Timepoint (hr) Value: 6
  misc_feature: MA Experiment 20000117 PARAMETER Experiment Name: At_100uM_ABA_Mutants_cDNA_P Parameter: Tissue Value: Aerial
  misc_feature: MA Experiment 20000117 PARAMETER Experiment Name: At_100uM_ABA_Mutants_cDNA_P Parameter: Treatment Value: 100uM ABA vs. No Treatment
  misc_feature: MA Experiment ID: 20000144 Result: Down-regulated in Transcription
  misc_feature: MA Experiment 20000144 PARAMETER Experiment Name: At_42deg_Heat_cDNA_P Parameter: Temperature (deg C) Value: 42 vs. 22
  misc_feature: MA Experiment 20000144 PARAMETER Experiment Name: At_42deg_Heat_cDNA_P Parameter: Timepoint (hr) Value: 1
  misc_feature: MA Experiment 20000144 PARAMETER Experiment Name: At_42deg_Heat_cDNA_P Parameter: Tissue Value: Aerial
  misc_feature: MA Experiment ID: 20000307 Result: Up-regulated in Transcription
  misc_feature: MA Experiment 20000307 PARAMETER Experiment Name: At_Germinating_Seeds_Sub_P Parameter: Age (hr) Value: 24 vs. 0
  misc_feature: MA Experiment 20000307 PARAMETER Experiment Name: At_Germinating_Seeds_Sub_P Parameter: Organism Value: A. thaliana
  misc_feature: MA Experiment 20000307 PARAMETER Experiment Name: At_Germinating_Seeds_Sub_P Parameter: Plant Line Value: WS
  misc_feature: MA Experiment 20000307 PARAMETER Experiment Name: At_Germinating_Seeds_Sub_P Parameter: Tissue Value: Germinating Seeds
  misc_feature: MA Experiment ID: 20000327 Result: Down-regulated in Transcription
  misc_feature: MA Experiment 20000327 PARAMETER Experiment Name: At_42deg_Heat_Sub_P Parameter: Age (day) Value: 14
  misc_feature: MA Experiment 20000327 PARAMETER Experiment Name: At_42deg_Heat_Sub_P Parameter: Organism Value: A. thaliana
  misc_feature: MA Experiment 20000327 PARAMETER Experiment Name: At_42deg_Heat_Sub_P Parameter: Plant Line Value: WS
  misc_feature: MA Experiment 20000327 PARAMETER Experiment Name: At_42deg_Heat_Sub_P Parameter: Temperature (deg C) Value: 42 vs. 22
  misc_feature: MA Experiment 20000327 PARAMETER Experiment Name: At_42deg_Heat_Sub_P Parameter: Timepoint (hr) Value: 1
  misc_feature: MA Experiment 20000327 PARAMETER Experiment Name: At_42deg_Heat_Sub_P Parameter: Tissue Value: Aerial
  misc_feature: MA Experiment ID: 20000328 Result: Down-regulated in Transcription
  misc_feature: MA Experiment 20000328 PARAMETER Experiment Name: At_42deg_Heat_Sub_P Parameter: Age (day) Value: 14
  misc_feature: MA Experiment 20000328 PARAMETER Experiment Name: At_42deg_Heat_Sub_P Parameter: Organism Value: A. thaliana
  misc_feature: MA Experiment 20000328 PARAMETER Experiment Name: At_42deg_Heat_Sub_P Parameter: Plant Line Value: WS
  misc_feature: MA Experiment 20000328 PARAMETER Experiment Name: At_42deg_Heat_Sub_P Parameter: Temperature (deg C) Value: 42 vs. 22
  misc_feature: MA Experiment 20000328 PARAMETER Experiment Name: At_42deg_Heat_Sub_P Parameter: Timepoint (hr) Value: 6
  misc_feature: MA Experiment 20000328 PARAMETER Experiment Name: At_42deg_Heat_Sub_P Parameter: Tissue Value: Aerial
  misc_feature: MA Experiment ID: 20000355 Result: Down-regulated in Transcription
  misc_feature: MA Experiment 20000355 PARAMETER Experiment Name: At_Siliques_Sub_P Parameter: Age (day) Value: 21
  misc_feature: MA Experiment 20000355 PARAMETER Experiment Name: At_Siliques_Sub_P Parameter: Organism Value: A. thaliana
  misc_feature: MA Experiment 20000355 PARAMETER Experiment Name: At_Siliques_Sub_P Parameter: Plant Line Value: WS
  misc_feature: MA Experiment 20000355 PARAMETER Experiment Name: At_Siliques_Sub_P Parameter: Tissue Value: Less Than 5mm Siliques vs. Whole Plant
  misc_feature: MA Experiment ID: 20000440 Result: Down-regulated in Transcription
  misc_feature: MA Experiment 20000440 PARAMETER Experiment Name: At_Closed-Flower__Sub_P Parameter: Tissue Value: Closed Flower vs. Whole Plant
ataaatacgctttctacattttcggatcgttgaacaacatctctctctctctctctctctctctctaaacccattaaagtaatttagctcctcatagattctcgagaagaacacttccatggcgactaaagtatatatcgtgtactactctatgtatggtcatgttgagaaattggctgaagaaataaggaaaggagctgcttctgttgaaggtgttgaagctaaactatggcaggtaccagagacgcttcacgaagaggcactctctaagatgagcgcaccaccaaagagtgaatccccaatcataaccccgaatgagctagctgaagctgatgggtttgtctttggtttcccaacaagatttggtatgatggctgctcagttcaaagcctttttggatgcaaccggtggactctggagggctcaggcactcgccggtaaaccagctggtatcttctacagcactggctctcaaggtggtggccaagaaaccacagcattgacggcaataactcagctggttcaccacgggatgttatttgtcccaatcggttacacatttggcgcgggaatgttcgaaatggagaatgtgaaaggtggaagcccatatggagctggaacatttgcaggagacggttcaaggcagccaacagagctggagctacagcaagcatttcaccaaggccagtacattgccagcatcaccaagaagctcaagggatctactgcttagagcttaaaaagattatggtatcaataagaaaaaaagaaaaaaacagtttggttctgcttttttttatattctttctctttgaatttgggggcttttgtgatttttcgggtttaattatcttaaaatacatgatattatttcacagcaataattcttatcttggttttacgtatagatgataatgtatgatttgtacttgtgttacactc

SEQ ID NO: 97901 - protein, 204 aa, Arabidopsis thaliana [sequence omitted]

SEQ ID NO: 97902 - protein, 193 aa, Arabidopsis thaliana; identical to SEQ ID NO: 39070
  peptide (1)..(193): Ceres Seq. ID no. 13576493
  misc_feature (1)..(193): Homolog of NCBI NO: 15239652 NR Description: quinone reductase, putative [Arabidopsis thaliana]
  misc_feature (1)..(193): Homolog of NCBI NO: 30687535 NR Description: quinone reductase family [Arabidopsis thaliana]
  misc_feature (1)..(192): Homolog of NCBI NO: 5031275 NR Description: unknown [Prunus armeniaca]
  misc_feature (1)..(193): Homolog of NCBI NO: 7445353 NR Description: hypothetical protein M4I22.80 - Arabidopsis >gi|3269288|emb|CAA19721.1| putative protein [Arabidopsis >gi|7269580|emb|CAB79582.1| putative protein [Arabidopsis
  misc_feature (1)..(191): Homolog of NCBI NO: 21068664 NR Description: putative quinone oxidoreductase [Cicer arietinum]
  misc_feature (1)..(191): Homolog of NCBI NO: 38636776 NR Description: putative quinone-oxidoreductase QR2 [Oryza sativa
  misc_feature (1)..(193): Homolog of NCBI NO: 12484052 NR Description: quinone-oxidoreductase QR2 [Triphysaria
  misc_feature (1)..(191): Homolog of NCBI NO: 34910128 NR Description: putative 1,4-benzoquinone reductase [Oryza sativa
  misc_feature (27)..(189): Homolog of NCBI NO: 37724581 NR Description: putative quinone reductase [Vitis vinifera]
  misc_feature (1)..(189): Homolog of NCBI NO: 2564066 NR Description: LEDI-3 protein [Lithospermum erythrorhizon]

SEQ ID NO: 97903 - protein, 153 aa, Arabidopsis thaliana; identical to SEQ ID NO: 39071
  peptide (1)..(153): Ceres Seq. ID no. 13576494
  misc_feature (1)..(153): Homolog of NCBI NO: 15239652 NR Description: quinone reductase, putative [Arabidopsis thaliana]
  misc_feature (1)..(153): Homolog of NCBI NO: 30687535 NR Description: quinone reductase family [Arabidopsis thaliana]
  misc_feature (1)..(152): Homolog of NCBI NO: 5031275 NR Description: unknown [Prunus armeniaca]
  misc_feature (1)..(153): Homolog of NCBI NO: 7445353 NR Description: hypothetical protein M4I22.80 - Arabidopsis >gi|3269288|emb|CAA19721.1| putative protein [Arabidopsis >gi|7269580|emb|CAB79582.1| putative protein [Arabidopsis
  misc_feature (1)..(151): Homolog of NCBI NO: 21068664 NR Description: putative quinone oxidoreductase [Cicer arietinum]
  misc_feature (1)..(151): Homolog of NCBI NO: 38636776 NR Description: putative quinone-oxidoreductase QR2 [Oryza sativa
  misc_feature (1)..(153): Homolog of NCBI NO: 12484052 NR Description: quinone-oxidoreductase QR2 [Triphysaria
  misc_feature (1)..(151): Homolog of NCBI NO: 34910128 NR Description: putative 1,4-benzoquinone reductase [Oryza sativa
  misc_feature (1)..(149): Homolog of NCBI NO: 37724581 NR Description: putative quinone reductase [Vitis vinifera]
  misc_feature (1)..(149): Homolog of NCBI NO: 2564066 NR Description: LEDI-3 protein [Lithospermum erythrorhizon]

SEQ ID NO: 97904 - DNA, 1454 bp, Arabidopsis thaliana
  misc_feature (1)..(1454): Ceres Seq. ID no. 13576499
  misc_feature: MA Experiment ID: 108462 Result: Down-regulated in Transcription
  misc_feature: MA Experiment 108462 PARAMETER Experiment Name: At_Germinating_Seeds_cDNA_P Parameter: Age (day) Value: 2 vs. 0
  misc_feature: MA Experiment 108462 PARAMETER Experiment Name: At_Germinating_Seeds_cDNA_P Parameter: Tissue Value: Germinating Seeds
  misc_feature: MA Experiment ID: 108464 Result: Down-regulated in Transcription
  misc_feature: MA Experiment 108464 PARAMETER Experiment Name: At_Germinating_Seeds_cDNA_P Parameter: Age (day) Value: 4 vs. 0
  misc_feature: MA Experiment 108464 PARAMETER Experiment Name: At_Germinating_Seeds_cDNA_P Parameter: Tissue Value: Germinating Seeds
  misc_feature: MA Experiment ID: 108573 Result: Up-regulated in Transcription
  misc_feature: MA Experiment 108573 PARAMETER Experiment Name: At_Drought_cDNA_P Parameter: Timepoint (hr) Value: 6
  misc_feature: MA Experiment 108573 PARAMETER Experiment Name: At_Drought_cDNA_P Parameter: Tissue Value: Aerial
  misc_feature: MA Experiment 108573 PARAMETER Experiment Name: At_Drought_cDNA_P Parameter: Treatment Value: Drought vs. No Drought
  misc_feature: MA Experiment ID: 108576 Result: Up-regulated in Transcription
  misc_feature: MA Experiment 108576 PARAMETER Experiment Name: At_42deg_Heat_cDNA_P Parameter: Temperature (deg C) Value: 42 vs. 22
  misc_feature: MA Experiment 108576 PARAMETER Experiment Name: At_42deg_Heat_cDNA_P Parameter: Timepoint (hr) Value: 1
  misc_feature: MA Experiment 108576 PARAMETER Experiment Name: At_42deg_Heat_cDNA_P Parameter: Tissue Value: Aerial
  misc_feature: MA Experiment ID: 108579 Result: Down-regulated in Transcription
  misc_feature: MA Experiment 108579 PARAMETER Experiment Name: At_4deg_Cold_cDNA_P Parameter: Temperature (deg C) Value: 4 vs. 22
  misc_feature: MA Experiment 108579 PARAMETER Experiment Name: At_4deg_Cold_cDNA_P Parameter: Timepoint (hr) Value: 6
  misc_feature: MA Experiment 108579 PARAMETER Experiment Name: At_4deg_Cold_cDNA_P Parameter: Tissue Value: Aerial
  misc_feature: MA Experiment ID: 20000070 Result: Up-regulated in Transcription
  misc_feature: MA Experiment 20000070 PARAMETER Experiment Name: At_100uM_ABA_Mutants_cDNA_P Parameter: Plant Line Value: CS24
  misc_feature: MA Experiment 20000070 PARAMETER Experiment Name: At_100uM_ABA_Mutants_cDNA_P Parameter: Timepoint (hr) Value: 6
  misc_feature: MA Experiment 20000070 PARAMETER Experiment Name: At_100uM_ABA_Mutants_cDNA_P Parameter: Tissue Value: Aerial
  misc_feature: MA Experiment 20000070 PARAMETER Experiment Name: At_100uM_ABA_Mutants_cDNA_P Parameter: Treatment Value: 100uM ABA vs. No Treatment
  misc_feature: MA Experiment ID: 20000071 Result: Up-regulated in Transcription
  misc_feature: MA Experiment 20000071 PARAMETER Experiment Name: At_100uM_ABA_Mutants_cDNA_P Parameter: Plant Line Value: CS8104
  misc_feature: MA Experiment 20000071 PARAMETER Experiment Name: At_100uM_ABA_Mutants_cDNA_P Parameter: Timepoint (hr) Value: 6
  misc_feature: MA Experiment 20000071 PARAMETER Experiment Name: At_100uM_ABA_Mutants_cDNA_P Parameter: Tissue Value: Aerial
  misc_feature: MA Experiment 20000071 PARAMETER Experiment Name: At_100uM_ABA_Mutants_cDNA_P Parameter: Treatment Value: 100uM ABA vs. No Treatment
  misc_feature: MA Experiment ID: 20000072 Result: Up-regulated in Transcription
  misc_feature: MA Experiment 20000072 PARAMETER Experiment Name: At_100uM_ABA_Mutants_cDNA_P Parameter: Plant Line Value: CS8105
  misc_feature: MA Experiment 20000072 PARAMETER Experiment Name: At_100uM_ABA_Mutants_cDNA_P Parameter: Timepoint (hr) Value: 6
  misc_feature: MA Experiment 20000072 PARAMETER Experiment Name: At_100uM_ABA_Mutants_cDNA_P Parameter: Tissue Value: Aerial
  misc_feature: MA Experiment 20000072 PARAMETER Experiment Name: At_100uM_ABA_Mutants_cDNA_P Parameter: Treatment Value: 100uM ABA vs. No Treatment
  misc_feature: MA Experiment ID: 20000088 Result: Up-regulated in Transcription
  misc_feature: MA Experiment 20000088 PARAMETER Experiment Name: At_100uM_ABA_Mutants_cDNA_P Parameter: Plant Line Value: Landsberg
  misc_feature: MA Experiment 20000088 PARAMETER Experiment Name: At_100uM_ABA_Mutants_cDNA_P Parameter: Timepoint (hr) Value: 6
  misc_feature: MA Experiment 20000088 PARAMETER Experiment Name: At_100uM_ABA_Mutants_cDNA_P Parameter: Tissue Value: Aerial
  misc_feature: MA Experiment 20000088 PARAMETER Experiment Name: At_100uM_ABA_Mutants_cDNA_P Parameter: Treatment Value: 100uM ABA vs. No Treatment
  misc_feature: MA Experiment ID: 20000089 Result: Up-regulated in Transcription
  misc_feature: MA Experiment ID: 20000090 Result: Up-regulated in Transcription
  misc_feature: MA Experiment ID: 20000093 Result: Up-regulated in Transcription
  misc_feature: MA Experiment 20000093 PARAMETER Experiment Name: At_42deg_Heat_cDNA_P Parameter: Temperature (deg C) Value: 42 vs. 22
  misc_feature: MA Experiment 20000093 PARAMETER Experiment Name: At_42deg_Heat_cDNA_P Parameter: Timepoint (hr) Value: 0.5
  misc_feature: MA Experiment 20000093 PARAMETER Experiment Name: At_42deg_Heat_cDNA_P Parameter: Tissue Value: Aerial
  misc_feature: MA Experiment ID: 20000112 Result: Up-regulated in Transcription
  misc_feature: MA Experiment 20000112 PARAMETER Experiment Name: At_42deg_Heat_cDNA_P Parameter: Temperature (deg C) Value: 42 vs. 22
  misc_feature: MA Experiment 20000112 PARAMETER Experiment Name: At_42deg_Heat_cDNA_P Parameter: Timepoint (hr) Value: 2
  misc_feature: MA Experiment 20000112 PARAMETER Experiment Name: At_42deg_Heat_cDNA_P Parameter: Tissue Value: Aerial
  misc_feature: MA Experiment ID: 20000144 Result: Up-regulated in Transcription
  misc_feature: MA Experiment 20000144 PARAMETER Experiment Name: At_42deg_Heat_cDNA_P Parameter: Temperature (deg C) Value: 42 vs. 22
  misc_feature: MA Experiment 20000144 PARAMETER Experiment Name: At_42deg_Heat_cDNA_P Parameter: Timepoint (hr) Value: 1
  misc_feature: MA Experiment 20000144 PARAMETER Experiment Name: At_42deg_Heat_cDNA_P Parameter: Tissue Value: Aerial
  misc_feature: MA Experiment ID: 20000171 Result: Up-regulated in Transcription
  misc_feature: MA Experiment 20000171 PARAMETER Experiment Name: At_42deg_Heat_P Parameter: Age (day) Value: 14
  misc_feature: MA Experiment 20000171 PARAMETER Experiment Name: At_42deg_Heat_P Parameter: Organism Value: A. thaliana
  misc_feature: MA Experiment 20000171 PARAMETER Experiment Name: At_42deg_Heat_P Parameter: Plant Line Value: WS
  misc_feature: MA Experiment 20000171 PARAMETER Experiment Name: At_42deg_Heat_P Parameter: Temperature (deg C) Value: 42 vs. 22
  misc_feature: MA Experiment 20000171 PARAMETER Experiment Name: At_42deg_Heat_P Parameter: Timepoint (hr) Value: 1
  misc_feature: MA Experiment 20000171 PARAMETER Experiment Name: At_42deg_Heat_P Parameter: Tissue Value: Aerial
  misc_feature: MA Experiment ID: 20000180 Result: Down-regulated in Transcription
  misc_feature: MA Experiment 20000180 PARAMETER Experiment Name: At_Germinating_Seeds_P Parameter: Age (hr) Value: 24 vs. 0
  misc_feature: MA Experiment 20000180 PARAMETER Experiment Name: At_Germinating_Seeds_P Parameter: Tissue Value: Germinating Seeds
  misc_feature: MA Experiment ID: 20000184 Result: Down-regulated in Transcription
  misc_feature: MA Experiment 20000184 PARAMETER Experiment Name: At_Shoots__P Parameter: Age (day) Value: 7
  misc_feature: MA Experiment 20000184 PARAMETER Experiment Name: At_Shoots__P Parameter: Tissue Value: Shoots vs. Whole Plant
  misc_feature: MA Experiment ID: 20000214 Result: Down-regulated in Transcription
  misc_feature: MA Experiment 20000214 PARAMETER Experiment Name: At_4deg_Cold_P Parameter: Timepoint (hr) Value: 6
  misc_feature: MA Experiment ID: 20000227 Result: Down-regulated in Transcription
  misc_feature: MA Experiment 20000227 PARAMETER Experiment Name: At_Root-Tips-vs-Tops_P Parameter: Tissue Value: Root Tips vs. Root Tops
  misc_feature: MA Experiment ID: 20000234 Result: Down-regulated in Transcription
  misc_feature: MA Experiment 20000234 PARAMETER Experiment Name: At_Siliques_P Parameter: Age (day) Value: 21
  misc_feature: MA Experiment 20000234 PARAMETER Experiment Name: At_Siliques_P Parameter: Organism Value: A. thaliana
  misc_feature: MA Experiment 20000234 PARAMETER Experiment Name: At_Siliques_P Parameter: Plant Line Value: WS
  misc_feature: MA Experiment 20000234 PARAMETER Experiment Name: At_Siliques_P Parameter: Tissue Value: Less Than 5mm Siliques vs. Whole Plant
  misc_feature: MA Experiment ID: 20000437 Result: Up-regulated in Transcription
  misc_feature: MA Experiment 20000437 PARAMETER Experiment Name: At_Drought_P Parameter: Age (day) Value: 8
  misc_feature: MA Experiment 20000437 PARAMETER Experiment Name: At_Drought_P Parameter: Organism Value: A. thaliana
  misc_feature: MA Experiment 20000437 PARAMETER Experiment Name: At_Drought_P Parameter: Plant Line Value: WS
  misc_feature: MA Experiment 20000437 PARAMETER Experiment Name: At_Drought_P Parameter: Timepoint (hr) Value: 24
  misc_feature: MA Experiment 20000437 PARAMETER Experiment Name: At_Drought_P Parameter: Tissue Value: Whole Plant
  misc_feature: MA Experiment 20000437 PARAMETER Experiment Name: At_Drought_P Parameter: Treatment Value: Drought vs. No Drought
  misc_feature: MA Experiment ID: 20000438 Result: Down-regulated in Transcription
  misc_feature: MA Experiment 20000438 PARAMETER Experiment Name: At_Shoots__P Parameter: Age (day) Value: 14
  misc_feature: MA Experiment 20000438 PARAMETER Experiment Name: At_Shoots__P Parameter: Tissue Value: Shoots vs. Whole Plant
  misc_feature: MA Experiment ID: 20000452 Result: Down-regulated in Transcription
  misc_feature: MA Experiment 20000452 PARAMETER Experiment Name: At_CS6879_Shoots-Roots_P Parameter: Age (day) Value: 14
  misc_feature: MA Experiment 20000452 PARAMETER Experiment Name: At_CS6879_Shoots-Roots_P Parameter: Organism Value: A. thaliana
  misc_feature: MA Experiment 20000452 PARAMETER Experiment Name: At_CS6879_Shoots-Roots_P Parameter: Plant Line Value: CS6879 vs. WS
  misc_feature: MA Experiment 20000452 PARAMETER Experiment Name: At_CS6879_Shoots-Roots_P Parameter: Tissue Value: Shoots
  misc_feature: MA Experiment ID: 20001560 Result: Down-regulated in Transcription
  misc_feature: MA Experiment 20001560 PARAMETER Experiment Name: At_Drought_Soil_Dry_P Parameter: Age (day) Value: 28
  misc_feature: MA Experiment 20001560 PARAMETER Experiment Name: At_Drought_Soil_Dry_P Parameter: Organism Value: A. thaliana
  misc_feature: MA Experiment 20001560 PARAMETER Experiment Name: At_Drought_Soil_Dry_P Parameter: Plant Line Value: WS
  misc_feature: MA Experiment 20001560 PARAMETER Experiment Name: At_Drought_Soil_Dry_P Parameter: Post Timepoint (hr) Value: None
  misc_feature: MA Experiment 20001560 PARAMETER Experiment Name: At_Drought_Soil_Dry_P Parameter: Post-Treatment Value: None
  misc_feature: MA Experiment 20001560 PARAMETER Experiment Name: At_Drought_Soil_Dry_P Parameter: Timepoint (day) Value: 14
  misc_feature: MA Experiment 20001560 PARAMETER Experiment Name: At_Drought_Soil_Dry_P Parameter: Treatment Value: Drought vs. No Drought
tttttttttttttttccatttattttctcgaatcttcttcttcttcctagattccagcgacttaacaacaacaacaacaacatattctctgctgggtattagattcgaatttctctttttgtgatcagaaatggatcgagctccggtgaccacaggaccgttggatatgccgattatgcacgacagtgatcgatatgacttcgttaaggatattggttctggtaatttcggtgttgctcgtcttatgagagataaactcactaaagagcttgttgctgtcaagtacatcgagagaggagacaagattgatgaaaatgttcaaagggagatcattaaccacaggtcactaaggcatcctaatattgtcagatttaaagaggtcattttgacgccgactcatctggctatcataatggaatatgcttctggcggtgaactttacgagcggatttgcaatgcaggacggtttagtgaagatgaggctcggttcttctttcagcagcttctatctggagtcagttattgtcattcgatgcaaatttgccatcgtgacctgaagctagagaatacattgttggatggaagtcctgctcctcgattaaaaatttgtgattttggatattcaaagtcttctgttcttcattcacaaccaaagtcaactgttggtactcctgcatacatcgctccagaggtactgcttcgtcaggaatatgatggcaagattgcagatgtatggtcatgtggtgtgaccttatacgtcatgttggttggagcgtatccgttcgaagatccagaagagccaagagactatcggaaaacaatacagagaatccttagcgttaaatactcaatccctgatgacatacggatatcacctgaatgctgtcatcttatttcaagaatcttcgtggctgatcccgctaccagaataagcataccagagatcaaaacccatagttggttcttgaagaatctccctgctgatctaatgaacgagagcaacacaggaagccagttccaggagcctgaacaaccaatgcaaagccttgacacaatcatgcaaatcatctctgaagccacaattcccgctgttcgaaaccgttgcctagacgatttcatgactgacaatcttgatcttgacgatgacatggatgactttgactctgaatctgaaatcgacattgacagtagcggagagatagtttacgctctctaataaaaagccttttttaacaaccaaaacacttctctatctgttctaagaccagtagtgttctgatcctctggtttcaaattctaccaatttttgtattgtctctgtttgtttcttgttttcttcatgcacacatatatcatatatgtaatgtaaaatatcatctgtgtatattatatatatattccaatgtcacacaaaagcaaattaacagttaaaacagttgaagcaagttgaggtt

SEQ ID NO: 97905 - protein, 361 aa, Arabidopsis thaliana
  peptide (1)..(361): Ceres Seq. ID no. 13576500
  misc_feature (22)..(278): Pfam Name: Protein kinase domain Pfam Description: Protein kinase domain
  misc_feature (1)..(361): Homolog of NCBI NO: 15240124 NR Description: serine/threonine protein kinase, putative
  misc_feature (13)..(361): Homolog of NCBI NO: 20260398 NR Description: putative protein [Arabidopsis thaliana]
  misc_feature (10)..(361): Homolog of NCBI NO: 15229772 NR Description: protein kinase, putative [Arabidopsis thaliana]
  misc_feature (10)..(361): Homolog of NCBI NO: 21593534 NR Description: protein kinase SPK-2 [Arabidopsis thaliana]
  misc_feature (1)..(361): Homolog of NCBI NO: 18418337 NR Description: protein kinase, putative [Arabidopsis thaliana]
  misc_feature (1)..(361): Homolog of NCBI NO: 7446439 NR Description: probable serine/threonine-specific protein kinase
  misc_feature (11)..(361): Homolog of NCBI NO: 6739629 NR Description: abscisic acid-activated protein kinase [Vicia
  misc_feature (20)..(361): Homolog of NCBI NO: 29164823 NR Description: abcisic acid-inducible protein kinanase [Oryza
  misc_feature (20)..(361): Homolog of NCBI NO: 34906840 NR Description: putative protein kinase HvPKABA1(Abcisic
  misc_feature (20)..(361): Homolog of NCBI NO: 14588571 NR Description: protein kinase HvPKABA1 [Hordeum vulgare subsp. >gi|14588573|dbj|BAB61736.1| protein kinase HvPKABA1 [Hordeum
MDRAPVTTGPLDMPIMHDSDRYDFVKDIGSGNFGVARLMRDKLTKELVAVKYIERGDKIDENVQREIINHRSLRHPNIVRFKEVILTPTHLAIIMEYASGGELYERICNAGRFSEDEARFFFQQLLSGVSYCHSMQICHRDLKLENTLLDGSPAPRLKICDFGYSKSSVLHSQPKSTVGTPAYIAPEVLLRQEYDGKIADVWSCGVTLYVMLVGAYPFEDPEEPRDYRKTIQRILSVKYSIPDDIRISPECCHLISRIFVADPATRISIPEIKTHSWFLKNLPADLMNESNTGSQFQEPEQPMQSLDTIMQIISEATIPAVRNRCLDDFMTDNLDLDDDMDDFDSESEIDIDSSGEIVYAL

SEQ ID NO: 97906 - protein, 349 aa, Arabidopsis thaliana
  peptide (1)..(349): Ceres Seq. ID no. 13576501
  misc_feature (10)..(266): Pfam Name: Protein kinase domain Pfam Description: Protein kinase domain
  misc_feature (1)..(349): Homolog of NCBI NO: 15240124 NR Description: serine/threonine protein kinase, putative
  misc_feature (1)..(349): Homolog of NCBI NO: 20260398 NR Description: putative protein [Arabidopsis thaliana]
  misc_feature (1)..(349): Homolog of NCBI NO: 15229772 NR Description: protein kinase, putative [Arabidopsis thaliana]
  misc_feature (1)..(349): Homolog of NCBI NO: 21593534 NR Description: protein kinase SPK-2 [Arabidopsis thaliana]
  misc_feature (1)..(349): Homolog of NCBI NO: 18418337 NR Description: protein kinase, putative [Arabidopsis thaliana]
  misc_feature (1)..(349): Homolog of NCBI NO: 7446439 NR Description: probable serine/threonine-specific protein kinase
  misc_feature (1)..(349): Homolog of NCBI NO: 6739629 NR Description: abscisic acid-activated protein kinase [Vicia
  misc_feature (8)..(349): Homolog of NCBI NO: 29164823 NR Description: abcisic acid-inducible protein kinanase [Oryza
  misc_feature (8)..(349): Homolog of NCBI NO: 34906840 NR Description: putative protein kinase HvPKABA1(Abcisic
  misc_feature (8)..(349): Homolog of NCBI NO: 14588571 NR Description: protein kinase HvPKABA1 [Hordeum vulgare subsp. >gi|14588573|dbj|BAB61736.1| protein kinase HvPKABA1 [Hordeum
MPIMHDSDRYDFVKDIGSGNFGVARLMRDKLTKELVAVKYIERGDKIDENVQREIINHRSLRHPNIVRFKEVILTPTHLAIIMEYASGGELYERICNAGRFSEDEARFFFQQLLSGVSYCHSMQICHRDLKLENTLLDGSPAPRLKICDFGYSKSSVLHSQPKSTVGTPAYIAPEVLLRQEYDGKIADVWSCGVTLYVMLVGAYPFEDPEEPRDYRKTIQRILSVKYSIPDDIRISPECCHLISRIFVADPATRISIPEIKTHSWFLKNLPADLMNESNTGSQFQEPEQPMQSLDTIMQIISEATIPAVRNRCLDDFMTDNLDLDDDMDDFDSESEIDIDSSGEIVYAL

SEQ ID NO: 97907 - protein, 346 aa, Arabidopsis thaliana
  peptide (1)..(346): Ceres Seq. ID no. 13576502
  misc_feature (7)..(263): Pfam Name: Protein kinase domain Pfam Description: Protein kinase domain
  misc_feature (1)..(346): Homolog of NCBI NO: 15240124 NR Description: serine/threonine protein kinase, putative
  misc_feature (1)..(346): Homolog of NCBI NO: 20260398 NR Description: putative protein [Arabidopsis thaliana]
  misc_feature (1)..(346): Homolog of NCBI NO: 15229772 NR Description: protein kinase, putative [Arabidopsis thaliana]
  misc_feature (1)..(346): Homolog of NCBI NO: 21593534 NR Description: protein kinase SPK-2 [Arabidopsis thaliana]
  misc_feature (1)..(346): Homolog of NCBI NO: 18418337 NR Description: protein kinase, putative [Arabidopsis thaliana]
  misc_feature (1)..(346): Homolog of NCBI NO: 7446439 NR Description: probable serine/threonine-specific protein kinase
  misc_feature (1)..(346): Homolog of NCBI NO: 6739629 NR Description: abscisic acid-activated protein kinase [Vicia
  misc_feature (5)..(346): Homolog of NCBI NO: 29164823 NR Description: abcisic acid-inducible protein kinanase [Oryza
  misc_feature (5)..(346): Homolog of NCBI NO: 34906840 NR Description: putative protein kinase HvPKABA1(Abcisic
  misc_feature (5)..(346): Homolog of NCBI NO: 14588571 NR Description: protein kinase HvPKABA1 [Hordeum vulgare subsp. >gi|14588573|dbj|BAB61736.1| protein kinase HvPKABA1 [Hordeum
MHDSDRYDFVKDIGSGNFGVARLMRDKLTKELVAVKYIERGDKIDENVQREIINHRSLRHPNIVRFKEVILTPTHLAIIMEYASGGELYERICNAGRFSEDEARFFFQQLLSGVSYCHSMQICHRDLKLENTLLDGSPAPRLKICDFGYSKSSVLHSQPKSTVGTPAYIAPEVLLRQEYDGKIADVWSCGVTLYVMLVGAYPFEDPEEPRDYRKTIQRILSVKYSIPDDIRISPECCHLISRIFVADPATRISIPEIKTHSWFLKNLPADLMNESNTGSQFQEPEQPMQSLDTIMQIISEATIPAVRNRCLDDFMTDNLDLDDDMDDFDSESEIDIDSSGEIVYAL

SEQ ID NO: 97908 - DNA, 746 bp, Arabidopsis thaliana
  misc_feature (1)..(746): Ceres Seq. ID no. 13576511
  misc_feature: MA Experiment ID: 20000173 Result: Down-regulated in Transcription
  misc_feature: MA Experiment 20000173 PARAMETER Experiment Name: At_42deg_Heat_P Parameter: Age (day) Value: 14
  misc_feature: MA Experiment 20000173 PARAMETER Experiment Name: At_42deg_Heat_P Parameter: Organism Value: A. thaliana
  misc_feature: MA Experiment 20000173 PARAMETER Experiment Name: At_42deg_Heat_P Parameter: Plant Line Value: WS
  misc_feature: MA Experiment 20000173 PARAMETER Experiment Name: At_42deg_Heat_P Parameter: Temperature (deg C) Value: 42 vs. 22
  misc_feature: MA Experiment 20000173 PARAMETER Experiment Name: At_42deg_Heat_P Parameter: Timepoint (hr) Value: 6
  misc_feature: MA Experiment 20000173 PARAMETER Experiment Name: At_42deg_Heat_P Parameter: Tissue Value: Aerial
  misc_feature: MA Experiment ID: 20000227 Result: Down-regulated in Transcription
  misc_feature: MA Experiment 20000227 PARAMETER Experiment Name: At_Root-Tips-vs-Tops_P Parameter: Tissue Value: Root Tips vs. Root Tops
  misc_feature: MA Experiment ID: 20000495 Result: Down-regulated in Transcription
  misc_feature: MA Experiment 20000495 PARAMETER Experiment Name: At_Guard_Cells_P Parameter: Harvest Date Value: 8/2/2002
  misc_feature: MA Experiment 20000495 PARAMETER Experiment Name: At_Guard_Cells_P Parameter: Organism Value: A. thaliana
  misc_feature: MA Experiment 20000495 PARAMETER Experiment Name: At_Guard_Cells_P Parameter: Tissue Value: Guard Cells vs. Leaves
  misc_feature: MA Experiment ID: 20001451 Result: Down-regulated in Transcription
  misc_feature: MA Experiment 20001451 PARAMETER Experiment Name: At_Far-red-induction_P Parameter: Age (day) Value: 7
  misc_feature: MA Experiment 20001451 PARAMETER Experiment Name: At_Far-red-induction_P Parameter: Light Value: Far-red vs. White
  misc_feature: MA Experiment 20001451 PARAMETER Experiment Name: At_Far-red-induction_P Parameter: Organism Value: A. thaliana
  misc_feature: MA Experiment 20001451 PARAMETER Experiment Name: At_Far-red-induction_P Parameter: Plant Line Value: Columbia
  misc_feature: MA Experiment 20001451 PARAMETER Experiment Name: At_Far-red-induction_P Parameter: Timepoint (hr) Value: 24
  misc_feature: MA Experiment 20001451 PARAMETER Experiment Name: At_Far-red-induction_P Parameter: Tissue Value: Whole Plant
aatttatttttgtttagtttgtcacttcgccgtgcgcggcgggagagaacgctggcggaaaaaagaaatcggaaaactggagaaaccctaaatcgacgaaaaggagagacctttgaatcgaagcttggtgtgtttatactatgaagagtcaatggtctaattttcatcagattgggagaaactctttcttagctgcttctactgtttacgtttcaaacgaattcaacttcttaaacacttctcttcttaatcgaagaagcttctgttttgcagaaggagatcgatccagctttgtagtgttgaaatcggaagcagagttcaacagtgcattgagtaaagctcgagatggatctttgccatcggttttctatttcactgccgcatggtgtggaccttgcaggcttatctctcctgtgatattggagctcagtaataaatatcctgatgtaacaacgtataaggtcgacattgacgagggcggtctatcaaatgctattgggaagttaaatgtatctgctgtgccaacactgcaattcttcaaaggtggcgtgaagaaagcagagattgtaggcgttgatgtggtgaggctgaagagtgtcatggaacaactctacaagtgagagagactcttgacttctgtacactacattgctttgagttgtgattatcttgtgcttttgcttttaagttagattctttgattctcgtgttcctgcaaattcataagggtgctaagtttggtttct

SEQ ID NO: 97909 - protein, 159 aa, Arabidopsis thaliana; identical to SEQ ID NO: 21816
  peptide (1)..(159): Ceres Seq. ID no. 13576512
  misc_feature (51)..(159): Pfam Name: Thioredoxin Pfam Description: Thioredoxin
  misc_feature (1)..(159): Homolog of NCBI NO: 18397764 NR Description: thioredoxin family [Arabidopsis thaliana] thioredoxin o [Arabidopsis thaliana] >gi|15215812|gb|AAK91451.1| [Arabidopsis thaliana] >gi|20147405|gb|AAM10412.1|
  misc_feature (1)..(159): Homolog of NCBI NO: 9755396 NR Description: F17F8.6 [Arabidopsis thaliana]
  misc_feature (11)..(159): Homolog of NCBI NO: 15226875 NR Description: thioredoxin family [Arabidopsis thaliana]
  misc_feature (64)..(159): Homolog of NCBI NO: 26453152 NR Description: putative thioredoxin [Arabidopsis thaliana]
  misc_feature (11)..(156): Homolog of NCBI NO: 27763683 NR Description: thioredoxin o [Chlamydomonas reinhardtii]
  misc_feature (52)..(156): Homolog of NCBI NO: 14581677 NR Description: Hsp70 interacting protein/thioredoxin chimera
  misc_feature (54)..(155): Homolog of NCBI NO: 38048645 NR Description: similar to Drosophila melanogaster thioredoxin
  misc_feature (54)..(154): Homolog of NCBI NO: 6321648 NR Description: thioredoxin; Trx2p [Saccharomyces cerevisiae]
  misc_feature (52)..(144): Homolog of NCBI NO: 3915131 NR Description: Thioredoxin H-type (TRX-H) (Phloem sap 13 kDa
  misc_feature (55)..(154): Homolog of NCBI NO: 6323072 NR Description: thioredoxin; Trx1p [Saccharomyces cerevisiae]

SEQ ID NO: 97910 - DNA, 2050 bp, Arabidopsis thaliana
  misc_feature (1)..(2050): Ceres Seq. ID no. 13578471
  misc_feature: MA Experiment ID: 20000438 Result: Down-regulated in Transcription
  misc_feature: MA Experiment 20000438 PARAMETER Experiment Name: At_Shoots__P Parameter: Age (day) Value: 14
  misc_feature: MA Experiment 20000438 PARAMETER Experiment Name: At_Shoots__P Parameter: Tissue Value: Shoots vs. Whole Plant
  misc_feature: MA Experiment ID: 20000460 Result: Up-regulated in Transcription
  misc_feature: MA Experiment 20000460 PARAMETER Experiment Name: At_10percent_PEG_P Parameter: Age (day) Value: 12
  misc_feature: MA Experiment 20000460 PARAMETER Experiment Name: At_10percent_PEG_P Parameter: Organism Value: A. thaliana
  misc_feature: MA Experiment 20000460 PARAMETER Experiment Name: At_10percent_PEG_P Parameter: Plant Line Value: WS
  misc_feature: MA Experiment 20000460 PARAMETER Experiment Name: At_10percent_PEG_P Parameter: Timepoint (day) Value: 12
  misc_feature: MA Experiment 20000460 PARAMETER Experiment Name: At_10percent_PEG_P Parameter: Tissue Value: Whole Plant
  misc_feature: MA Experiment 20000460 PARAMETER Experiment Name: At_10percent_PEG_P Parameter: Treatment Value: 10percent PEG vs. No Treatment
  misc_feature: MA Experiment ID: 20000527 Result: Up-regulated in Transcription
  misc_feature: MA Experiment 20000527 PARAMETER Experiment Name: At_10percent_PEG_P Parameter: Age (day) Value: 20
  misc_feature: MA Experiment 20000527 PARAMETER Experiment Name: At_10percent_PEG_P Parameter: Organism Value: A. thaliana
  misc_feature: MA Experiment 20000527 PARAMETER Experiment Name: At_10percent_PEG_P Parameter: Plant Line Value: WS
  misc_feature: MA Experiment 20000527 PARAMETER Experiment Name: At_10percent_PEG_P Parameter: Timepoint (day) Value: 20
  misc_feature: MA Experiment 20000527 PARAMETER Experiment Name: At_10percent_PEG_P Parameter: Tissue Value: Whole Plant
  misc_feature: MA Experiment 20000527 PARAMETER Experiment Name: At_10percent_PEG_P Parameter: Treatment Value: 10percent PEG vs. No Treatment
  misc_feature: MA Experiment ID: 20001911 Result: Up-regulated in Transcription
  misc_feature: MA Experiment 20001911 PARAMETER Experiment Name: At_Drought_Reproduction_P Parameter: Age (day) Value: 40
  misc_feature: MA Experiment 20001911 PARAMETER Experiment Name: At_Drought_Reproduction_P Parameter: Organism Value: A. thaliana
  misc_feature: MA Experiment 20001911 PARAMETER Experiment Name: At_Drought_Reproduction_P Parameter: Plant Line Value: WS
  misc_feature: MA Experiment 20001911 PARAMETER Experiment Name: At_Drought_Reproduction_P Parameter: Timepoint (day) Value: 10
  misc_feature: MA Experiment 20001911 PARAMETER Experiment Name: At_Drought_Reproduction_P Parameter: Tissue Value: Flowers
  misc_feature: MA Experiment 20001911 PARAMETER Experiment Name: At_Drought_Reproduction_P Parameter: Treatment Value: Drought vs. No Drought
ttaaatcaggagaaagctcacgagaatccctcttcagatcagaacaccacaaaacatggctgcgtgtacactccacgcgctctcagtcaccttattcctccttctcttctttgccgtgtcaccggcgaaagctcagcaaccgtacgtcaacaaccaccagctcgcctgcgaggtccgtgtctacgacaacataaccaacggattcacatgtaacggcccaccttcttgccgctcatacctcactttctggtctcaaccaccgtacaacacggcggactcaatcgccaaactcctcaacgtctccgccgcagagatccaatcaatcaacaacctccccacagccaccaccagaatcccaacccgtgaattagtcgtgatcccagctaactgctcctgctcctcctccagcggaggattttaccaacacaacgccacttacaatctctccggtaacagaggagatgaaacctatttctcagtggctaacgatacttaccaagctttatccacgtgtcaagccatgatgtcacaaaaccgttacggcgagagacaactaacccccggcttaaacctccttgttcctctccgatgtgcttgtcccaccgccaaacaaaccaccgccggatttaaatatctcctgacttacttagtcgccatgggagatagtatctccggcatcgccgagatgttcaacagcacatccgccgccataaccgaaggtaacgagcttacatcagacaatatcttcttcttcacaccggttctagttcctctcacaactgaacctaccaaaatcgttatatctccgtcgcctcctcctccacccgttgttgctacgccgcctcaaacgccagttgatcctccgggatcttcttcttctcacaaatggatctacatcggaattggaatcggagctggtttgcttctcttactctcaatcttagctctctgcttctacaaacgaaggtctaagaagaagtcattaccgtcgtcgttgccggaggagaacaagctctttgattcatcaaccaaacaatctattcccacaacaacaacgactcaatggtcaatagatttatccaattcatcagaagctttcggtttaaaatccgccatagaatctctaacactatacagattcaacgatcttcaatcagctacttcgaatttcagcgacgaaaacagaatcaaaggctctgtttatcgcgcgacaatcaacggcgacgatgccgctgtgaaagtgatcaaaggagatgtttcttcctctgagatcaatcttttgaagaagctaaatcattctaatatcatccgtctctcaggtttctgtatccgtgaaggaacatcgtacctcgtcttcgagtattcagagaatggatcgatcagtgattggcttcactcgtcgggcaagaagagtttgacatggaaacagagagttgaaatagcaagggatgtggcagaggcgttagattatctccataactatataactccacctcatattcataagaacttggaatcaacaaacatacttctggattctaatttcagagccaagattgcgaatttcggtgttgcgaggattcttgatgaaggtgatcttgatcttcagttaacaagacatgttgaaggaacacaaggctacttagctccagagtatgtggagaatggagtcattacttcgaaactagacgtgtttgcttttggagttgcggttcttgagcttctttcggggagagaagcagtaacgatacataagaagaaggaaggagaagaagaagtggagatgttgtgtaaagtgataaacagtgtgcttggaggagagaatgtgagagagaagttaaaagagtttatggatccatctctagggaatgagtatccgttggagctggcttacaccatggctcagcttgctaagagctgtgtcgcaactgatcttaactcgcgtccatctgtcactcaggttctaaccacgctctcaatgatcgtctcctcctccatcgattgggagccttctgatgaccttcttcgttccggctctcttggcaactag

SEQ ID NO: 97911 - protein, 664 aa, Arabidopsis thaliana; identical to SEQ ID NO: 46281
  peptide (1)..(664): Ceres Seq. ID no. 13578472
  misc_feature (9)..(654): Homolog of NCBI NO: 5441881 NR Description: Similar to putative receptor kinase. (AC002332)
  misc_feature (113)..(600): Homolog of NCBI NO: 15224061 NR Description: protein kinase -related [Arabidopsis thaliana]
  misc_feature (1)..(512): Homolog of NCBI NO: 15224061 NR Description: protein kinase -related [Arabidopsis thaliana]
  misc_feature (1)..(252): Homolog of NCBI NO: 37651066 NR Description: SYM10 protein [Pisum sativum]
  misc_feature (349)..(508): Homolog of NCBI NO: 37651066 NR Description: SYM10 protein [Pisum sativum]
  misc_feature (543)..(647): Homolog of NCBI NO: 37651066 NR Description: SYM10 protein [Pisum sativum]
  misc_feature (1)..(252): Homolog of NCBI NO: 37651070 NR Description: SYM10 protein [Pisum sativum]
  misc_feature (349)..(508): Homolog of NCBI NO: 37651070 NR Description: SYM10 protein [Pisum sativum]
  misc_feature (543)..(647): Homolog of NCBI NO: 37651070 NR Description: SYM10 protein [Pisum sativum]
  misc_feature (50)..(508): Homolog of NCBI NO: 20330767 NR Description: Putative protein kinase [Oryza sativa (japonica

SEQ ID NO: 97912 - protein, 509 aa, Arabidopsis thaliana; identical to SEQ ID NO: 46282
  peptide (1)..(509): Ceres Seq. ID no. 13578473
  misc_feature (1)..(499): Homolog of NCBI NO: 5441881 NR Description: Similar to putative receptor kinase. (AC002332)
  misc_feature (1)..(445): Homolog of NCBI NO: 15224061 NR Description: protein kinase -related [Arabidopsis thaliana]
  misc_feature (1)..(357): Homolog of NCBI NO: 15224061 NR Description: protein kinase -related [Arabidopsis thaliana]
  misc_feature (1)..(97): Homolog of NCBI NO: 37651066 NR Description: SYM10 protein [Pisum sativum]
  misc_feature (194)..(353): Homolog of NCBI NO: 37651066 NR Description: SYM10 protein [Pisum sativum]
  misc_feature (388)..(492): Homolog of NCBI NO: 37651066 NR Description: SYM10 protein [Pisum sativum]
  misc_feature (1)..(97): Homolog of NCBI NO: 37651070 NR Description: SYM10 protein [Pisum sativum]
  misc_feature (194)..(353): Homolog of NCBI NO: 37651070 NR Description: SYM10 protein [Pisum sativum]
  misc_feature (388)..(492): Homolog of NCBI NO: 37651070 NR Description: SYM10 protein [Pisum sativum]
  misc_feature (1)..(353): Homolog of NCBI NO: 20330767 NR Description: Putative protein kinase [Oryza sativa (japonica

SEQ ID NO: 97913 - protein, 508 aa, Arabidopsis thaliana; identical to SEQ ID NO: 46283
  peptide (1)..(508): Ceres Seq. ID no. 13578474
  misc_feature (1)..(498): Homolog of NCBI NO: 5441881 NR Description: Similar to putative receptor kinase. (AC002332)
  misc_feature (1)..(444): Homolog of NCBI NO: 15224061 NR Description: protein kinase -related [Arabidopsis thaliana]
  misc_feature (1)..(356): Homolog of NCBI NO: 15224061 NR Description: protein kinase -related [Arabidopsis thaliana]
  misc_feature (1)..(96): Homolog of NCBI NO: 37651066 NR Description: SYM10 protein [Pisum sativum]
  misc_feature (193)..(352): Homolog of NCBI NO: 37651066 NR Description: SYM10 protein [Pisum sativum]
  misc_feature (387)..(491): Homolog of NCBI NO: 37651066 NR Description: SYM10 protein [Pisum sativum]
  misc_feature (1)..(96): Homolog of NCBI NO: 37651070 NR Description: SYM10 protein [Pisum sativum]
  misc_feature (193)..(352): Homolog of NCBI NO: 37651070 NR Description: SYM10 protein [Pisum sativum]
  misc_feature (387)..(491): Homolog of NCBI NO: 37651070 NR Description: SYM10 protein [Pisum sativum]
  misc_feature (1)..(352): Homolog of NCBI NO: 20330767 NR Description: Putative protein kinase [Oryza sativa (japonica

SEQ ID NO: 97914 - DNA, 1953 bp, Arabidopsis thaliana
  misc_feature (1)..(1953): Ceres Seq. ID no. 13578491
  misc_feature: MA Experiment ID: 20000173 Result: Down-regulated in Transcription
  misc_feature: MA Experiment 20000173 PARAMETER Experiment Name: At_42deg_Heat_P Parameter: Age (day) Value: 14
  misc_feature: MA Experiment 20000173 PARAMETER Experiment Name: At_42deg_Heat_P Parameter: Organism Value: A. thaliana
  misc_feature: MA Experiment 20000173 PARAMETER Experiment Name: At_42deg_Heat_P Parameter: Plant Line Value: WS
  misc_feature: MA Experiment 20000173 PARAMETER Experiment Name: At_42deg_Heat_P Parameter: Temperature (deg C) Value: 42 vs. 22
  misc_feature: MA Experiment 20000173 PARAMETER Experiment Name: At_42deg_Heat_P Parameter: Timepoint (hr) Value: 6
  misc_feature: MA Experiment 20000173 PARAMETER Experiment Name: At_42deg_Heat_P Parameter: Tissue Value: Aerial
  misc_feature: MA Experiment ID: 20001557 Result: Down-regulated in Transcription
  misc_feature: MA Experiment 20001557 PARAMETER Experiment Name: At_Drought_Soil_Dry_P Parameter: Age (day) Value: 27
  misc_feature: MA Experiment 20001557 PARAMETER Experiment Name: At_Drought_Soil_Dry_P Parameter: Organism Value: A. thaliana
  misc_feature: MA Experiment 20001557 PARAMETER Experiment Name: At_Drought_Soil_Dry_P Parameter: Plant Line Value: WS
  misc_feature: MA Experiment 20001557 PARAMETER Experiment Name: At_Drought_Soil_Dry_P Parameter: Post Timepoint (hr) Value: 3
  misc_feature: MA Experiment 20001557 PARAMETER Experiment Name: At_Drought_Soil_Dry_P Parameter: Post-Treatment Value: Re-Water vs. No Drought
  misc_feature: MA Experiment 20001557 PARAMETER Experiment Name: At_Drought_Soil_Dry_P Parameter: Timepoint (day) Value: 13
  misc_feature: MA Experiment 20001557 PARAMETER Experiment Name: At_Drought_Soil_Dry_P Parameter: Treatment Value: Drought vs. No Drought
  misc_feature: MA Experiment ID: 20001558 Result: Down-regulated in Transcription
  misc_feature: MA Experiment 20001558 PARAMETER Experiment Name: At_Drought_Soil_Dry_P Parameter: Age (day) Value: 27
  misc_feature: MA Experiment 20001558 PARAMETER Experiment Name: At_Drought_Soil_Dry_P Parameter: Organism Value: A. thaliana
  misc_feature: MA Experiment 20001558 PARAMETER Experiment Name: At_Drought_Soil_Dry_P Parameter: Plant Line Value: WS
  misc_feature: MA Experiment 20001558 PARAMETER Experiment Name: At_Drought_Soil_Dry_P Parameter: Post Timepoint (hr) Value: 6
  misc_feature: MA Experiment 20001558 PARAMETER Experiment Name: At_Drought_Soil_Dry_P Parameter: Post-Treatment Value: Re-Water vs. No Drought
  misc_feature: MA Experiment 20001558 PARAMETER Experiment Name: At_Drought_Soil_Dry_P Parameter: Timepoint (day) Value: 13
  misc_feature: MA Experiment 20001558 PARAMETER Experiment Name: At_Drought_Soil_Dry_P Parameter: Treatment Value: Drought vs. No Drought
  misc_feature: MA Experiment ID: 20001905 Result: Down-regulated in Transcription
  misc_feature: MA Experiment 20001905 PARAMETER Experiment Name: At_Drought_Reproduction_P Parameter: Age (day) Value: 40
  misc_feature: MA Experiment 20001905 PARAMETER Experiment Name: At_Drought_Reproduction_P Parameter: Organism Value: A. thaliana
  misc_feature: MA Experiment 20001905 PARAMETER Experiment Name: At_Drought_Reproduction_P Parameter: Plant Line Value: WS
  misc_feature: MA Experiment 20001905 PARAMETER Experiment Name: At_Drought_Reproduction_P Parameter: Timepoint (day) Value: 10
  misc_feature: MA Experiment 20001905 PARAMETER Experiment Name: At_Drought_Reproduction_P Parameter: Tissue Value: Rosettes
  misc_feature: MA Experiment 20001905 PARAMETER Experiment Name: At_Drought_Reproduction_P Parameter: Treatment Value: Drought vs. No Drought
gttttgtttttgaatcagatccttattcttgacctttcgatcagattcatggcaacgactcaatcacacacctcagatcttacttcagaggagcaacctgctagtttggacatcatgaaggagcagactgtcccggcaaacaacgagacatcagcctcttttaagtcctcccaggaagctccagttgtagttcatccagcaaaagttgctccacttactggaccttatggtttagccggtgattttgccggacacttacctagcagcatcctctctcctcaagcacaaggcttttactatagaggttatgaaaaccccacaggcgaatgggacgagtattcctcgtatgtcaatgttgaaggattggacatcacatctcctgttggcttcaatgagaatgcttctctggtctaccaaacgggatatggatacaaccctcaaatgccatatgggccatattcccctgcagcaagtcccttgccttctgagggacagttgtattctccacaacagtttccgttttcaggggcatcaccgtattaccagcaggtagttcctcctagcatgcaatatattacttctccaactcagcccgagctcaccagccttgtcggtgttgaccaacaaggtgataacatcggaccacgccaatcctaccatcctcatcccattggaccgtttaatggaaaccagccaaaccttggttttcctgaatggcagcaaggttttgacgggggaatatggtcggattggtccaagccttctgatatgcacaggcattcttcttctatttctccggctttatctcctcagccactcggctcatatggatcatatggccagaacatacccatggggtcacagcgacagagatcattttacggttttggatctggttcgaactcttataacagaggttatatgcatagtggtggtcgtggccagggttctaactatggaagtagactaatttctaatgtgggtatgggaaaccaaggctggattggggttgacaacagtcgagggcgtggaagggttagtgatccatctttgggtggtgcttataatggtacttttgatatcctcaatgagcaaaatcgaggaccaagggcttcaaagcccaagactcaggtcttagaggagcttgattctgctgctgattctaagaaaaataacaaaggcagtgcaaaggagcacgaggaatccaacaacgcagactttgtcaccgactacactaacgccaagttgttcatcatcaagtcttacagtgaagacaatgttcacaaaagcatcaaatacaatgtatgggctagcacccctaatggcaacaaaaagcttgacgctgcttatcgtgaggccaaggatgagaaagaaccgtgtccactttttcttctgttctcggtaaatgcgagctctcaattctgtggtgtagcagagatggttggacctgttgattttgagaagagcgttgattactggcaacaagataaatggagtggacagttcccagtgaagtggcacattatcaaagatgttccaaacagccagttccgccacattatattggaaaacaatgacaataagcctgtgactaatagtcgagacacccaagaagtaaaactggaacagggcatcgagatgctgaagatcttcaagaactacgacgctgacacgtcaatcttggatgatttcgggttttatgaagagcgggagaaaattatacaagaccggaaggcaagaagacagccaagcttgccatctgcaggagtagtagcaggagaaaatgaacataaacctgcttctgctgcattacccacagacttcatgaagaacatgtccaagagttttgcgcaagttgtccgcttggacgaaggcagcaaagaagcagtcaaggccagttcatctccagatgcaattacaacagcagcagtctcttctggtcaatccaactag

SEQ ID NO: 97915 - protein, 650 aa, Arabidopsis thaliana
  peptide (1)..(650): Ceres Seq. ID no. 13578492
  misc_feature (464)..(554): Pfam Name: YT521-B-like family Pfam Description: YT521-B-like family
  misc_feature (17)..(539): Homolog of NCBI NO: 30682433 NR Description: expressed protein [Arabidopsis thaliana]
  misc_feature (148)..(650): Homolog of NCBI NO: 15795138 NR Description: gb|AAF35955.1~gene_id:MGH6.21~strong similarity
  misc_feature (126)..(646): Homolog of NCBI NO: 38636667 NR Description: putative Rubisco subunit binding-protein beta
  misc_feature (291)..(582): Homolog of NCBI NO: 22773231 NR Description: Putative RNA-binding protein [Oryza sativa
  misc_feature (18)..(233): Homolog of NCBI NO: 22773231 NR Description: Putative RNA-binding protein [Oryza sativa
  misc_feature (269)..(628): Homolog of NCBI NO: 38567895 NR Description: OSJNBa0060N03.15 [Oryza sativa (japonica
  misc_feature (86)..(601): Homolog of NCBI NO: 18405397 NR Description: expressed protein [Arabidopsis thaliana] At1g55500/T5A14_10 [Arabidopsis thaliana]
  misc_feature (86)..(588): Homolog of NCBI NO: 25372787 NR Description: Rubisco subunit binding-protein beta subunit - Arabidopsis thaliana >gi|4204265|gb|AAD10646.1| Hypothetical
  misc_feature (349)..(580): Homolog of NCBI NO: 15221079 NR Description: expressed protein [Arabidopsis thaliana]
  misc_feature (97)..(202): Homolog of NCBI NO: 15221079 NR Description: expressed protein [Arabidopsis thaliana]
VLFLNQILILDLSIRFMATTQSHTSDLTSEEQPASLDIMKEQTVPANNETSASFKSSQEAPVVVHPAKVAPLTGPYGLAGDFAGHLPSSILSPQAQGFYYRGYENPTGEWDEYSSYVNVEGLDITSPVGFNENASLVYQTGYGYNPQMPYGPYSPAASPLPSEGQLYSPQQFPFSGASPYYQQVVPPSMQYITSPTQPELTSLVGVDQQGDNIGPRQSYHPHPIGPFNGNQPNLGFPEWQQGFDGGIWSDWSKPSDMHRHSSSISPALSPQPLGSYGSYGQNIPMGSQRQRSFYGFGSGSNSYNRGYMHSGGRGQGSNYGSRLISNVGMGNQGWIGVDNSRGRGRVSDPSLGGAYNGTFDILNEQNRGPRASKPKTQVLEELDSAADSKKNNKGSAKEHEESNNADFVTDYTNAKLFIIKSYSEDNVHKSIKYNVWASTPNGNKKLDAAYREAKDEKEPCPLFLLFSVNASSQFCGVAEMVGPVDFEKSVDYWQQDKWSGQFPVKWHIIKDVPNSQFRHIILENNDNKPVTNSRDTQEVKLEQGIEMLKIFKNYDADTSILDDFGFYEEREKIIQDRKARRQPSLPSAGVVAGENEHKPASAALPTDFMKNMSKSFAQVVRLDEGSKEAVKASSSPDAITTAAVSSGQSN

SEQ ID NO: 97916 - protein, 634 aa, Arabidopsis thaliana
  peptide (1)..(634): Ceres Seq. ID no. 13578493
  misc_feature (448)..(538): Pfam Name: YT521-B-like family Pfam Description: YT521-B-like family
  misc_feature (1)..(523): Homolog of NCBI NO: 30682433 NR Description: expressed protein [Arabidopsis thaliana]
  misc_feature (132)..(634): Homolog of NCBI NO: 15795138 NR Description: gb|AAF35955.1~gene_id:MGH6.21~strong similarity
  misc_feature (110)..(630): Homolog of NCBI NO: 38636667 NR Description: putative Rubisco subunit binding-protein beta
  misc_feature (275)..(566): Homolog of NCBI NO: 22773231 NR Description: Putative RNA-binding protein [Oryza sativa
  misc_feature (2)..(217): Homolog of NCBI NO: 22773231 NR Description: Putative RNA-binding protein [Oryza sativa
  misc_feature (253)..(612): Homolog of NCBI NO: 38567895 NR Description: OSJNBa0060N03.15 [Oryza sativa (japonica
  misc_feature (70)..(585): Homolog of NCBI NO: 18405397 NR Description: expressed protein [Arabidopsis thaliana] At1g55500/T5A14_10 [Arabidopsis thaliana]
  misc_feature (70)..(572): Homolog of NCBI NO: 25372787 NR Description: Rubisco subunit binding-protein beta subunit - Arabidopsis thaliana >gi|4204265|gb|AAD10646.1| Hypothetical
  misc_feature (333)..(564): Homolog of NCBI NO: 15221079 NR Description: expressed protein [Arabidopsis thaliana]
  misc_feature (81)..(186): Homolog of NCBI NO: 15221079 NR Description: expressed protein [Arabidopsis thaliana]
MATTQSHTSDLTSEEQPASLDIMKEQTVPANNETSASFKSSQEAPVVVHPAKVAPLTGPYGLAGDFAGHLPSSILSPQAQGFYYRGYENPTGEWDEYSSYVNVEGLDITSPVGFNENASLVYQTGYGYNPQMPYGPYSPAASPLPSEGQLYSPQQFPFSGASPYYQQVVPPSMQYITSPTQPELTSLVGVDQQGDNIGPRQSYHPHPIGPFNGNQPNLGFPEWQQGFDGGIWSDWSKPSDMHRHSSSISPALSPQPLGSYGSYGQNIPMGSQRQRSFYGFGSGSNSYNRGYMHSGGRGQGSNYGSRLISNVGMGNQGWIGVDNSRGRGRVSDPSLGGAYNGTFDILNEQNRGPRASKPKTQVLEELDSAADSKKNNKGSAKEHEESNNADFVTDYTNAKLFIIKSYSEDNVHKSIKYNVWASTPNGNKKLDAAYREAKDEKEPCPLFLLFSVNASSQFCGVAEMVGPVDFEKSVDYWQQDKWSGQFPVKWHIIKDVPNSQFRHIILENNDNKPVTNSRDTQEVKLEQGIEMLKIFKNYDADTSILDDFGFYEEREKIIQDRKARRQPSLPSAGVVAGENEHKPASAALPTDFMKNMSKSFAQVVRLDEGSKEAVKASSSPDAITTAAVSSGQSN

SEQ ID NO: 97917 - protein, 612 aa, Arabidopsis thaliana
  peptide (1)..(612): Ceres Seq. ID no. 13578494
  misc_feature (426)..(516): Pfam Name: YT521-B-like family Pfam Description: YT521-B-like family
  misc_feature (1)..(501): Homolog of NCBI NO: 30682433 NR Description: expressed protein [Arabidopsis thaliana]
  misc_feature (110)..(612): Homolog of NCBI NO: 15795138 NR Description: gb|AAF35955.1~gene_id:MGH6.21~strong similarity
  misc_feature (88)..(608): Homolog of NCBI NO: 38636667 NR Description: putative Rubisco subunit binding-protein beta
  misc_feature (253)..(544): Homolog of NCBI NO: 22773231 NR Description: Putative RNA-binding protein [Oryza sativa
  misc_feature (1)..(195): Homolog of NCBI NO: 22773231 NR Description: Putative RNA-binding protein [Oryza sativa
  misc_feature (231)..(590): Homolog of NCBI NO: 38567895 NR Description: OSJNBa0060N03.15 [Oryza sativa (japonica
  misc_feature (48)..(563): Homolog of NCBI NO: 18405397 NR Description: expressed protein [Arabidopsis thaliana] At1g55500/T5A14_10 [Arabidopsis thaliana]
  misc_feature (48)..(550): Homolog of NCBI NO: 25372787 NR Description: Rubisco subunit binding-protein beta subunit - Arabidopsis thaliana >gi|4204265|gb|AAD10646.1| Hypothetical
  misc_feature (311)..(542): Homolog of NCBI NO: 15221079 NR Description: expressed protein [Arabidopsis thaliana]
  misc_feature (59)..(164): Homolog of NCBI NO: 15221079 NR Description: expressed protein [Arabidopsis thaliana]
MKEQTVPANNETSASFKSSQEAPVVVHPAKVAPLTGPYGLAGDFAGHLPSSILSPQAQGFYYRGYENPTGEWDEYSSYVNVEGLDITSPVGFNENASLVYQTGYGYNPQMPYGPYSPAASPLPSEGQLYSPQQFPFSGASPYYQQVVPPSMQYITSPTQPELTSLVGVDQQGDNIGPRQSYHPHPIGPFNGNQPNLGFPEWQQGFDGGIWSDWSKPSDMHRHSSSISPALSPQPLGSYGSYGQNIPMGSQRQRSFYGFGSGSNSYNRGYMHSGGRGQGSNYGSRLISNVGMGNQGWIGVDNSRGRGRVSDPSLGGAYNGTFDILNEQNRGPRASKPKTQVLEELDSAADSKKNNKGSAKEHEESNNADFVTDYTNAKLFIIKSYSEDNVHKSIKYNVWASTPNGNKKLDAAYREAKDEKEPCPLFLLFSVNASSQFCGVAEMVGPVDFEKSVDYWQQDKWSGQFPVKWHIIKDVPNSQFRHIILENNDNKPVTNSRDTQEVKLEQGIEMLKIFKNYDADTSILDDFGFYEEREKIIQDRKARRQPSLPSAGVVAGENEHKPASAALPTDFMKNMSKSFAQVVRLDEGSKEAVKASSSPDAITTAAVSSGQSN

SEQ ID NO: 97918 - DNA, 680 bp, Arabidopsis thaliana
  misc_feature (1)..(680): Ceres Seq. ID no. 13578553
  misc_feature: MA Experiment ID: 20000180 Result: Up-regulated in Transcription
  misc_feature: MA Experiment 20000180 PARAMETER Experiment Name: At_Germinating_Seeds_P Parameter: Age (hr) Value: 24 vs. 0
  misc_feature: MA Experiment 20000180 PARAMETER Experiment Name: At_Germinating_Seeds_P Parameter: Tissue Value: Germinating Seeds
  misc_feature: MA Experiment ID: 20000185 Result: Down-regulated in Transcription
  misc_feature: MA Experiment 20000185 PARAMETER Experiment Name: At_Roots__P Parameter: Age (day) Value: 7 vs. 21
  misc_feature: MA Experiment 20000185 PARAMETER Experiment Name: At_Roots__P Parameter: Organism Value: A. thaliana
  misc_feature: MA Experiment 20000185 PARAMETER Experiment Name: At_Roots__P Parameter: Tissue Value: Roots vs. Whole Plant
  misc_feature: MA Experiment ID: 20000265 Result: Up-regulated in Transcription
  misc_feature: MA Experiment 20000265 PARAMETER Experiment Name: At_Open_Flower_P Parameter: Age (day) Value: 21
  misc_feature: MA Experiment 20000265 PARAMETER Experiment Name: At_Open_Flower_P Parameter: Plant Line Value: WS
  misc_feature: MA Experiment 20000265 PARAMETER Experiment Name: At_Open_Flower_P Parameter: Tissue Value: Closed Flower vs. Whole Plant
  misc_feature: MA Experiment ID: 20000288 Result: Up-regulated in Transcription
  misc_feature: MA Experiment 20000288 PARAMETER Experiment Name: At_Drought_P Parameter: Age (day) Value: 7
  misc_feature: MA Experiment 20000288 PARAMETER Experiment Name: At_Drought_P Parameter: Organism Value: A. thaliana
  misc_feature: MA Experiment 20000288 PARAMETER Experiment Name: At_Drought_P Parameter: Plant Line Value: WS
  misc_feature: MA Experiment 20000288 PARAMETER Experiment Name: At_Drought_P Parameter: Timepoint (hr) Value: 1
  misc_feature: MA Experiment 20000288 PARAMETER Experiment Name: At_Drought_P Parameter: Tissue Value: Whole Plant
  misc_feature: MA Experiment 20000288 PARAMETER Experiment Name: At_Drought_P Parameter: Treatment Value: Drought vs. No Drought
  misc_feature: MA Experiment ID: 20000439 Result: Down-regulated in Transcription
  misc_feature: MA Experiment 20000439 PARAMETER Experiment Name: At_Roots__P Parameter: Age (day) Value: 14 vs. 21
  misc_feature: MA Experiment 20000439 PARAMETER Experiment Name: At_Roots__P Parameter: Organism Value: A. thaliana
  misc_feature: MA Experiment 20000439 PARAMETER Experiment Name: At_Roots__P Parameter: Tissue Value: Roots vs. Whole Plant
gatctgatcattcgttttctaacaccaaggcgaactgagagagattcgttaagcacaaaagagagaaaaaagatctaatgttttctccacatgatggaacactctgttctaaaaagagggatcatatgaaagtttttggagaatcgtttcatggttctttcaaaaggagcaaacaaggagatcaaaaacaaaccaaatttgagaagaacactactactctgttctttcaaagatcaaagtcagatagcgccatgttgataaagcctgatgttcagcttcacctagaggctaagacccaatcagagacatttgaagatcataggacagacctggaccttaatttgaacctttattcgtcatcaagttcctctgtcaaaaaaacaatcatggagaaagatgaatgttccaaaggcggaactgtgatcatcagcccaagtaagaaggtgagatcaggtgatatagggctaagtcgatccccgtcttggctagcgtttgaaggtgatgatgatgataatcagaagaagcaagagatgataacaacagtgtgcatgaagtgtcacatgctggttatgctctgcaaatctactcttgtctgtcctaactgcaaattcatgcaccatgatgatcatagctccactaaacagtttcagactttaaatttgtttaagctcttatgctag

SEQ ID NO: 97919 - protein, 200 aa, Arabidopsis thaliana
  peptide (1)..(200): Ceres Seq. ID no. 13578554
  misc_feature (1)..(200): Homolog of NCBI NO: 30687784 NR Description: expressed protein [Arabidopsis thaliana]
  misc_feature (1)..(200): Homolog of NCBI NO: 25372722 NR Description: unknown protein T11I11.11 [imported] -
  misc_feature (78)..(200): Homolog of NCBI NO: 30699311 NR Description: expressed protein [Arabidopsis thaliana] unknown protein [Arabidopsis thaliana]
  misc_feature (76)..(186): Homolog of NCBI NO: 15236641 NR Description: hypothetical protein [Arabidopsis thaliana]
  misc_feature (1)..(121): Homolog of NCBI NO: 30699311 NR Description: expressed protein [Arabidopsis thaliana] unknown protein [Arabidopsis thaliana]
MFSPHDGTLCSKKRDHMKVFGESFHGSFKRSKQGDQKQTKFEKNTTTLFFQRSKSDSAMLIKPDVQLHLEAKTQSETFEDHRTDLDLNLNLYSSSSSSVKKTIMEKDECSKGGTVIISPSKKVRSGDIGLSRSPSWLAFEGDDDDNQKKQEMITTVCMKCHMLVMLCKSTLVCPNCKFMHHDDHSSTKQFQTLNLFKLLC

SEQ ID NO: 97920 - protein, 184 aa, Arabidopsis thaliana
  peptide (1)..(184): Ceres Seq. ID no. 13578555
  misc_feature (1)..(184): Homolog of NCBI NO: 30687784 NR Description: expressed protein [Arabidopsis thaliana]
  misc_feature (1)..(184): Homolog of NCBI NO: 25372722 NR Description: unknown protein T11I11.11 [imported] -
  misc_feature (62)..(184): Homolog of NCBI NO: 30699311 NR Description: expressed protein [Arabidopsis thaliana] unknown protein [Arabidopsis thaliana]
  misc_feature (60)..(170): Homolog of NCBI NO: 15236641 NR Description: hypothetical protein [Arabidopsis thaliana]
  misc_feature (1)..(105): Homolog of NCBI NO: 30699311 NR Description: expressed protein [Arabidopsis thaliana] unknown protein [Arabidopsis thaliana]
MKVFGESFHGSFKRSKQGDQKQTKFEKNTTTLFFQRSKSDSAMLIKPDVQLHLEAKTQSETFEDHRTDLDLNLNLYSSSSSSVKKTIMEKDECSKGGTVIISPSKKVRSGDIGLSRSPSWLAFEGDDDDNQKKQEMITTVCMKCHMLVMLCKSTLVCPNCKFMHHDDHSSTKQFQTLNLFKLLC

SEQ ID NO: 97921 - protein, 142 aa, Arabidopsis thaliana; identical to SEQ ID NO: 82509
  peptide (1)..(142): Ceres Seq. ID no. 13578556
  misc_feature (1)..(142): Homolog of NCBI NO: 30687784 NR Description: expressed protein [Arabidopsis thaliana]
  misc_feature (1)..(142): Homolog of NCBI NO: 25372722 NR Description: unknown protein T11I11.11 [imported] -
  misc_feature (20)..(142): Homolog of NCBI NO: 30699311 NR Description: expressed protein [Arabidopsis thaliana] unknown protein [Arabidopsis thaliana]
  misc_feature (18)..(128): Homolog of NCBI NO: 15236641 NR Description: hypothetical protein [Arabidopsis thaliana]
  misc_feature (1)..(63): Homolog of NCBI NO: 30699311 NR Description: expressed protein [Arabidopsis thaliana] unknown protein [Arabidopsis thaliana]

SEQ ID NO: 97922 - DNA, 1262 bp, Arabidopsis thaliana
  misc_feature (1)..(1262): Ceres Seq. ID no. 13578561
  misc_feature: MA Experiment ID: 20000227 Result: Down-regulated in Transcription
  misc_feature: MA Experiment 20000227 PARAMETER Experiment Name: At_Root-Tips-vs-Tops_P Parameter: Tissue Value: Root Tips vs. Root Tops
  misc_feature: MA Experiment ID: 20001451 Result: Down-regulated in Transcription
  misc_feature: MA Experiment 20001451 PARAMETER Experiment Name: At_Far-red-induction_P Parameter: Age (day) Value: 7
  misc_feature: MA Experiment 20001451 PARAMETER Experiment Name: At_Far-red-induction_P Parameter: Light Value: Far-red vs. White
  misc_feature: MA Experiment 20001451 PARAMETER Experiment Name: At_Far-red-induction_P Parameter: Organism Value: A. thaliana
  misc_feature: MA Experiment 20001451 PARAMETER Experiment Name: At_Far-red-induction_P Parameter: Plant Line Value: Columbia
  misc_feature: MA Experiment 20001451 PARAMETER Experiment Name: At_Far-red-induction_P Parameter: Timepoint (hr) Value: 24
  misc_feature: MA Experiment 20001451 PARAMETER Experiment Name: At_Far-red-induction_P Parameter: Tissue Value: Whole Plant
aaatttctccgatttggatctgtctccaactggcaagggtgacaatggctagctccaagggatcacagagtgttagaaacttgatgtacccgggaaagcatgctttgctcccaccaaaaataccgtttcctagtgtatcagcatcgtattccgagtatattcctactggtttgattggttcaagacatggtcagaagcttagtaatgagaaaacacatcaccagcgaacttcctccgagagccatttggtagaagagcttcccttttggcttgatgatcttctcaatgagcagccggaaagccctgctcgaaaatgtggtcatcggcgttcatcaagtgactcttacgcttatctagatgtggctaatgctacaaacataagtttgactctccaaaatgatttcagttataggaatactgttttatccactcaaagaggagtccaagagcttgaccggaataaaaatgctcaggatgctgccttctactctggtgctagttttctgaaacagaagagtcgtcagcgggattctttggtggcaactggggcttgtccttcttggttacctttcgctcgtgagaacggtggcggaaaaaacttgggagctttatatatgtctcaagatgcaacagtaatatcgtcagaaagaaagaactatgctgaacctttttctcatgacccaaagatgttatcttctgaggaaaacaactccaatccttcgcctgtgacttatgaagctgacaacacaaaacgagccaaacagcaatttgcacaaagatcacgggtccgtaagctccagtacatatctgagctagaaagaaatgtacagacattgcaggcagaaggctccaaagtttcagctgaacttgattttctcaaccagaggaatcttattctgagtatggaaaataaagctctcaagaagcgtctcgaaagtatagctcaggagaagcttatcaaacaatattcaacagttcttaagattgtatacctcatgagttctgtctattatccagtggaacaagaagtgttggaaaaggagattgggagactacgagcgttgtatcagcaacaacaacaaactcaaaaaccatcagccagtcgcggacgtgctactagcaaagatctcgactctcagttctccagtctttcactgaacaccaaagattccaactgtaggcgtgactctgtatctgtgatggggcctggcgactcaacaagatcagacccttatctaccgcctcaccacagacgtttttaa

SEQ ID NO: 97923 - protein, 419 aa, Arabidopsis thaliana
  peptide (1)..(419): Ceres Seq. ID no. 13578562
  misc_feature (257)..(305): Pfam Name: bZIP transcription factor Pfam Description: bZIP transcription factor
  misc_feature (15)..(419): Homolog of NCBI NO: 25404190 NR Description: hypothetical protein T18I24.3 [imported] - thaliana >gi|12321251|gb|AAG50695.1|AC079604_2 bZIP activator RSG, putative [Arabidopsis thaliana]
  misc_feature (15)..(401): Homolog of NCBI NO: 30696210 NR Description: bZIP family transcription factor [Arabidopsis
  misc_feature (15)..(385): Homolog of NCBI NO: 28393180 NR Description: putative bZIP family transcription factor
  misc_feature (10)..(279): Homolog of NCBI NO: 30680232 NR Description: bZIP transcriptional activator protein -related
  misc_feature (15)..(279): Homolog of NCBI NO: 27311723 NR Description: Unknown protein [Arabidopsis thaliana]
  misc_feature (224)..(401): Homolog of NCBI NO: 28393180 NR Description: putative bZIP family transcription factor
  misc_feature (64)..(327): Homolog of NCBI NO: 18491297 NR Description: At2g42380/MHK10.10 [Arabidopsis thaliana]
  misc_feature (64)..(327): Homolog of NCBI NO: 30689007 NR Description: bZIP protein [Arabidopsis thaliana]
  misc_feature (225)..(385): Homolog of NCBI NO: 25403436 NR Description: protein F15O4.49 [imported] - Arabidopsis >gi|8778353|gb|AAF79361.1|AC007887_20 F15O4.49 [Arabidopsis
  misc_feature (225)..(385): Homolog of NCBI NO: 21592919 NR Description: unknown [Arabidopsis thaliana]
ISPIWICLQLARVTMASSKGSQSVRNLMYPGKHALLPPKIPFPSVSASYSEYIPTGLIGSRHGQKLSNEKTHHQRTSSESHLVEELPFWLDDLLNEQPESPARKCGHRRSSSDSYAYLDVANATNISLTLQNDFSYRNTVLSTQRGVQELDRNKNAQDAAFYSGASFLKQKSRQRDSLVATGACPSWLPFARENGGGKNLGALYMSQDATVISSERKNYAEPFSHDPKMLSSEENNSNPSPVTYEADNTKRAKQQFAQRSRVRKLQYISELERNVQTLQAEGSKVSAELDFLNQRNLILSMENKALKKRLESIAQEKLIKQYSTVLKIVYLMSSVYYPVEQEVLEKEIGRLRALYQQQQQTQKPSASRGRATSKDLDSQFSSLSLNTKDSNCRRDSVSVMGPGDSTRSDPYLPPHHRRF

SEQ ID NO: 97924 - protein, 405 aa, Arabidopsis thaliana
  peptide (1)..(405): Ceres Seq. ID no. 13578563
  misc_feature (243)..(291): Pfam Name: bZIP transcription factor Pfam Description: bZIP transcription factor
  misc_feature (1)..(405): Homolog of NCBI NO: 25404190 NR Description: hypothetical protein T18I24.3 [imported] - thaliana >gi|12321251|gb|AAG50695.1|AC079604_2 bZIP activator RSG, putative [Arabidopsis thaliana]
  misc_feature (1)..(387): Homolog of NCBI NO: 30696210 NR Description: bZIP family transcription factor [Arabidopsis
  misc_feature (1)..(371): Homolog of NCBI NO: 28393180 NR Description: putative bZIP family transcription factor
  misc_feature (1)..(265): Homolog of NCBI NO: 30680232 NR Description: bZIP transcriptional activator protein -related
  misc_feature (1)..(265): Homolog of NCBI NO: 27311723 NR Description: Unknown protein [Arabidopsis thaliana]
  misc_feature (210)..(387): Homolog of NCBI NO: 28393180 NR Description: putative bZIP family transcription factor
  misc_feature (50)..(313): Homolog of NCBI NO: 18491297 NR Description: At2g42380/MHK10.10 [Arabidopsis thaliana]
  misc_feature (50)..(313): Homolog of NCBI NO: 30689007 NR Description: bZIP protein [Arabidopsis thaliana]
  misc_feature (211)..(371): Homolog of NCBI NO: 25403436 NR Description: protein F15O4.49 [imported] - Arabidopsis >gi|8778353|gb|AAF79361.1|AC007887_20 F15O4.49 [Arabidopsis
  misc_feature (211)..(371): Homolog of NCBI NO: 21592919 NR Description: unknown [Arabidopsis thaliana]
MASSKGSQSVRNLMYPGKHALLPPKIPFPSVSASYSEYIPTGLIGSRHGQKLSNEKTHHQRTSSESHLVEELPFWLDDLLNEQPESPARKCGHRRSSSDSYAYLDVANATNISLTLQNDFSYRNTVLSTQRGVQELDRNKNAQDAAFYSGASFLKQKSRQRDSLVATGACPSWLPFARENGGGKNLGALYMSQDATVISSERKNYAEPFSHDPKMLSSEENNSNPSPVTYEADNTKRAKQQFAQRSRVRKLQYISELERNVQTLQAEGSKVSAELDFLNQRNLILSMENKALKKRLESIAQEKLIKQYSTVLKIVYLMSSVYYPVEQEVLEKEIGRLRALYQQQQQTQKPSASRGRATSKDLDSQFSSLSLNTKDSNCRRDSVSVMGPGDSTRSDPYLPPHHRRF

SEQ ID NO: 97925 - protein, 392 aa, Arabidopsis thaliana
  peptide (1)..(392): Ceres Seq. ID no. 13578564
  misc_feature (230)..(278): Pfam Name: bZIP transcription factor Pfam Description: bZIP transcription factor
  misc_feature (1)..(392): Homolog of NCBI NO: 25404190 NR Description: hypothetical protein T18I24.3 [imported] - thaliana >gi|12321251|gb|AAG50695.1|AC079604_2 bZIP activator RSG, putative [Arabidopsis thaliana]
  misc_feature (1)..(374): Homolog of NCBI NO: 30696210 NR Description: bZIP family transcription factor [Arabidopsis
  misc_feature (1)..(358): Homolog of NCBI NO: 28393180 NR Description: putative bZIP family transcription factor
  misc_feature (1)..(252): Homolog of NCBI NO: 30680232 NR Description: bZIP transcriptional activator protein -related
  misc_feature (1)..(252): Homolog of NCBI NO: 27311723 NR Description: Unknown protein [Arabidopsis thaliana]
  misc_feature (197)..(374): Homolog of NCBI NO: 28393180 NR Description: putative bZIP family transcription factor
  misc_feature (37)..(300): Homolog of NCBI NO: 18491297 NR Description: At2g42380/MHK10.10 [Arabidopsis thaliana]
  misc_feature (37)..(300): Homolog of NCBI NO: 30689007 NR Description: bZIP protein [Arabidopsis thaliana]
  misc_feature (198)..(358): Homolog of NCBI NO: 25403436 NR Description: protein F15O4.49 [imported] - Arabidopsis >gi|8778353|gb|AAF79361.1|AC007887_20 F15O4.49 [Arabidopsis
  misc_feature (198)..(358): Homolog of NCBI NO: 21592919 NR Description: unknown [Arabidopsis thaliana]
MYPGKHALLPPKIPFPSVSASYSEYIPTGLIGSRHGQKLSNEKTHHQRTSSESHLVEELPFWLDDLLNEQPESPARKCGHRRSSSDSYAYLDVANATNISLTLQNDFSYRNTVLSTQRGVQELDRNKNAQDAAFYSGASFLKQKSRQRDSLVATGACPSWLPFARENGGGKNLGALYMSQDATVISSERKNYAEPFSHDPKMLSSEENNSNPSPVTYEADNTKRAKQQFAQRSRVRKLQYISELERNVQTLQAEGSKVSAELDFLNQRNLILSMENKALKKRLESIAQEKLIKQYSTVLKIVYLMSSVYYPVEQEVLEKEIGRLRALYQQQQQTQKPSASRGRATSKDLDSQFSSLSLNTKDSNCRRDSVSVMGPGDSTRSDPYLPPHHRRF

SEQ ID NO: 97926 - DNA, 855 bp, Arabidopsis thaliana
  misc_feature (1)..(855): Ceres Seq. ID no. 13578580
  misc_feature: MA Experiment ID: 20000185 Result: Up-regulated in Transcription
  misc_feature: MA Experiment 20000185 PARAMETER Experiment Name: At_Roots__P Parameter: Age (day) Value: 7 vs. 21
  misc_feature: MA Experiment 20000185 PARAMETER Experiment Name: At_Roots__P Parameter: Organism Value: A. thaliana
  misc_feature: MA Experiment 20000185 PARAMETER Experiment Name: At_Roots__P Parameter: Tissue Value: Roots vs. Whole Plant
  misc_feature: MA Experiment ID: 20000439 Result: Up-regulated in Transcription
  misc_feature: MA Experiment 20000439 PARAMETER Experiment Name: At_Roots__P Parameter: Age (day) Value: 14 vs. 21
  misc_feature: MA Experiment 20000439 PARAMETER Experiment Name: At_Roots__P Parameter: Organism Value: A. thaliana
  misc_feature: MA Experiment 20000439 PARAMETER Experiment Name: At_Roots__P Parameter: Tissue Value: Roots vs. Whole Plant
gacaaccccacttttgtacttctcttccctctccccctcccaaataaccgccgataaacaatgctccggctaagcaacgccgccgtaataacaaccaatgcaattctcgcattgatcggcctcgccgctctatctttttccgtctacgtctacgttcaaggcccatcacagtgtcaacgtttcgttcaaaaccctctcattgtaactgcggctctcctcttcttcatctcgtccttaggccttatcgctgctctctacggtagccacatcatcatcacactctatctcttcttccttttcctctccattcttctgcttcttgtcctctctgtctttatcttcctcgtcacgaatcccaccgccggaaaagcgttatccggtagaggaataggcaatgtcaagaccggagattatcagaactggatcgggaaccatttccttcgtgggaagaattgggaagggatcaccaaatgtttgtctgattctagggtttgtaaaaggtttggtccacgtgacattgactttgactccaaacatctctctaatgtacagtttggttgttgtcgacctcccgtagaatgtgggttcgaatcaaagaatgccacgtggtggacagttcctgccacagcgactacggcgattataggggattgtaaggcatggagtaacacgcagagacagttatgttacgcgtgcgagtcgtgtaagattggagttttaaaagggataagaaaaagatggaggatacttattgtcgtcaatctccttcttatccttctcgtcgtttttctttactcgtgtggctgttgcgtgagaaagaacaatcgtgttccatggaagcgccggttcttctaa

SEQ ID NO: 97927 - protein, 264 aa, Arabidopsis thaliana
  peptide (1)..(264): Ceres Seq. ID no. 13578581
  misc_feature (4)..(241): Pfam Name: Tetraspanin family Pfam Description: Tetraspanin family
  misc_feature (1)..(264): Homolog of NCBI NO: 15237197 NR Description: senescence-associated protein family [Arabidopsis
  misc_feature (1)..(260): Homolog of NCBI NO: 18394621 NR Description: senescence-associated protein family [Arabidopsis >gi|6714308|gb|AAF26004.1|AC013354_23 F15H18.1 [Arabidopsis
  misc_feature (1)..(260): Homolog of NCBI NO: 21593310 NR Description: unknown [Arabidopsis thaliana]
  misc_feature (1)..(255): Homolog of NCBI NO: 3551954 NR Description: senescence-associated protein 5 [Hemerocallis
  misc_feature (1)..(256): Homolog of NCBI NO: 20197174 NR Description: hypothetical protein [Arabidopsis thaliana]
  misc_feature (3)..(256): Homolog of NCBI NO: 29367553 NR Description: senescence-associated protein-like protein [Oryza
  misc_feature (1)..(256): Homolog of NCBI NO: 15234374 NR Description: senescence-associated protein, putative
  misc_feature (79)..(256): Homolog of NCBI NO: 30682205 NR Description: senescence-associated protein family [Arabidopsis
  misc_feature (1)..(256): Homolog of NCBI NO: 15234743 NR Description: senescence-associated protein family [Arabidopsis
  misc_feature (13)..(254): Homolog of NCBI NO: 15238641 NR Description: senescence-associated protein family [Arabidopsis
MLRLSNAAVITTNAILALIGLAALSFSVYVYVQGPSQCQRFVQNPLIVTAALLFFISSLGLIAALYGSHIIITLYLFFLFLSILLLLVLSVFIFLVTNPTAGKALSGRGIGNVKTGDYQNWIGNHFLRGKNWEGITKCLSDSRVCKRFGPRDIDFDSKHLSNVQFGCCRPPVECGFESKNATWWTVPATATTAIIGDCKAWSNTQRQLCYACESCKIGVLKGIRKRWRILIVVNLLLILLVVFLYSCGCCVRKNNRVPWKRRFF

SEQ ID NO: 97928 - DNA, 1467 bp, Arabidopsis thaliana
  misc_feature (1)..(1467): Ceres Seq. ID no. 13578641
  misc_feature: MA Experiment ID: 20000166 Result: Up-regulated in Transcription
  misc_feature: MA Experiment 20000166 PARAMETER Experiment Name: At_100uM_ABA_P Parameter: Age (day) Value: 14
  misc_feature: MA Experiment 20000166 PARAMETER Experiment Name: At_100uM_ABA_P Parameter: Organism Value: A. thaliana
  misc_feature: MA Experiment 20000166 PARAMETER Experiment Name: At_100uM_ABA_P Parameter: Plant Line Value: WS
  misc_feature: MA Experiment 20000166 PARAMETER Experiment Name: At_100uM_ABA_P Parameter: Timepoint (hr) Value: 1
  misc_feature: MA Experiment 20000166 PARAMETER Experiment Name: At_100uM_ABA_P Parameter: Tissue Value: Aerial
  misc_feature: MA Experiment 20000166 PARAMETER Experiment Name: At_100uM_ABA_P Parameter: Treatment Value: 100uM ABA vs. No Treatment
  misc_feature: MA Experiment ID: 20000173 Result: Down-regulated in Transcription
  misc_feature: MA Experiment 20000173 PARAMETER Experiment Name: At_42deg_Heat_P Parameter: Age (day) Value: 14
  misc_feature: MA Experiment 20000173 PARAMETER Experiment Name: At_42deg_Heat_P Parameter: Organism Value: A. thaliana
  misc_feature: MA Experiment 20000173 PARAMETER Experiment Name: At_42deg_Heat_P Parameter: Plant Line Value: WS
  misc_feature: MA Experiment 20000173 PARAMETER Experiment Name: At_42deg_Heat_P Parameter: Temperature (deg C) Value: 42 vs. 22
  misc_feature: MA Experiment 20000173 PARAMETER Experiment Name: At_42deg_Heat_P Parameter: Timepoint (hr) Value: 6
  misc_feature: MA Experiment 20000173 PARAMETER Experiment Name: At_42deg_Heat_P Parameter: Tissue Value: Aerial
  misc_feature: MA Experiment ID: 20000180 Result: Down-regulated in Transcription
  misc_feature: MA Experiment 20000180 PARAMETER Experiment Name: At_Germinating_Seeds_P Parameter: Age (hr) Value: 24 vs. 0
  misc_feature: MA Experiment 20000180 PARAMETER Experiment Name: At_Germinating_Seeds_P Parameter: Tissue Value: Germinating Seeds
  misc_feature: MA Experiment ID: 20000182 Result: Up-regulated in Transcription
  misc_feature: MA Experiment 20000182 PARAMETER Experiment Name: At_2mM_SA_P Parameter: Age (day) Value: 14
  misc_feature: MA Experiment 20000182 PARAMETER Experiment Name: At_2mM_SA_P Parameter: Organism Value: A. thaliana
  misc_feature: MA Experiment 20000182 PARAMETER Experiment Name: At_2mM_SA_P Parameter: Plant Line Value: WS
  misc_feature: MA Experiment 20000182 PARAMETER Experiment Name: At_2mM_SA_P Parameter: Timepoint (hr) Value: 6
  misc_feature: MA Experiment 20000182 PARAMETER Experiment Name: At_2mM_SA_P Parameter: Tissue Value: Aerial
  misc_feature: MA Experiment 20000182 PARAMETER Experiment Name: At_2mM_SA_P Parameter: Treatment Value: 2mM SA vs. No Treatment
  misc_feature: MA Experiment ID: 20000185 Result: Up-regulated in Transcription
  misc_feature: MA Experiment 20000185 PARAMETER Experiment Name: At_Roots__P Parameter: Age (day) Value: 7 vs. 21
  misc_feature: MA Experiment 20000185 PARAMETER Experiment Name: At_Roots__P Parameter: Organism Value: A. thaliana
  misc_feature: MA Experiment 20000185 PARAMETER Experiment Name: At_Roots__P Parameter: Tissue Value: Roots vs. Whole Plant
  misc_feature: MA Experiment ID: 20000234 Result: Down-regulated in Transcription
  misc_feature: MA Experiment 20000234 PARAMETER Experiment Name: At_Siliques_P Parameter: Age (day) Value: 21
  misc_feature: MA Experiment 20000234 PARAMETER Experiment Name: At_Siliques_P Parameter: Organism Value: A. thaliana
  misc_feature: MA Experiment 20000234 PARAMETER Experiment Name: At_Siliques_P Parameter: Plant Line Value: WS
  misc_feature: MA Experiment 20000234 PARAMETER Experiment Name: At_Siliques_P Parameter: Tissue Value: Less Than 5mm Siliques vs. Whole Plant
  misc_feature: MA Experiment ID: 20000264 Result: Down-regulated in Transcription
  misc_feature: MA Experiment 20000264 PARAMETER Experiment Name: At_Open_Flower_P Parameter: Age (day) Value: 21
  misc_feature: MA Experiment 20000264 PARAMETER Experiment Name: At_Open_Flower_P Parameter: Plant Line Value: WS
  misc_feature: MA Experiment 20000264 PARAMETER Experiment Name: At_Open_Flower_P Parameter: Tissue Value: Open Flower vs. Whole Plant
  misc_feature: MA Experiment ID: 20000265 Result: Down-regulated in Transcription
  misc_feature: MA Experiment 20000265 PARAMETER Experiment Name: At_Open_Flower_P Parameter: Age (day) Value: 21
  misc_feature: MA Experiment 20000265 PARAMETER Experiment Name: At_Open_Flower_P Parameter: Plant Line Value: WS
  misc_feature: MA Experiment 20000265 PARAMETER Experiment Name: At_Open_Flower_P Parameter: Tissue Value: Closed Flower vs. Whole Plant
  misc_feature: MA Experiment ID: 20000438 Result: Down-regulated in Transcription
  misc_feature: MA Experiment 20000438 PARAMETER Experiment Name: At_Shoots__P Parameter: Age (day) Value: 14
  misc_feature: MA Experiment 20000438 PARAMETER Experiment Name: At_Shoots__P Parameter: Tissue Value: Shoots vs. Whole Plant
  misc_feature: MA Experiment ID: 20000439 Result: Up-regulated in Transcription
  misc_feature: MA Experiment 20000439 PARAMETER Experiment Name: At_Roots__P Parameter: Age (day) Value: 14 vs. 21
  misc_feature: MA Experiment 20000439 PARAMETER Experiment Name: At_Roots__P Parameter: Organism Value: A. thaliana
  misc_feature: MA Experiment 20000439 PARAMETER Experiment Name: At_Roots__P Parameter: Tissue Value: Roots vs. Whole Plant
  misc_feature: MA Experiment ID: 20000443 Result: Up-regulated in Transcription
  misc_feature: MA Experiment 20000443 PARAMETER Experiment Name: At_1uM_BR-BRZ__P Parameter: Tissue Value: Shoot Apices
  misc_feature: MA Experiment 20000443 PARAMETER Experiment Name: At_1uM_BR-BRZ__P Parameter: Treatment Value: 1uM BRZ vs. No Treatment
  misc_feature: MA Experiment ID: 20000445 Result: Up-regulated in Transcription
  misc_feature: MA Experiment 20000445 PARAMETER Experiment Name: At_100uM_NAA__P Parameter: Age (day) Value: 14
  misc_feature: MA Experiment 20000445 PARAMETER Experiment Name: At_100uM_NAA__P Parameter: Organism Value: A. thaliana
  misc_feature: MA Experiment 20000445 PARAMETER Experiment Name: At_100uM_NAA__P Parameter: Plant Line Value: WS
  misc_feature: MA Experiment 20000445 PARAMETER Experiment Name: At_100uM_NAA__P Parameter: Timepoint (hr) Value: 6
  misc_feature: MA Experiment 20000445 PARAMETER Experiment Name: At_100uM_NAA__P Parameter: Tissue Value: Aerial
  misc_feature: MA Experiment 20000445 PARAMETER Experiment Name: At_100uM_NAA__P Parameter: Treatment Value: 100uM NAA vs. No Treatment
  misc_feature: MA Experiment ID: 20000456 Result: Up-regulated in Transcription
  misc_feature: MA Experiment 20000456 PARAMETER Experiment Name: At_100uM_BA_P Parameter: Age (day) Value: 14
  misc_feature: MA Experiment 20000456 PARAMETER Experiment Name: At_100uM_BA_P Parameter: Organism Value: A. thaliana
  misc_feature: MA Experiment 20000456 PARAMETER Experiment Name: At_100uM_BA_P Parameter: Plant Line Value: WS
  misc_feature: MA Experiment 20000456 PARAMETER Experiment Name: At_100uM_BA_P Parameter: Timepoint (hr) Value: 6
  misc_feature: MA Experiment 20000456 PARAMETER Experiment Name: At_100uM_BA_P Parameter: Tissue Value: Aerial
  misc_feature: MA Experiment 20000456 PARAMETER Experiment Name: At_100uM_BA_P Parameter: Treatment Value: 100uM BA vs. No Treatment
  misc_feature: MA Experiment ID: 20000527 Result: Down-regulated in Transcription
  misc_feature: MA Experiment 20000527 PARAMETER Experiment Name: At_10percent_PEG_P Parameter: Age (day) Value: 20
  misc_feature: MA Experiment 20000527 PARAMETER Experiment Name: At_10percent_PEG_P Parameter: Organism Value: A. thaliana
  misc_feature: MA Experiment 20000527 PARAMETER Experiment Name: At_10percent_PEG_P Parameter: Plant Line Value: WS
  misc_feature: MA Experiment 20000527 PARAMETER Experiment Name: At_10percent_PEG_P Parameter: Timepoint (day) Value: 20
  misc_feature: MA Experiment 20000527 PARAMETER Experiment Name: At_10percent_PEG_P Parameter: Tissue Value: Whole Plant
  misc_feature: MA Experiment 20000527 PARAMETER Experiment Name: At_10percent_PEG_P Parameter: Treatment Value: 10percent PEG vs. No Treatment
  misc_feature: MA Experiment ID: 20000575 Result: Down-regulated in Transcription
  misc_feature: MA Experiment 20000575 PARAMETER Experiment Name: At_100uM_ABA_Mutants__P Parameter: Organism Value: A. thaliana
  misc_feature: MA Experiment 20000575 PARAMETER Experiment Name: At_100uM_ABA_Mutants__P Parameter: Plant Line Value: CS22
  misc_feature: MA Experiment 20000575 PARAMETER Experiment Name: At_100uM_ABA_Mutants__P Parameter: Timepoint (hr) Value: 6
  misc_feature: MA Experiment 20000575 PARAMETER Experiment Name: At_100uM_ABA_Mutants__P Parameter: Tissue Value: Whole Plant
  misc_feature: MA Experiment 20000575 PARAMETER Experiment Name: At_100uM_ABA_Mutants__P Parameter: Treatment Value: 1uM ABA vs. No Treatment
  misc_feature: MA Experiment ID: 20000576 Result: Down-regulated in Transcription
  misc_feature: MA Experiment 20000576 PARAMETER Experiment Name: At_100uM_ABA_Mutants__P Parameter: Organism Value: A. thaliana
  misc_feature: MA Experiment 20000576 PARAMETER Experiment Name: At_100uM_ABA_Mutants__P Parameter: Plant Line Value: CS23
  misc_feature: MA Experiment 20000576 PARAMETER Experiment Name: At_100uM_ABA_Mutants__P Parameter: Timepoint (hr) Value: 6
  misc_feature: MA Experiment 20000576 PARAMETER Experiment Name: At_100uM_ABA_Mutants__P Parameter: Tissue Value: Whole Plant
  misc_feature: MA Experiment 20000576 PARAMETER Experiment Name: At_100uM_ABA_Mutants__P Parameter: Treatment Value: 1uM ABA vs. No Treatment
  misc_feature: MA Experiment ID: 20000709 Result: Up-regulated in Transcription
  misc_feature: MA Experiment 20000709 PARAMETER Experiment Name: At_15mM_NH4NO3_L-to-H_P Parameter: Age (hr) Value: 14
  misc_feature: MA Experiment 20000709 PARAMETER Experiment Name: At_15mM_NH4NO3_L-to-H_P Parameter: Organism Value: A. thaliana
  misc_feature: MA Experiment 20000709 PARAMETER Experiment Name: At_15mM_NH4NO3_L-to-H_P Parameter: Plant Line Value: WS
  misc_feature: MA Experiment 20000709 PARAMETER Experiment Name: At_15mM_NH4NO3_L-to-H_P Parameter: Timepoint (hr) Value: 4
  misc_feature: MA Experiment 20000709 PARAMETER Experiment Name: At_15mM_NH4NO3_L-to-H_P Parameter: Tissue Value: Aerial
  misc_feature: MA Experiment 20000709 PARAMETER Experiment Name: At_15mM_NH4NO3_L-to-H_P Parameter: Treatment Value: 15mM NH4NO3 vs. 30mM Mannitol
  misc_feature: MA Experiment ID: 20000794 Result: Down-regulated in Transcription
  misc_feature: MA Experiment 20000794 PARAMETER Experiment Name: At_Petals_P Parameter: Age (day) Value: 23-25 days
  misc_feature: MA Experiment 20000794 PARAMETER Experiment Name: At_Petals_P Parameter: Plant Line Value: WS
  misc_feature: MA Experiment 20000794 PARAMETER Experiment Name: At_Petals_P Parameter: Tissue Value: Petals vs. Whole plant
  misc_feature: MA Experiment ID: 20001560 Result: Up-regulated in Transcription
  misc_feature: MA Experiment 20001560 PARAMETER Experiment Name: At_Drought_Soil_Dry_P Parameter: Age (day) Value: 28
  misc_feature: MA Experiment 20001560 PARAMETER Experiment Name: At_Drought_Soil_Dry_P Parameter: Organism Value: A. thaliana
  misc_feature: MA Experiment 20001560 PARAMETER Experiment Name: At_Drought_Soil_Dry_P Parameter: Plant Line Value: WS
  misc_feature: MA Experiment 20001560 PARAMETER Experiment Name: At_Drought_Soil_Dry_P Parameter: Post Timepoint (hr) Value: None
  misc_feature: MA Experiment 20001560 PARAMETER Experiment Name: At_Drought_Soil_Dry_P Parameter: Post-Treatment Value: None
  misc_feature: MA Experiment 20001560 PARAMETER Experiment Name: At_Drought_Soil_Dry_P Parameter: Timepoint (day) Value: 14
  misc_feature: MA Experiment 20001560 PARAMETER Experiment Name: At_Drought_Soil_Dry_P Parameter: Treatment Value: Drought vs. No Drought
  misc_feature: MA Experiment ID: 20001755 Result: Down-regulated in Transcription
  misc_feature: MA Experiment 20001755 PARAMETER Experiment Name: At_50mM_NH4NO3_L-to-H_P Parameter: Timepoint (hr) Value: 2
  misc_feature: MA Experiment 20001755 PARAMETER Experiment Name: At_50mM_NH4NO3_L-to-H_P Parameter: Tissue Value: Leaf
  misc_feature: MA Experiment 20001755 PARAMETER Experiment Name: At_50mM_NH4NO3_L-to-H_P Parameter: Treatment Value: 50mM NH4NO3 vs 100mM Mannitol
  misc_feature: MA Experiment ID: 20001904 Result: Down-regulated in Transcription
  misc_feature: MA Experiment 20001904 PARAMETER Experiment Name: At_Drought_Reproduction_P Parameter: Age (day) Value: 37
  misc_feature: MA Experiment 20001904 PARAMETER Experiment Name: At_Drought_Reproduction_P Parameter: Organism Value: A. thaliana
  misc_feature: MA Experiment 20001904 PARAMETER Experiment Name: At_Drought_Reproduction_P Parameter: Plant Line Value: WS
  misc_feature: MA Experiment 20001904 PARAMETER Experiment Name: At_Drought_Reproduction_P Parameter: Timepoint (day) Value: 7
  misc_feature: MA Experiment 20001904 PARAMETER Experiment Name: At_Drought_Reproduction_P Parameter: Tissue Value: Rosettes
  misc_feature: MA Experiment 20001904 PARAMETER Experiment Name: At_Drought_Reproduction_P Parameter: Treatment Value: Drought vs. No Drought
agagagaaattcacaacaaaaatggagactagagaaacaaaaccagtgatctttctcttccctttccctttacaaggtcacttaaacccaatgtttcagctcgccaacatcttcttcaacagaggcttctccatcactgtgatccacactgagttcaactctccaaactcttccaatttccctcatttcactttcgtatccatccccgatagcttgtctgaacctgaatcctatcccgatgtcatcgagattctccatgacctcaattccaagtgtgttgctccttttggtgattgcttaaagaagcttatatctgaagaaccaacagcagcttgtgtgattgttgacgctctttggtacttcactcacgatttaaccgagaaattcaatttcccgaggattgttctccgaaccgttaacctctcagctttcgtcgctttctcaaagtttcatgttttacgagagaaagggtatctttctttacaagagactaaggcagactcaccggttccggagcttccgtatcttagaatgaaggatcttccatggttccagacagaagatccaagatcaggggataagttacagataggtgtgatgaagtcactaaagtcttcctcaggaatcatattcaacgccattgaagatcttgaaacagatcagcttgatgaagcccgcatagaattcccagttccactcttctgtattggaccctttcacaggtacgtttcagcttcatccagtagcttacttgcacacgacatgacttgtctctcctggttagacaagcaagcaacaaattccgtaatctacgcaagtcttggaagcattgcttcgatcgatgaatctgaattcttggagattgcttggggtctaagaaacagcaaccaaccttttctatgggtggttagacccggtttaatccacgggaaagaatggatcgagattctgcctaaagggttcatcgaaaatctcgagggccggggtaaaatagtgaaatgggcacctcagcctgaagttttagctcaccgtgcaacaggcggattcttaacacattgtggatggaactcaacacttgagggcatatgtgaagctataccaatgatatgcagaccatcttttggggaccagagggtgaatgctagatacattaacgatgtttggaagatcggattgcatttggaaaacaaggtagagagactagtgatcgaaaacgcggttagaacactaatgacgagctcggaaggggaagagatccgcaagaggattatgcccatgaaggaaactgttgaacaatgccttaagcttggaggttcatcatttcggaatctcgaaaacttaattgcttatatattgtctttctaatgcggtgttcttcttcttctccacatccaaatttgctttcctttgatttaatctgcattcccataatcagacacattttatcattcaaaaactttaccatgt

SEQ ID NO: 97929 - protein, 454 aa, Arabidopsis thaliana
  peptide (1)..(454): Ceres Seq. ID no. 13578642
  misc_feature (15)..(444): Pfam Name: UDP-glucoronosyl and UDP-glucosyl transferase Pfam Description: UDP-glucoronosyl and UDP-glucosyl transferase
  misc_feature (8)..(454): Homolog of NCBI NO: 15229731 NR Description: glycosyltransferase family [Arabidopsis thaliana]
  misc_feature (8)..(454): Homolog of NCBI NO: 26452976 NR Description: unknown protein [Arabidopsis thaliana]
  misc_feature (228)..(454): Homolog of NCBI NO: 12322891 NR Description: putative UDP-glucuronosyltransferase, 5' partial;
  misc_feature (8)..(452): Homolog of NCBI NO: 15239257 NR Description: glucuronosyl transferase-related protein thaliana] >gi|15010632|gb|AAK73975.1| AT5g05860/MJJ3_28 thaliana] >gi|23505951|gb|AAN28835.1| At5g05860/MJJ3_28
  misc_feature (8)..(448): Homolog of NCBI NO: 15239258 NR Description: glucuronosyl transferase-related protein
  misc_feature (17)..(454): Homolog of NCBI NO: 15239259 NR Description: UDP-glycosyltransferase family [Arabidopsis
  misc_feature (17)..(454): Homolog of NCBI NO: 15239288 NR Description: glucuronosyl transferase-related protein
  misc_feature (8)..(454): Homolog of NCBI NO: 15228174 NR Description: glycosyltransferase family [Arabidopsis thaliana]
  misc_feature (17)..(454): Homolog of NCBI NO: 15239287 NR Description: glucuronosyl transferase-related protein
  misc_feature (19)..(454): Homolog of NCBI NO: 21593451 NR Description: glucuronosyl transferase-like protein
REKFTTKMETRETKPVIFLFPFPLQGHLNPMFQLANIFFNRGFSITVIHTEFNSPNSSNFPHFTFVSIPDSLSEPESYPDVIEILHDLNSKCVAPFGDCLKKLISEEPTAACVIVDALWYFTHDLTEKFNFPRIVLRTVNLSAFVAFSKFHVLREKGYLSLQETKADSPVPELPYLRMKDLPWFQTEDPRSGDKLQIGVMKSLKSSSGIIFNAIEDLETDQLDEARIEFPVPLFCIGPFHRYVSASSSSLLAHDMTCLSWLDKQATNSVIYASLGSIASIDESEFLEIAWGLRNSNQPFLWVVRPGLIHGKEWIEILPKGFIENLEGRGKIVKWAPQPEVLAHRATGGFLTHCGWNSTLEGICEAIPMICRPSFGDQRVNARYINDVWKIGLHLENKVERLVIENAVRTLMTSSEGEEIRKRIMPMKETVEQCLKLGGSSFRNLENLIAYILSF

SEQ ID NO: 97930 - protein, 447 aa, Arabidopsis thaliana
  peptide (1)..(447): Ceres Seq. ID no. 13578643
  misc_feature (8)..(437): Pfam Name: UDP-glucoronosyl and UDP-glucosyl transferase Pfam Description: UDP-glucoronosyl and UDP-glucosyl transferase
  misc_feature (1)..(447): Homolog of NCBI NO: 15229731 NR Description: glycosyltransferase family [Arabidopsis thaliana]
  misc_feature (1)..(447): Homolog of NCBI NO: 26452976 NR Description: unknown protein [Arabidopsis thaliana]
  misc_feature (221)..(447): Homolog of NCBI NO: 12322891 NR Description: putative UDP-glucuronosyltransferase, 5' partial;
  misc_feature (1)..(445): Homolog of NCBI NO: 15239257 NR Description: glucuronosyl transferase-related protein thaliana] >gi|15010632|gb|AAK73975.1| AT5g05860/MJJ3_28 thaliana] >gi|23505951|gb|AAN28835.1| At5g05860/MJJ3_28
  misc_feature (1)..(441): Homolog of NCBI NO: 15239258 NR Description: glucuronosyl transferase-related protein
  misc_feature (10)..(447): Homolog of NCBI NO: 15239259 NR Description: UDP-glycosyltransferase family [Arabidopsis
  misc_feature (10)..(447): Homolog of NCBI NO: 15239288 NR Description: glucuronosyl transferase-related protein
  misc_feature (1)..(447): Homolog of NCBI NO: 15228174 NR Description: glycosyltransferase family [Arabidopsis thaliana]
  misc_feature (10)..(447): Homolog of NCBI NO: 15239287 NR Description: glucuronosyl transferase-related protein
  misc_feature (12)..(447): Homolog of NCBI NO: 21593451 NR Description: glucuronosyl transferase-like protein
METRETKPVIFLFPFPLQGHLNPMFQLANIFFNRGFSITVIHTEFNSPNSSNFPHFTFVSIPDSLSEPESYPDVIEILHDLNSKCVAPFGDCLKKLISEEPTAACVIVDALWYFTHDLTEKFNFPRIVLRTVNLSAFVAFSKFHVLREKGYLSLQETKADSPVPELPYLRMKDLPWFQTEDPRSGDKLQIGVMKSLKSSSGIIFNAIEDLETDQLDEARIEFPVPLFCIGPFHRYVSASSSSLLAHDMTCLSWLDKQATNSVIYASLGSIASIDESEFLEIAWGLRNSNQPFLWVVRPGLIHGKEWIEILPKGFIENLEGRGKIVKWAPQPEVLAHRATGGFLTHCGWNSTLEGICEAIPMICRPSFGDQRVNARYINDVWKIGLHLENKVERLVIENAVRTLMTSSEGEEIRKRIMPMKETVEQCLKLGGSSFRNLENLIAYILSF

SEQ ID NO: 97931 - protein, 424 aa, Arabidopsis thaliana
  peptide (1)..(424): Ceres Seq. ID no. 13578644
  misc_feature (1)..(414): Pfam Name: UDP-glucoronosyl and UDP-glucosyl transferase Pfam Description: UDP-glucoronosyl and UDP-glucosyl transferase
  misc_feature (1)..(424): Homolog of NCBI NO: 15229731 NR Description: glycosyltransferase family [Arabidopsis thaliana]
  misc_feature (1)..(424): Homolog of NCBI NO: 26452976 NR Description: unknown protein [Arabidopsis thaliana]
  misc_feature (198)..(424): Homolog of NCBI NO: 12322891 NR Description: putative UDP-glucuronosyltransferase, 5' partial;
  misc_feature (1)..(422): Homolog of NCBI NO: 15239257 NR Description: glucuronosyl transferase-related protein thaliana] >gi|15010632|gb|AAK73975.1| AT5g05860/MJJ3_28 thaliana] >gi|23505951|gb|AAN28835.1| At5g05860/MJJ3_28
  misc_feature (1)..(418): Homolog of NCBI NO: 15239258 NR Description: glucuronosyl transferase-related protein
  misc_feature (1)..(424): Homolog of NCBI NO: 15239259 NR Description: UDP-glycosyltransferase family [Arabidopsis
  misc_feature (1)..(424): Homolog of NCBI NO: 15239288 NR Description: glucuronosyl transferase-related protein
  misc_feature (1)..(424): Homolog of NCBI NO: 15228174 NR Description: glycosyltransferase family [Arabidopsis thaliana]
  misc_feature (1)..(424): Homolog of NCBI NO: 15239287 NR Description: glucuronosyl transferase-related protein
  misc_feature (1)..(424): Homolog of NCBI NO: 21593451 NR Description: glucuronosyl transferase-like protein
MFQLANIFFNRGFSITVIHTEFNSPNSSNFPHFTFVSIPDSLSEPESYPDVIEILHDLNSKCVAPFGDCLKKLISEEPTAACVIVDALWYFTHDLTEKFNFPRIVLRTVNLSAFVAFSKFHVLREKGYLSLQETKADSPVPELPYLRMKDLPWFQTEDPRSGDKLQIGVMKSLKSSSGIIFNAIEDLETDQLDEARIEFPVPLFCIGPFHRYVSASSSSLLAHDMTCLSWLDKQATNSVIYASLGSIASIDESEFLEIAWGLRNSNQPFLWVVRPGLIHGKEWIEILPKGFIENLEGRGKIVKWAPQPEVLAHRATGGFLTHCGWNSTLEGICEAIPMICRPSFGDQRVNARYINDVWKIGLHLENKVERLVIENAVRTLMTSSEGEEIRKRIMPMKETVEQCLKLGGSSFRNLENLIAYILSF

SEQ ID NO: 97932 - DNA, 1161 bp, Arabidopsis thaliana
  misc_feature (1)..(1161): Ceres Seq. ID no. 13578720
  misc_feature: MA Experiment ID: 20000307 Result: Up-regulated in Transcription
  misc_feature: MA Experiment 20000307 PARAMETER Experiment Name: At_Germinating_Seeds_Sub_P Parameter: Age (hr) Value: 24 vs. 0
  misc_feature: MA Experiment 20000307 PARAMETER Experiment Name: At_Germinating_Seeds_Sub_P Parameter: Organism Value: A. thaliana
  misc_feature: MA Experiment 20000307 PARAMETER Experiment Name: At_Germinating_Seeds_Sub_P Parameter: Plant Line Value: WS
  misc_feature: MA Experiment 20000307 PARAMETER Experiment Name: At_Germinating_Seeds_Sub_P Parameter: Tissue Value: Germinating Seeds
  misc_feature: MA Experiment ID: 20000314 Result: Up-regulated in Transcription
  misc_feature: MA Experiment 20000314 PARAMETER Experiment Name: At_14day_Shoots-Roots_Sub_P Parameter: Age (day) Value: 14
  misc_feature: MA Experiment 20000314 PARAMETER Experiment Name: At_14day_Shoots-Roots_Sub_P Parameter: Organism Value: A. thaliana
  misc_feature: MA Experiment 20000314 PARAMETER Experiment Name: At_14day_Shoots-Roots_Sub_P Parameter: Plant Line Value: WS
  misc_feature: MA Experiment 20000314 PARAMETER Experiment Name: At_14day_Shoots-Roots_Sub_P Parameter: Tissue Value: Roots vs. Whole Plant
  misc_feature: MA Experiment ID: 20000347 Result: Up-regulated in Transcription
  misc_feature: MA Experiment 20000347 PARAMETER Experiment Name: At_2mM_SA_Sub_P Parameter: Age (day) Value: 14
  misc_feature: MA Experiment 20000347 PARAMETER Experiment Name: At_2mM_SA_Sub_P Parameter: Organism Value: A. thaliana
  misc_feature: MA Experiment 20000347 PARAMETER Experiment Name: At_2mM_SA_Sub_P Parameter: Plant Line Value: WS
  misc_feature: MA Experiment 20000347 PARAMETER Experiment Name: At_2mM_SA_Sub_P Parameter: Timepoint (hr) Value: 6
  misc_feature: MA Experiment 20000347 PARAMETER Experiment Name: At_2mM_SA_Sub_P Parameter: Tissue Value: Aerial
  misc_feature: MA Experiment 20000347 PARAMETER Experiment Name: At_2mM_SA_Sub_P Parameter: Treatment Value: 2mM SA vs. No Treatment
  misc_feature: MA Experiment ID: 20000355 Result: Up-regulated in Transcription
  misc_feature: MA Experiment 20000355 PARAMETER Experiment Name: At_Siliques_Sub_P Parameter: Age (day) Value: 21
  misc_feature: MA Experiment 20000355 PARAMETER Experiment Name: At_Siliques_Sub_P Parameter: Organism Value: A. thaliana
  misc_feature: MA Experiment 20000355 PARAMETER Experiment Name: At_Siliques_Sub_P Parameter: Plant Line Value: WS
  misc_feature: MA Experiment 20000355 PARAMETER Experiment Name: At_Siliques_Sub_P Parameter: Tissue Value: Less Than 5mm Siliques vs. Whole Plant
atggacaaggcttcaatcactgaaggaaagccgattcgatgcaaagcagcaatcttaagaaaagcaggagaaccattggtgatagaagagatccaagttgatccacctcaagcttacgaagtcagaatcaaaattttatgcacttctctatgtcacacggatgttactttctggaaactagacagtggaccgcttgcaagatttcctaggattctaggtcatgaagcagtcggtgtggtcgagagtattggagaaaaggtagacggatttaaacaaggcgacgtcgttttgccagtgtttcatcctcaatgtgaagaatgcaaagagtgcatatctccaaagagcaactggtgcacaaaatatacaaacgattatttatcaaacacaagacgatatggaatgacttcaagattcaaggactctcgtggagaagatattcaccatttcatctttgtctcaagttttactgaatataccgttgtagatatcgcacatctcgtcaaaatatctcctgaaattcccgttgatatagcggccttgctcagctgcagtgttgccacaggacttggagctgcgtggaaagtggctgacgtagaggaaggttccactgtcgttatctttggccttggtgctgttggactagcggttgcagaaggagtcagattgcgtggagccgcaaaaatcatcggtgtggatctcaatcccgcgaaatttgaaataggtaaaagatttggaatcacagattttgtcaatcctgctttgtgtggggagaagacaattagcgaggtgattagagaaatgacagatgtaggagctgactacagttttgaatgcattggtttagcttccttgatggaagaggcattcaagagtactcgcccgggatcgggtaaaacgatagtattggggatggaacaaaaggctttgccaataagcttgggtagttatgatcttctcagaggcagaactgtatgcggcactttatttggcggtttgaaacccaaacttgatattcctattctcgtggatcgttatttgaaaaaggagcttaatctagaggatctgattacacacgaattaagctttgaagaaattaacaaagctttccatttattggctgagggaaactctatccgttgcattatatggatggataaatag

SEQ ID NO: 97933 - protein, 386 aa, Arabidopsis thaliana
  peptide (1)..(386): Ceres Seq. ID no. 13578721
  misc_feature (1)..(386): Homolog of NCBI NO: 15219884 NR Description: alcohol dehydrogenase (ADH), putative
  misc_feature (1)..(386): Homolog of NCBI NO: 15219882 NR Description: alcohol dehydrogenase (ADH), putative
  misc_feature (5)..(386): Homolog of NCBI NO: 21618210 NR Description: alcohol dehydrogenase like protein [Arabidopsis
  misc_feature (5)..(386): Homolog of NCBI NO: 18415840 NR Description: alcohol dehydrogenase (ADH), putative
  misc_feature (5)..(386): Homolog of NCBI NO: 11250327 NR Description: probable alcohol dehydrogenase (EC 1.1.1.1)
  misc_feature (9)..(386): Homolog of NCBI NO: 7705214 NR Description: alcohol dehydrogenase ADH [Lycopersicon
  misc_feature (9)..(386): Homolog of NCBI NO: 1076579 NR Description: probable alcohol dehydrogenase (EC 1.1.1.1) ADH3a
  misc_feature (1)..(385): Homolog of NCBI NO: 34906828 NR Description: contains EST C99136(E10204)~similar to alcohol
  misc_feature (10)..(384): Homolog of NCBI NO: 15238330 NR Description: alcohol dehydrogenase (ADH), putative thaliana] >gi|10177010|dbj|BAB10198.1| alcohol dehydrogenase thaliana] >gi|19698971|gb|AAL91221.1| alcohol dehydrogenase
  misc_feature (5)..(386): Homolog of NCBI NO: 7705215 NR Description: alcohol dehydrogenase ADH [Lycopersicon
MDKASITEGKPIRCKAAILRKAGEPLVIEEIQVDPPQAYEVRIKILCTSLCHTDVTFWKLDSGPLARFPRILGHEAVGVVESIGEKVDGFKQGDVVLPVFHPQCEECKECISPKSNWCTKYTNDYLSNTRRYGMTSRFKDSRGEDIHHFIFVSSFTEYTVVDIAHLVKISPEIPVDIAALLSCSVATGLGAAWKVADVEEGSTVVIFGLGAVGLAVAEGVRLRGAAKIIGVDLNPAKFEIGKRFGITDFVNPALCGEKTISEVIREMTDVGADYSFECIGLASLMEEAFKSTRPGSGKTIVLGMEQKALPISLGSYDLLRGRTVCGTLFGGLKPKLDIPILVDRYLKKELNLEDLITHELSFEEINKAFHLLAEGNSIRCIIWMDK

SEQ ID NO: 97934 - protein, 253 aa, Arabidopsis thaliana
  peptide (1)..(253): Ceres Seq. ID no. 13578722
  misc_feature (1)..(253): Homolog of NCBI NO: 15219884 NR Description: alcohol dehydrogenase (ADH), putative
  misc_feature (1)..(253): Homolog of NCBI NO: 15219882 NR Description: alcohol dehydrogenase (ADH), putative
  misc_feature (1)..(253): Homolog of NCBI NO: 21618210 NR Description: alcohol dehydrogenase like protein [Arabidopsis
  misc_feature (1)..(253): Homolog of NCBI NO: 18415840 NR Description: alcohol dehydrogenase (ADH), putative
  misc_feature (1)..(253): Homolog of NCBI NO: 11250327 NR Description: probable alcohol dehydrogenase (EC 1.1.1.1)
  misc_feature (1)..(253): Homolog of NCBI NO: 7705214 NR Description: alcohol dehydrogenase ADH [Lycopersicon
  misc_feature (1)..(253): Homolog of NCBI NO: 1076579 NR Description: probable alcohol dehydrogenase (EC 1.1.1.1) ADH3a
  misc_feature (1)..(252): Homolog of NCBI NO: 34906828 NR Description: contains EST C99136(E10204)~similar to alcohol
  misc_feature (1)..(251): Homolog of NCBI NO: 15238330 NR Description: alcohol dehydrogenase (ADH), putative thaliana] >gi|10177010|dbj|BAB10198.1| alcohol dehydrogenase thaliana] >gi|19698971|gb|AAL91221.1| alcohol dehydrogenase
  misc_feature (1)..(253): Homolog of NCBI NO: 7705215 NR Description: alcohol dehydrogenase ADH [Lycopersicon
MTSRFKDSRGEDIHHFIFVSSFTEYTVVDIAHLVKISPEIPVDIAALLSCSVATGLGAAWKVADVEEGSTVVIFGLGAVGLAVAEGVRLRGAAKIIGVDLNPAKFEIGKRFGITDFVNPALCGEKTISEVIREMTDVGADYSFECIGLASLMEEAFKSTRPGSGKTIVLGMEQKALPISLGSYDLLRGRTVCGTLFGGLKPKLDIPILVDRYLKKELNLEDLITHELSFEEINKAFHLLAEGNSIRCIIWMDK

SEQ ID NO: 97935 - DNA, 1100 bp, Arabidopsis thaliana
  misc_feature (1)..(1100): Ceres Seq. ID no. 13578723
  misc_feature: MA Experiment ID: 20000173 Result: Up-regulated in Transcription
  misc_feature: MA Experiment 20000173 PARAMETER Experiment Name: At_42deg_Heat_P Parameter: Age (day) Value: 14
  misc_feature: MA Experiment 20000173 PARAMETER Experiment Name: At_42deg_Heat_P Parameter: Organism Value: A. thaliana
  misc_feature: MA Experiment 20000173 PARAMETER Experiment Name: At_42deg_Heat_P Parameter: Plant Line Value: WS
  misc_feature: MA Experiment 20000173 PARAMETER Experiment Name: At_42deg_Heat_P Parameter: Temperature (deg C) Value: 42 vs. 22
  misc_feature: MA Experiment 20000173 PARAMETER Experiment Name: At_42deg_Heat_P Parameter: Timepoint (hr) Value: 6
  misc_feature: MA Experiment 20000173 PARAMETER Experiment Name: At_42deg_Heat_P Parameter: Tissue Value: Aerial
  misc_feature: MA Experiment ID: 20000180 Result: Up-regulated in Transcription
  misc_feature: MA Experiment 20000180 PARAMETER Experiment Name: At_Germinating_Seeds_P Parameter: Age (hr) Value: 24 vs. 0
  misc_feature: MA Experiment 20000180 PARAMETER Experiment Name: At_Germinating_Seeds_P Parameter: Tissue Value: Germinating Seeds
aaaaaaaaaaaaaaggtaggaaacgtgggccgaacattatcagaaggattcaagcgaagcaaaatcccaccctttcttctgtgacagagtgtctgtatttgttgtttcccttcaattggagagagtaagcgagtctcttacgcccagagagagagagagagagaggcttgtttgttttctctcctctaagaaacaatcagtctcataaagtggcaaagatggttgcagaacgatacacagtcgatttgaataagccacttgtgtttcaggttggtcatcttggcgaagaatatcaggaatggattcatcaacctattgtatgcgttgagggtcctcgttttttcgaaagtgatttttgggagtttttgactcgcacggtttggtgggcaatcccaacaatctggcttccagttgtttgctacgttctttcaatatcggcgagtaagggacttacgtttccccagatcggtttaatagttgcttttggtgtactcacgtggacactgctcgagtacacgcttcatcgcttccttttccacatccaaaccaagagttactgggcaaacactgcacactatcttcttcatggatgccatcacaagcacccacaagacggccttcgtcttgttttccctcctacagcaacagctattctcttggttccactatggaagcttctccatctcctagctactcctgctacagcacctgctattcttggaggcatattgtttggctatgtgatgtatgatattacccattactatctacaccatggtcaacctaaagaaccaacctttaaacatcttaagaaataccacctgaatcatcactttaggattcaggacaaaggatatggaatcacttcctctctatgggacaaagtctttggaacacttcccggtattaaagccgctgcgaagaagagctaaatcggatttctgtttgccatttttcagagtgtcgaaaaactcactgatattgtgtattctaaattcatcaggtgattcaatgactgtttaactacttctgtatacgatctattcaccatatttgaacatatttttagtggtttaatatcattcagaatttggtctttg

SEQ ID NO: 97936 - protein, 237 aa, Arabidopsis thaliana; identical to SEQ ID NO: 46634
  peptide (1)..(237): Ceres Seq. ID no. 13578724
  misc_feature (86)..(229): Pfam Name: Fatty acid hydroxylase Pfam Description: Fatty acid hydroxylase
  misc_feature (1)..(237): Homolog of NCBI NO: 15233426 NR Description: fatty acid hydroxylase, putative [Arabidopsis
  misc_feature (1)..(236): Homolog of NCBI NO: 15226828 NR Description: fatty acid hydroxylase (FAH1) [Arabidopsis
  misc_feature (1)..(237): Homolog of NCBI NO: 34897078 NR Description: putative fatty acid hydroxylase [Oryza sativa
  misc_feature (90)..(227): Homolog of NCBI NO: 32766618 NR Description: Unknown (protein for IMAGE:6878212) [Xenopus
  misc_feature (8)..(108): Homolog of NCBI NO: 32766618 NR Description: Unknown (protein for IMAGE:6878212) [Xenopus
  misc_feature (8)..(227): Homolog of NCBI NO: 17505701 NR Description: Fatty acid hydroxylase (36.3 kD) [Caenorhabditis
  misc_feature (14)..(227): Homolog of NCBI NO: 39589620 NR Description: Hypothetical protein CBG12227 [Caenorhabditis
  misc_feature (8)..(236): Homolog of NCBI NO: 6323928 NR Description: Required for the hydroxylation of the very long fatty acid (VLCFA), located in the endoplasmic reticulum; Scs7p
  misc_feature (6)..(226): Homolog of NCBI NO: 18447515 NR Description: RE63157p [Drosophila melanogaster]
  misc_feature (8)..(226): Homolog of NCBI NO: 40746791 NR Description: hypothetical protein AN0918.2 [Aspergillus

SEQ ID NO: 97937 - DNA, 1220 bp, Arabidopsis thaliana
  misc_feature (1)..(1220): Ceres Seq. ID no. 13578733
  misc_feature: MA Experiment ID: 20000180 Result: Down-regulated in Transcription
  misc_feature: MA Experiment 20000180 PARAMETER Experiment Name: At_Germinating_Seeds_P Parameter: Age (hr) Value: 24 vs. 0
  misc_feature: MA Experiment 20000180 PARAMETER Experiment Name: At_Germinating_Seeds_P Parameter: Tissue Value: Germinating Seeds
  misc_feature: MA Experiment ID: 20000439 Result: Up-regulated in Transcription
  misc_feature: MA Experiment 20000439 PARAMETER Experiment Name: At_Roots__P Parameter: Age (day) Value: 14 vs. 21
  misc_feature: MA Experiment 20000439 PARAMETER Experiment Name: At_Roots__P Parameter: Organism Value: A. thaliana
  misc_feature: MA Experiment 20000439 PARAMETER Experiment Name: At_Roots__P Parameter: Tissue Value: Roots vs. Whole Plant
atggatgaagaagtttcagcttcggcgactccagagtcccggagaaagaggattggaaagaagacgacgtcgtttattcaaagatctatatccttaaactacatgccatctcttcttgtccacatgtccgatacgacatcgtttggccagtacgacttcgttcggccgcaaacctccgtatatcgcaggctctctcactctttccgtcttctgatttctccctccaaaacaaacctcggaagagaaaattggagcgaaggagcgatagatatggcgtcggcgtcctcgtctgacggagttgccggaaggattcagaacgcttctttggttcttgtctccgataacagttccacgcttgctgatatccgcaaagctgtggcaatgatgaagaacattgcagttcaattggagaaagaaaatcaaacggacaaggttaaggaccttgaaaattctgtggctgagttattggatttgcatagtgattgtaatcaccgttcgacagcaattcaatccgttgcaaatcggtaccaacccgtggaacaattaacggactttaaaaagttgcttgatgatgaattcacaaagctcaaggctacaccttcctcagtgccacaaaatgatcatttgatgcgccagttcagggaagcagtttggaatgttcatcatgcaggtgaaccaatgcctggtgacgatgatgaggacattgttatgaccagtactcagtgccctcttctaaacatgacatgtcccttgagcgggaagcctgtcactgaattagcagatccagttcgcagtatggattgcaggcacgtctatgaaaaatctgtaatcctgcattacatagtcaacaatccaaatgcgaattgtcctgtagcagggtgccgaggtaaactgcagaatagcaaagtgatttgtgatgcaatgttgaagtttgaaatagaggagatgcgctcgttgaacaaacaatctaatagggctgaagtgattgaagacttcacagaagatgtggatgaagattagagatcagacatttcttggaccgggttttaagcgctgcaatgaaacaagttgaagccatatgtttcacaactttttgctattcttagtccgttcggtatattttatcaaacgtgaaatttgataccaattgtttccactttatggaggatgtaaatagtcgatctcttccgattctgaattcaactgctgttttttttgcc

SEQ ID NO: 97938 - protein, 339 aa, Arabidopsis thaliana
  peptide (1)..(339): Ceres Seq. ID no. 13578734
  misc_feature (58)..(339): Homolog of NCBI NO: 11994504 NR Description: emb|CAB09999.1~gene_id:F4B12.6~similar to unknown
  misc_feature (91)..(339): Homolog of NCBI NO: 30683483 NR Description: expressed protein [Arabidopsis thaliana]
MDEEVSASATPESRRKRIGKKTTSFIQRSISLNYMPSLLVHMSDTTSFGQYDFVRPQTSVYRRLSHSFRLLISPSKTNLGRENWSEGAIDMASASSSDGVAGRIQNASLVLVSDNSSTLADIRKAVAMMKNIAVQLEKENQTDKVKDLENSVAELLDLHSDCNHRSTAIQSVANRYQPVEQLTDFKKLLDDEFTKLKATPSSVPQNDHLMRQFREAVWNVHHAGEPMPGDDDEDIVMTSTQCPLLNMTCPLSGKPVTELADPVRSMDCRHVYEKSVILHYIVNNPNANCPVAGCRGKLQNSKVICDAMLKFEIEEMRSLNKQSNRAEVIEDFTEDVDED

SEQ ID NO: 97939 - protein, 305 aa, Arabidopsis thaliana
  peptide (1)..(305): Ceres Seq. ID no. 13578735
  misc_feature (24)..(305): Homolog of NCBI NO: 11994504 NR Description: emb|CAB09999.1~gene_id:F4B12.6~similar to unknown
  misc_feature (57)..(305): Homolog of NCBI NO: 30683483 NR Description: expressed protein [Arabidopsis thaliana]
MPSLLVHMSDTTSFGQYDFVRPQTSVYRRLSHSFRLLISPSKTNLGRENWSEGAIDMASASSSDGVAGRIQNASLVLVSDNSSTLADIRKAVAMMKNIAVQLEKENQTDKVKDLENSVAELLDLHSDCNHRSTAIQSVANRYQPVEQLTDFKKLLDDEFTKLKATPSSVPQNDHLMRQFREAVWNVHHAGEPMPGDDDEDIVMTSTQCPLLNMTCPLSGKPVTELADPVRSMDCRHVYEKSVILHYIVNNPNANCPVAGCRGKLQNSKVICDAMLKFEIEEMRSLNKQSNRAEVIEDFTEDVDED

SEQ ID NO: 97940 - protein, 298 aa, Arabidopsis thaliana
  peptide (1)..(298): Ceres Seq. ID no. 13578736
  misc_feature (17)..(298): Homolog of NCBI NO: 11994504 NR Description: emb|CAB09999.1~gene_id:F4B12.6~similar to unknown
  misc_feature (50)..(298): Homolog of NCBI NO: 30683483 NR Description: expressed protein [Arabidopsis thaliana]
MSDTTSFGQYDFVRPQTSVYRRLSHSFRLLISPSKTNLGRENWSEGAIDMASASSSDGVAGRIQNASLVLVSDNSSTLADIRKAVAMMKNIAVQLEKENQTDKVKDLENSVAELLDLHSDCNHRSTAIQSVANRYQPVEQLTDFKKLLDDEFTKLKATPSSVPQNDHLMRQFREAVWNVHHAGEPMPGDDDEDIVMTSTQCPLLNMTCPLSGKPVTELADPVRSMDCRHVYEKSVILHYIVNNPNANCPVAGCRGKLQNSKVICDAMLKFEIEEMRSLNKQSNRAEVIEDFTEDVDED

SEQ ID NO: 97941 - DNA, 2414 bp, Arabidopsis thaliana
  misc_feature (1)..(2414): Ceres Seq. ID no. 13578752
  misc_feature: MA Experiment ID: 20000179 Result: Up-regulated in Transcription
  misc_feature: MA Experiment 20000179 PARAMETER Experiment Name: At_Germinating_Seeds_P Parameter: Age (hr) Value: 6 vs. 0
  misc_feature: MA Experiment 20000179 PARAMETER Experiment Name: At_Germinating_Seeds_P Parameter: Tissue Value: Germinating Seeds
  misc_feature: MA Experiment ID: 20000234 Result: Up-regulated in Transcription
  misc_feature: MA Experiment 20000234 PARAMETER Experiment Name: At_Siliques_P Parameter: Age (day) Value: 21
  misc_feature: MA Experiment 20000234 PARAMETER Experiment Name: At_Siliques_P Parameter: Organism Value: A. thaliana
  misc_feature: MA Experiment 20000234 PARAMETER Experiment Name: At_Siliques_P Parameter: Plant Line Value: WS
  misc_feature: MA Experiment 20000234 PARAMETER Experiment Name: At_Siliques_P Parameter: Tissue Value: Less Than 5mm Siliques vs. Whole Plant
  misc_feature: MA Experiment ID: 20000286 Result: Up-regulated in Transcription
  misc_feature: MA Experiment 20000286 PARAMETER Experiment Name: At_Open_Flower_P Parameter: Age (day) Value: 21
  misc_feature: MA Experiment 20000286 PARAMETER Experiment Name: At_Open_Flower_P Parameter: Plant Line Value: WS
  misc_feature: MA Experiment 20000286 PARAMETER Experiment Name: At_Open_Flower_P Parameter: Tissue Value: Half Open vs. Whole Plant
  misc_feature: MA Experiment ID: 20000439 Result: Up-regulated in Transcription
  misc_feature: MA Experiment 20000439 PARAMETER Experiment Name: At_Roots__P Parameter: Age (day) Value: 14 vs. 21
  misc_feature: MA Experiment 20000439 PARAMETER Experiment Name: At_Roots__P Parameter: Organism Value: A. thaliana
  misc_feature: MA Experiment 20000439 PARAMETER Experiment Name: At_Roots__P Parameter: Tissue Value: Roots vs. Whole Plant
atggtagttgcattttcgcttgaaattgtctgtccttttgctagtttgagtcacaattttcaattgaaaagaaataagagagagagatttagagcgtgtgagggagataggaagagagaaagtgagcgagagacgatcacggccgcgctgaaatccacgaccacggccgcgctgaaatccacgaccacggccgctctgaagaagaagactctctccgtctcctcccttctcctcctccgtctaagagacaaggcatccccagacgccatgatctctctcactccctcgttgtttctgaacaagacggttgttcctggatgttccacacgcctctctctgcgccagcctagaactataattactcctcctgcttccttgagagtcttttcctctctcggatctaaccaggatcccaccggcagcgttttgattgagaccactgccacttcatcctcctctctcgagacctccgccgccgacattgttcccaaatccaccgtatctggtggagttcaggatgtctacggcgaggatgccgccaccgaggacatgcctatcactccttggtctctctctgtcgccagtgggtatacgttgttgcgtgatccacatcacaacaaaggccttgcctttagccacagagagcgtgacgctcactatctacgcggcctcctcccccccactgttatctcacaagatcttcaggttaaaaaaattatgcacactcttcgtcagtatcaagttcccttgcagaagtatatggctatgatggatctccaggagaccaacgagaggctgttttacaaacttctcattgatcacgtcgaggagttgctacccgttatctacactccaacggttggggaagcctgccagaagtatggtagcattttcctgcgtccacaggggctttttatcagcttgaaagaaaaaggtaagattcatgaagtgctgaggaactggcctgagaagaacatccaggtcattgttgtcactgatggggagcgcattttagggttaggagatcttggatgtcagggaatgggaatacctgttgggaaactttctctctacacagcccttggaggtgtccggccatctgcctgtctgcccgtaacaatcgatgttgggacaaacaacgaaaagctattgaacgatgagttctacatagggctccgccaaaggagagctacaggagaggaatactccgaacttatgcatgaattcatgacagcagtcaagcagaactatggggagaaagtcgttattcagtttgaagactttgccaaccataatgcttttgatctgttagctaagtatggtacaacacatcttgttttcaatgacgatattcagggcacagcatcagttgtgcttgctggacttatcgctgctcttagatttgtggggggatccttgtcagaccacagattcctcttcctcggggctggagaggctggcactggaatagctgaactaattgctcttgagatttcaaagaagtcccatattccattggaagaggctcggaagaatatttggctcgtggattcaaagggattgattgtcagttcccggaaagaatccattcaacatttcaaaaagccctgggctcatgaccatgaaccaataagggaacttgttgatgccgtcaaggcaatcaagccgacagttctgatcggaacatcaggtgtaggtcaaacattcactcaagacgtggtggaaaccatggcaaagctaaatgagaaacccatcattctttctctttcgaacccaacttctcagtcagaatgtacggcagaagaggcctatacgtggagtcagggacgggcgatctttgcaagtggaagcccatttgcgccagtagagtatgagggaaagacgtttgtgcctggacaggcaaacaacgcatacatcttccctgggtttggactcgggctaataatgtcagggacgatccgtgtccatgatgacatgcttctggcagcatcagaagctttggctgaggaactgatggaggaacactatgagaaggggatgatataccctcccttcaggaatatcagaaaaatctcagctcgtattgcagctaaggtggctgccaaggcctacgaactgggactggccacgaggttgcctcagcccaaggagctggagcagtgtgctgagagcagcatgtacagcccttcgtatcgaagctaccgctgaggataagcttaatctaatttgttatgtctcatacgactcttatggccatttctctcctctcctattcgttcaccttccacttcccgtgagatttttgtttgtttgtttgtcagcatctttaaaatcttgtgttgtaatcactgtttcccttgttgtttctttttaagtccgtaataatcctcctatggaaattgtttctctgggcc

SEQ ID NO: 97942 - protein, 735 aa, Arabidopsis thaliana
  peptide (1)..(735): Ceres Seq. ID no. 13578753
  misc_feature (451)..(704): Pfam Name: Malic enzyme, NAD binding domain Pfam Description: Malic enzyme, NAD binding domain
  misc_feature (90)..(735): Homolog of NCBI NO: 8118507 NR Description: NADP-dependent malic protein [Ricinus communis]
  misc_feature (90)..(735): Homolog of NCBI NO: 7431231 NR Description: malate dehydrogenase
  misc_feature (90)..(735): Homolog of NCBI NO: 1561774 NR Description: malate dehydrogenase [Vitis vinifera]
  misc_feature (108)..(735): Homolog of NCBI NO: 547886 NR Description: NADP-DEPENDENT MALIC ENZYME, CHLOROPLAST
  misc_feature (157)..(735): Homolog of NCBI NO: 1346485 NR Description: NADP-DEPENDENT MALIC ENZYME (NADP-ME)
  misc_feature (157)..(735): Homolog of NCBI NO: 228412 NR Description: malic enzyme
  misc_feature (157)..(735): Homolog of NCBI NO: 282848 NR Description: malate dehydrogenase
  misc_feature (144)..(735): Homolog of NCBI NO: 7431234 NR Description: malate dehydrogenase
  misc_feature (167)..(735): Homolog of NCBI NO: 7431235 NR Description: probable malate dehydrogenase
  misc_feature (179)..(735): Homolog of NCBI NO: 126737 NR Description: NADP-DEPENDENT MALIC ENZYME, CHLOROPLAST
MVVAFSLEIVCPFASLSHNFQLKRNKRERFRACEGDRKRESERETITAALKSTTTAALKSTTTAALKKKTLSVSSLLLLRLRDKASPDAMISLTPSLFLNKTVVPGCSTRLSLRQPRTIITPPASLRVFSSLGSNQDPTGSVLIETTATSSSSLETSAADIVPKSTVSGGVQDVYGEDAATEDMPITPWSLSVASGYTLLRDPHHNKGLAFSHRERDAHYLRGLLPPTVISQDLQVKKIMHTLRQYQVPLQKYMAMMDLQETNERLFYKLLIDHVEELLPVIYTPTVGEACQKYGSIFLRPQGLFISLKEKGKIHEVLRNWPEKNIQVIVVTDGERILGLGDLGCQGMGIPVGKLSLYTALGGVRPSACLPVTIDVGTNNEKLLNDEFYIGLRQRRATGEEYSELMHEFMTAVKQNYGEKVVIQFEDFANHNAFDLLAKYGTTHLVFNDDIQGTASVVLAGLIAALRFVGGSLSDHRFLFLGAGEAGTGIAELIALEISKKSHIPLEEARKNIWLVDSKGLIVSSRKESIQHFKKPWAHDHEPIRELVDAVKAIKPTVLIGTSGVGQTFTQDVVETMAKLNEKPIILSLSNPTSQSECTAEEAYTWSQGRAIFASGSPFAPVEYEGKTFVPGQANNAYIFPGFGLGLIMSGTIRVHDDMLLAASEALAEELMEEHYEKGMIYPPFRNIRKISARIAAKVAAKAYELGLATRLPQPKELEQCAESSMYSPSYRSYR

SEQ ID NO: 97943 - protein, 646 aa, Arabidopsis thaliana; identical to SEQ ID NO: 45959
  peptide (1)..(646): Ceres Seq. ID no. 13578754
  misc_feature (362)..(615): Pfam Name: Malic enzyme, NAD binding domain Pfam Description: Malic enzyme, NAD binding domain
  misc_feature (1)..(646): Homolog of NCBI NO: 8118507 NR Description: NADP-dependent malic protein [Ricinus communis]
  misc_feature (1)..(646): Homolog of NCBI NO: 7431231 NR Description: malate dehydrogenase
  misc_feature (1)..(646): Homolog of NCBI NO: 1561774 NR Description: malate dehydrogenase [Vitis vinifera]
  misc_feature (19)..(646): Homolog of NCBI NO: 547886 NR Description: NADP-DEPENDENT MALIC ENZYME, CHLOROPLAST
  misc_feature (68)..(646): Homolog of NCBI NO: 1346485 NR Description: NADP-DEPENDENT MALIC ENZYME (NADP-ME)
  misc_feature (68)..(646): Homolog of NCBI NO: 228412 NR Description: malic enzyme
  misc_feature (68)..(646): Homolog of NCBI NO: 282848 NR Description: malate dehydrogenase
  misc_feature (55)..(646): Homolog of NCBI NO: 7431234 NR Description: malate dehydrogenase
  misc_feature (78)..(646): Homolog of NCBI NO: 7431235 NR Description: probable malate dehydrogenase
  misc_feature (90)..(646): Homolog of NCBI NO: 126737 NR Description: NADP-DEPENDENT MALIC ENZYME, CHLOROPLAST

SEQ ID NO: 97944 - protein, 552 aa, Arabidopsis thaliana; identical to SEQ ID NO: 45960
  peptide (1)..(552): Ceres Seq. ID no. 13578755
  misc_feature (268)..(521): Pfam Name: Malic enzyme, NAD binding domain Pfam Description: Malic enzyme, NAD binding domain
  misc_feature (1)..(552): Homolog of NCBI NO: 8118507 NR Description: NADP-dependent malic protein [Ricinus communis]
  misc_feature (1)..(552): Homolog of NCBI NO: 7431231 NR Description: malate dehydrogenase
  misc_feature (1)..(552): Homolog of NCBI NO: 1561774 NR Description: malate dehydrogenase [Vitis vinifera]
  misc_feature (1)..(552): Homolog of NCBI NO: 547886 NR Description: NADP-DEPENDENT MALIC ENZYME, CHLOROPLAST
  misc_feature (1)..(552): Homolog of NCBI NO: 1346485 NR Description: NADP-DEPENDENT MALIC ENZYME (NADP-ME)
  misc_feature (1)..(552): Homolog of NCBI NO: 228412 NR Description: malic enzyme
  misc_feature (1)..(552): Homolog of NCBI NO: 282848 NR Description: malate dehydrogenase
  misc_feature (1)..(552): Homolog of NCBI NO: 7431234 NR Description: malate dehydrogenase
  misc_feature (1)..(552): Homolog of NCBI NO: 7431235 NR Description: probable malate dehydrogenase
  misc_feature (1)..(552): Homolog of NCBI NO: 126737 NR Description: NADP-DEPENDENT MALIC ENZYME, CHLOROPLAST

SEQ ID NO: 97945 - DNA, 1171 bp, Arabidopsis thaliana
  misc_feature (1)..(1171): Ceres Seq. ID no. 13578787
gacaaacaacttcataatggctttccacttccggcgactttgcttcttctcagctcttcttgccgtggttctccaactccttcatggcgtctctggccaactagttgtggttgaggaacctatttctgctcctccgcctccgctggtcgacctaaacaccggtgatggcattgtgccggcgctgtttgtcttcggtgactctctaatagacaatgggaataacaataacattccttcctttgccaaagccaattattttccttatggcattgatttcaatggcggtccgaccggtcgattctgcaatggcttaacgatggtcgatgggattgctcaactattggggctgccactgattccggcctactcggaagctaccggagatcaagtacttcgtggtgtcaactatgcttccgcagccgcggggattcttcctgacaccggaggaaactttgtgggacgcatacctttcgaccagcagattcataacttcgagacaacactagatcaggtggcgagcaagtccggtggtgcagtggccattgcggattcggtgactcgaagcttgttcttcatcggaatgggaagcaacgactatctcaacaattacttgatgcccaatttccctacccgtaaccaatacaactcccaacagttcggtgatctcttggttcaacattacaccgatcagctcaccagactatataatcttggtggtcggaaatttgtagtggccggacttggaagaatggggtgcattcccagcattctagctcaaggaaacgacggtaaatgctcggaagaagtgaaccaacttgttcttcctttcaacacaaacgttaaaacaatgatctctaatctcaaccagaatctcccggatgctaaatttatttacctcgacatcgctcatatgttcgaagacatcgttgctaaccaagcagcttatggtcttactactatggacaaaggatgttgtggaataggaaaaaacagaggacagatcacttgtcttccctttgaaacgccttgtcctaacagagatcagtatgtgttttgggatgctttccatcctacagagaaagttaatctcataatggcaaagaaagcgtttgctggtgaccgcactgtcgcgtacccgatcaacattcagcaattggctagtctcaattaa

SEQ ID NO: 97946 - protein, 389 aa, Arabidopsis thaliana; identical to SEQ ID NO: 48855
  peptide (1)..(389): Ceres Seq. ID no. 13578788
  misc_feature (61)..(369): Pfam Name: GDSL-like Lipase/Acylhydrolase Pfam Description: GDSL-like Lipase/Acylhydrolase
  misc_feature (6)..(389): Homolog of NCBI NO: 18409881 NR Description: GDSL-motif lipase/hydrolase protein [Arabidopsis
  misc_feature (58)..(388): Homolog of NCBI NO: 18398991 NR Description: GDSL-motif lipase/hydrolase protein [Arabidopsis >gi|20466732|gb|AAM20683.1| unknown protein [Arabidopsis >gi|23198228|gb|AAN15641.1| unknown protein [Arabidopsis
  misc_feature (48)..(388): Homolog of NCBI NO: 15242458 NR Description: GDSL-motif lipase/hydrolase protein [Arabidopsis
  misc_feature (48)..(388): Homolog of NCBI NO: 21553940 NR Description: GDSL-motif lipase/hydrolase-like protein
  misc_feature (58)..(388): Homolog of NCBI NO: 15220512 NR Description: GDSL-motif lipase/hydrolase protein [Arabidopsis
  misc_feature (58)..(388): Homolog of NCBI NO: 15220514 NR Description: GDSL-motif lipase/hydrolase protein [Arabidopsis
  misc_feature (58)..(388): Homolog of NCBI NO: 21592417 NR Description: lipase/hydrolase, putative [Arabidopsis thaliana]
  misc_feature (58)..(388): Homolog of NCBI NO: 34909504 NR Description: putative GDSL-motif lipase/hydrolase-like protein
  misc_feature (58)..(388): Homolog of NCBI NO: 21594055 NR Description: lipase/hydrolase, putative [Arabidopsis thaliana]
  misc_feature (49)..(388): Homolog of NCBI NO: 7485419 NR Description: hypothetical protein F13C5.140 - Arabidopsis >gi|2832625|emb|CAA16754.1| putative protein [Arabidopsis >gi|7268691|emb|CAB78899.1| putative protein [Arabidopsis

SEQ ID NO: 97947 - protein, 384 aa, Arabidopsis thaliana; identical to SEQ ID NO: 48856
  peptide (1)..(384): Ceres Seq. ID no. 13578789
  misc_feature (56)..(364): Pfam Name: GDSL-like Lipase/Acylhydrolase Pfam Description: GDSL-like Lipase/Acylhydrolase
  misc_feature (1)..(384): Homolog of NCBI NO: 18409881 NR Description: GDSL-motif lipase/hydrolase protein [Arabidopsis
  misc_feature (53)..(383): Homolog of NCBI NO: 18398991 NR Description: GDSL-motif lipase/hydrolase protein [Arabidopsis >gi|20466732|gb|AAM20683.1| unknown protein [Arabidopsis >gi|23198228|gb|AAN15641.1| unknown protein [Arabidopsis
  misc_feature (43)..(383): Homolog of NCBI NO: 15242458 NR Description: GDSL-motif lipase/hydrolase protein [Arabidopsis
  misc_feature (43)..(383): Homolog of NCBI NO: 21553940 NR Description: GDSL-motif lipase/hydrolase-like protein
  misc_feature (53)..(383): Homolog of NCBI NO: 15220512 NR Description: GDSL-motif lipase/hydrolase protein [Arabidopsis
  misc_feature (53)..(383): Homolog of NCBI NO: 15220514 NR Description: GDSL-motif lipase/hydrolase protein [Arabidopsis
  misc_feature (53)..(383): Homolog of NCBI NO: 21592417 NR Description: lipase/hydrolase, putative [Arabidopsis thaliana]
  misc_feature (53)..(383): Homolog of NCBI NO: 34909504 NR Description: putative GDSL-motif lipase/hydrolase-like protein
  misc_feature (53)..(383): Homolog of NCBI NO: 21594055 NR Description: lipase/hydrolase, putative [Arabidopsis thaliana]
  misc_feature (44)..(383): Homolog of NCBI NO: 7485419 NR Description: hypothetical protein F13C5.140 - Arabidopsis >gi|2832625|emb|CAA16754.1| putative protein [Arabidopsis >gi|7268691|emb|CAB78899.1| putative protein [Arabidopsis

SEQ ID NO: 97948 - protein, 284 aa, Arabidopsis thaliana; identical to SEQ ID NO: 48857
  peptide (1)..(284): Ceres Seq. ID no. 13578790
  misc_feature (1)..(264): Pfam Name: GDSL-like Lipase/Acylhydrolase Pfam Description: GDSL-like Lipase/Acylhydrolase
  misc_feature (1)..(284): Homolog of NCBI NO: 18409881 NR Description: GDSL-motif lipase/hydrolase protein [Arabidopsis
  misc_feature (1)..(283): Homolog of NCBI NO: 18398991 NR Description: GDSL-motif lipase/hydrolase protein [Arabidopsis >gi|20466732|gb|AAM20683.1| unknown protein [Arabidopsis >gi|23198228|gb|AAN15641.1| unknown protein [Arabidopsis
  misc_feature (1)..(283): Homolog of NCBI NO: 15242458 NR Description: GDSL-motif lipase/hydrolase protein [Arabidopsis
  misc_feature (1)..(283): Homolog of NCBI NO: 21553940 NR Description: GDSL-motif lipase/hydrolase-like protein
  misc_feature (1)..(283): Homolog of NCBI NO: 15220512 NR Description: GDSL-motif lipase/hydrolase protein [Arabidopsis
  misc_feature (1)..(283): Homolog of NCBI NO: 15220514 NR Description: GDSL-motif lipase/hydrolase protein [Arabidopsis
  misc_feature (1)..(283): Homolog of NCBI NO: 21592417 NR Description: lipase/hydrolase, putative [Arabidopsis thaliana]
  misc_feature (1)..(283): Homolog of NCBI NO: 34909504 NR Description: putative GDSL-motif lipase/hydrolase-like protein
  misc_feature (1)..(283): Homolog of NCBI NO: 21594055 NR Description: lipase/hydrolase, putative [Arabidopsis thaliana]
  misc_feature (1)..(283): Homolog of NCBI NO: 7485419 NR Description: hypothetical protein F13C5.140 - Arabidopsis >gi|2832625|emb|CAA16754.1| putative protein [Arabidopsis >gi|7268691|emb|CAB78899.1| putative protein [Arabidopsis

SEQ ID NO: 97949 - DNA, 1674 bp, Arabidopsis thaliana
  misc_feature (1)..(1674): Ceres Seq. ID no. 13578791
  misc_feature: MA Experiment ID: 20000171 Result: Down-regulated in Transcription
  misc_feature: MA Experiment 20000171 PARAMETER Experiment Name: At_42deg_Heat_P Parameter: Age (day) Value: 14
  misc_feature: MA Experiment 20000171 PARAMETER Experiment Name: At_42deg_Heat_P Parameter: Organism Value: A. thaliana
  misc_feature: MA Experiment 20000171 PARAMETER Experiment Name: At_42deg_Heat_P Parameter: Plant Line Value: WS
  misc_feature: MA Experiment 20000171 PARAMETER Experiment Name: At_42deg_Heat_P Parameter: Temperature (deg C) Value: 42 vs. 22
  misc_feature: MA Experiment 20000171 PARAMETER Experiment Name: At_42deg_Heat_P Parameter: Timepoint (hr) Value: 1
  misc_feature: MA Experiment 20000171 PARAMETER Experiment Name: At_42deg_Heat_P Parameter: Tissue Value: Aerial
  misc_feature: MA Experiment ID: 20000173 Result: Down-regulated in Transcription
  misc_feature: MA Experiment 20000173 PARAMETER Experiment Name: At_42deg_Heat_P Parameter: Age (day) Value: 14
  misc_feature: MA Experiment 20000173 PARAMETER Experiment Name: At_42deg_Heat_P Parameter: Organism Value: A. thaliana
  misc_feature: MA Experiment 20000173 PARAMETER Experiment Name: At_42deg_Heat_P Parameter: Plant Line Value: WS
  misc_feature: MA Experiment 20000173 PARAMETER Experiment Name: At_42deg_Heat_P Parameter: Temperature (deg C) Value: 42 vs. 22
  misc_feature: MA Experiment 20000173 PARAMETER Experiment Name: At_42deg_Heat_P Parameter: Timepoint (hr) Value: 6
  misc_feature: MA Experiment 20000173 PARAMETER Experiment Name: At_42deg_Heat_P Parameter: Tissue Value: Aerial
  misc_feature: MA Experiment ID: 20000184 Result: Down-regulated in Transcription
  misc_feature: MA Experiment 20000184 PARAMETER Experiment Name: At_Shoots__P Parameter: Age (day) Value: 7
  misc_feature: MA Experiment 20000184 PARAMETER Experiment Name: At_Shoots__P Parameter: Tissue Value: Shoots vs. Whole Plant
  misc_feature: MA Experiment ID: 20000185 Result: Down-regulated in Transcription
  misc_feature: MA Experiment 20000185 PARAMETER Experiment Name: At_Roots__P Parameter: Age (day) Value: 7 vs. 21
  misc_feature: MA Experiment 20000185 PARAMETER Experiment Name: At_Roots__P Parameter: Organism Value: A. thaliana
  misc_feature: MA Experiment 20000185 PARAMETER Experiment Name: At_Roots__P Parameter: Tissue Value: Roots vs. Whole Plant
  misc_feature: MA Experiment ID: 20000439 Result: Down-regulated in Transcription
  misc_feature: MA Experiment 20000439 PARAMETER Experiment Name: At_Roots__P Parameter: Age (day) Value: 14 vs. 21
  misc_feature: MA Experiment 20000439 PARAMETER Experiment Name: At_Roots__P Parameter: Organism Value: A. thaliana
  misc_feature: MA Experiment 20000439 PARAMETER Experiment Name: At_Roots__P Parameter: Tissue Value: Roots vs. Whole Plant
  misc_feature: MA Experiment ID: 20000495 Result: Up-regulated in Transcription
  misc_feature: MA Experiment 20000495 PARAMETER Experiment Name: At_Guard_Cells_P Parameter: Harvest Date Value: 8/2/2002
  misc_feature: MA Experiment 20000495 PARAMETER Experiment Name: At_Guard_Cells_P Parameter: Organism Value: A. thaliana
  misc_feature: MA Experiment 20000495 PARAMETER Experiment Name: At_Guard_Cells_P Parameter: Tissue Value: Guard Cells vs. Leaves
  misc_feature: MA Experiment ID: 20000527 Result: Up-regulated in Transcription
  misc_feature: MA Experiment 20000527 PARAMETER Experiment Name: At_10percent_PEG_P Parameter: Age (day) Value: 20
  misc_feature: MA Experiment 20000527 PARAMETER Experiment Name: At_10percent_PEG_P Parameter: Organism Value: A. thaliana
  misc_feature: MA Experiment 20000527 PARAMETER Experiment Name: At_10percent_PEG_P Parameter: Plant Line Value: WS
  misc_feature: MA Experiment 20000527 PARAMETER Experiment Name: At_10percent_PEG_P Parameter: Timepoint (day) Value: 20
  misc_feature: MA Experiment 20000527 PARAMETER Experiment Name: At_10percent_PEG_P Parameter: Tissue Value: Whole Plant
  misc_feature: MA Experiment 20000527 PARAMETER Experiment Name: At_10percent_PEG_P Parameter: Treatment Value: 10percent PEG vs. No Treatment
  misc_feature: MA Experiment ID: 20001451 Result: Down-regulated in Transcription
  misc_feature: MA Experiment 20001451 PARAMETER Experiment Name: At_Far-red-induction_P Parameter: Age (day) Value: 7
  misc_feature: MA Experiment 20001451 PARAMETER Experiment Name: At_Far-red-induction_P Parameter: Light Value: Far-red vs. White
  misc_feature: MA Experiment 20001451 PARAMETER Experiment Name: At_Far-red-induction_P Parameter: Organism Value: A. thaliana
  misc_feature: MA Experiment 20001451 PARAMETER Experiment Name: At_Far-red-induction_P Parameter: Plant Line Value: Columbia
  misc_feature: MA Experiment 20001451 PARAMETER Experiment Name: At_Far-red-induction_P Parameter: Timepoint (hr) Value: 24
  misc_feature: MA Experiment 20001451 PARAMETER Experiment Name: At_Far-red-induction_P Parameter: Tissue Value: Whole Plant
  misc_feature: MA Experiment ID: 20001554 Result: Down-regulated in Transcription
  misc_feature: MA Experiment 20001554 PARAMETER Experiment Name: At_Drought_Soil_Dry_P Parameter: Age (day) Value: 21
  misc_feature: MA Experiment 20001554 PARAMETER Experiment Name: At_Drought_Soil_Dry_P Parameter: Organism Value: A. thaliana
  misc_feature: MA Experiment 20001554 PARAMETER Experiment Name: At_Drought_Soil_Dry_P Parameter: Plant Line Value: WS
  misc_feature: MA Experiment 20001554 PARAMETER Experiment Name: At_Drought_Soil_Dry_P Parameter: Post Timepoint (hr) Value: None
  misc_feature: MA Experiment 20001554 PARAMETER Experiment Name: At_Drought_Soil_Dry_P Parameter: Post-Treatment Value: None
  misc_feature: MA Experiment 20001554 PARAMETER Experiment Name: At_Drought_Soil_Dry_P Parameter: Timepoint (day) Value: 7
  misc_feature: MA Experiment 20001554 PARAMETER Experiment Name: At_Drought_Soil_Dry_P Parameter: Treatment Value: Drought vs. No Drought
  misc_feature: MA Experiment ID: 20001555 Result: Down-regulated in Transcription
  misc_feature: MA Experiment 20001555 PARAMETER Experiment Name: At_Drought_Soil_Dry_P Parameter: Age (day) Value: 24
  misc_feature: MA Experiment 20001555 PARAMETER Experiment Name: At_Drought_Soil_Dry_P Parameter: Organism Value: A. thaliana
  misc_feature: MA Experiment 20001555 PARAMETER Experiment Name: At_Drought_Soil_Dry_P Parameter: Plant Line Value: WS
  misc_feature: MA Experiment 20001555 PARAMETER Experiment Name: At_Drought_Soil_Dry_P Parameter: Post Timepoint (hr) Value: None
  misc_feature: MA Experiment 20001555 PARAMETER Experiment Name: At_Drought_Soil_Dry_P Parameter: Post-Treatment Value: None
  misc_feature: MA Experiment 20001555 PARAMETER Experiment Name: At_Drought_Soil_Dry_P Parameter: Timepoint (day) Value: 10
  misc_feature: MA Experiment 20001555 PARAMETER Experiment Name: At_Drought_Soil_Dry_P Parameter: Treatment Value: Drought vs. No Drought
  misc_feature: MA Experiment ID: 20001557 Result: Down-regulated in Transcription
  misc_feature: MA Experiment 20001557 PARAMETER Experiment Name: At_Drought_Soil_Dry_P Parameter: Age (day) Value: 27
  misc_feature: MA Experiment 20001557 PARAMETER Experiment Name: At_Drought_Soil_Dry_P Parameter: Organism Value: A. thaliana
  misc_feature: MA Experiment 20001557 PARAMETER Experiment Name: At_Drought_Soil_Dry_P Parameter: Plant Line Value: WS
  misc_feature: MA Experiment 20001557 PARAMETER Experiment Name: At_Drought_Soil_Dry_P Parameter: Post Timepoint (hr) Value: 3
  misc_feature: MA Experiment 20001557 PARAMETER Experiment Name: At_Drought_Soil_Dry_P Parameter: Post-Treatment Value: Re-Water vs. No Drought
  misc_feature: MA Experiment 20001557 PARAMETER Experiment Name: At_Drought_Soil_Dry_P Parameter: Timepoint (day) Value: 13
  misc_feature: MA Experiment 20001557 PARAMETER Experiment Name: At_Drought_Soil_Dry_P Parameter: Treatment Value: Drought vs. No Drought
  misc_feature: MA Experiment ID: 20001558 Result: Down-regulated in Transcription
  misc_feature: MA Experiment 20001558 PARAMETER Experiment Name: At_Drought_Soil_Dry_P Parameter: Age (day) Value: 27
  misc_feature: MA Experiment 20001558 PARAMETER Experiment Name: At_Drought_Soil_Dry_P Parameter: Organism Value: A. thaliana
  misc_feature: MA Experiment 20001558 PARAMETER Experiment Name: At_Drought_Soil_Dry_P Parameter: Plant Line Value: WS
  misc_feature: MA Experiment 20001558 PARAMETER Experiment Name: At_Drought_Soil_Dry_P Parameter: Post Timepoint (hr) Value: 6
  misc_feature: MA Experiment 20001558 PARAMETER Experiment Name: At_Drought_Soil_Dry_P Parameter: Post-Treatment Value: Re-Water vs. No Drought
  misc_feature: MA Experiment 20001558 PARAMETER Experiment Name: At_Drought_Soil_Dry_P Parameter: Timepoint (day) Value: 13
  misc_feature: MA Experiment 20001558 PARAMETER Experiment Name: At_Drought_Soil_Dry_P Parameter: Treatment Value: Drought vs. No Drought
  misc_feature: MA Experiment ID: 20001768 Result: Up-regulated in Transcription
  misc_feature: MA Experiment 20001768 PARAMETER Experiment Name: At_Far-red-enriched-adult_P Parameter: Age (day) Value: 28
  misc_feature: MA Experiment 20001768 PARAMETER Experiment Name: At_Far-red-enriched-adult_P Parameter: Light Value: Far-red enriched vs. White
  misc_feature: MA Experiment 20001768 PARAMETER Experiment Name: At_Far-red-enriched-adult_P Parameter: Organism Value: A. thaliana
  misc_feature: MA Experiment 20001768 PARAMETER Experiment Name: At_Far-red-enriched-adult_P Parameter: Plant Line Value: Columbia
  misc_feature: MA Experiment 20001768 PARAMETER Experiment Name: At_Far-red-enriched-adult_P Parameter: Timepoint (hr) Value: 1
  misc_feature: MA Experiment 20001768 PARAMETER Experiment Name: At_Far-red-enriched-adult_P Parameter: Tissue Value: Aerial
atacgtgactcatcgtctttttcactcccacacgttctgctccagcgatactgtgagagaatctctgtgtggttctgaattcttaggctggaattgaattctgaaatggcggaggagtacaaggaagcgttgttggagaagcagaactatcacgacggatgtcccggctgtaaggtggagcagatgaagcagctccggcgaggatatccttacctcgagctttccttcgtttggattatcgtcctctccacttctctaccaatttcctcactctatcccttcctctactatatgattgaggattttggtgtcgcaaagacggagaaagatattgggttttatgctggttttgttggttgctcttttatgcttggaagagcactgacttctgtgttctggggaattgtggctgatcgttatggaagaaaacccattatactcttgggaactatctcaattgcaattttcaacgctctttttggcttgagctcaaatttttggatggcaattggcacaaggtttcttcttgggagtttcaactgtttgcttggaacaatgaaggcctatgcatcagaaatatttcgtgatgaatatcaagctaccgcaatgtcagctgttagtactgcttggggcattggactgatcattggccctgctcttggtggttttttagctcagccggcagacaaatatccaaatgtgttctcccaagaatctctttttggcagattccggtatgcattgccttgctttacgatttcagcttttgccttgcttgtgacagtactatgctgcttcatcccggagacactgcacaatcataagctggacagcttatcacatgatgattcatacgatatacttgaagctgcatctcatgaatcatctccttctaccgggaaggcaggaaaaaacgaaagaaaggcttctcagtctctcttgaagaattggccgctgatgtcatctatcattgtgtattgtgttctgtgtcttcatgatactgcatactcggagatatttgcactatgggctaacagtccaaggaagtatggaggtctgagctactcaacgaatgaagtcggtacagttcttgctatctcaggtctcggcctattctcttttcaggtatttgtttatcctttggctgagaaactgctaggacctgttctggtcacccgatatgctggggcactgatgatacctatacaaatgagttatccatttatagcaggcttgtcaggtctcagtctaagcttgatgttaaattgtgcatcaatcctcataaatgtcttaagtgtgtctgccataaccggcctgttgatccttcaaaatagagcagtggatcagagccaaagaggggcggctaatggaatagctatgactgcgatgtctctatttaagacagttggaccagctggtgctggcatcttattttcttggagtgagaggcgactaaacgctgcatttctaccaggatcgcatatggtattcttcgtcttgaatgtgatagtagtggtcggagtagctctgacattcaagccatttctaacgacgagtcgaagatgaaattcatttgaattggtaagatagggaatgtatggacaagttgattcttttcatttcagatacgaaagaaaccggtaataaaatttcactaaccttaggatttcagct

SEQ ID NO: 97950 - protein, 486 aa, Arabidopsis thaliana
  peptide (1)..(486): Ceres Seq. ID no. 13578792
  misc_feature (1)..(486): Homolog of NCBI NO: 22326785 NR Description: transporter - related [Arabidopsis thaliana]
  misc_feature (27)..(486): Homolog of NCBI NO: 20260160 NR Description: transporter-like protein [Arabidopsis thaliana]
  misc_feature (1)..(486): Homolog of NCBI NO: 30684565 NR Description: transporter-related protein [Arabidopsis >gi|14517414|gb|AAK62597.1| AT5g13750/MXE10_2 [Arabidopsis
  misc_feature (27)..(458): Homolog of NCBI NO: 10177340 NR Description: transporter-like protein [Arabidopsis thaliana]
  misc_feature (15)..(486): Homolog of NCBI NO: 23452823 NR Description: major facilitator superfamily antiporter [Oryza
  misc_feature (88)..(486): Homolog of NCBI NO: 30684567 NR Description: transporter-related protein [Arabidopsis thaliana]
  misc_feature (3)..(482): Homolog of NCBI NO: 15229781 NR Description: transporter - related [Arabidopsis thaliana]
  misc_feature (88)..(486): Homolog of NCBI NO: 21555230 NR Description: transporter-like protein [Arabidopsis thaliana]
  misc_feature (19)..(480): Homolog of NCBI NO: 23452821 NR Description: major facilitator superfamily antiporter [Oryza
  misc_feature (88)..(486): Homolog of NCBI NO: 23452819 NR Description: major facilitator superfamily antiporter [Zea
MAEEYKEALLEKQNYHDGCPGCKVEQMKQLRRGYPYLELSFVWIIVLSTSLPISSLYPFLYYMIEDFGVAKTEKDIGFYAGFVGCSFMLGRALTSVFWGIVADRYGRKPIILLGTISIAIFNALFGLSSNFWMAIGTRFLLGSFNCLLGTMKAYASEIFRDEYQATAMSAVSTAWGIGLIIGPALGGFLAQPADKYPNVFSQESLFGRFRYALPCFTISAFALLVTVLCCFIPETLHNHKLDSLSHDDSYDILEAASHESSPSTGKAGKNERKASQSLLKNWPLMSSIIVYCVLCLHDTAYSEIFALWANSPRKYGGLSYSTNEVGTVLAISGLGLFSFQVFVYPLAEKLLGPVLVTRYAGALMIPIQMSYPFIAGLSGLSLSLMLNCASILINVLSVSAITGLLILQNRAVDQSQRGAANGIAMTAMSLFKTVGPAGAGILFSWSERRLNAAFLPGSHMVFFVLNVIVVVGVALTFKPFLTTSRR

SEQ ID NO: 97951 - protein, 460 aa, Arabidopsis thaliana
  peptide (1)..(460): Ceres Seq. ID no. 13578793
  misc_feature (1)..(460): Homolog of NCBI NO: 22326785 NR Description: transporter - related [Arabidopsis thaliana]
  misc_feature (1)..(460): Homolog of NCBI NO: 20260160 NR Description: transporter-like protein [Arabidopsis thaliana]
  misc_feature (1)..(460): Homolog of NCBI NO: 30684565 NR Description: transporter-related protein [Arabidopsis >gi|14517414|gb|AAK62597.1| AT5g13750/MXE10_2 [Arabidopsis
  misc_feature (1)..(432): Homolog of NCBI NO: 10177340 NR Description: transporter-like protein [Arabidopsis thaliana]
  misc_feature (1)..(460): Homolog of NCBI NO: 23452823 NR Description: major facilitator superfamily antiporter [Oryza
  misc_feature (62)..(460): Homolog of NCBI NO: 30684567 NR Description: transporter-related protein [Arabidopsis thaliana]
  misc_feature (1)..(456): Homolog of NCBI NO: 15229781 NR Description: transporter - related [Arabidopsis thaliana]
  misc_feature (62)..(460): Homolog of NCBI NO: 21555230 NR Description: transporter-like protein [Arabidopsis thaliana]
  misc_feature (1)..(454): Homolog of NCBI NO: 23452821 NR Description: major facilitator superfamily antiporter [Oryza
  misc_feature (62)..(460): Homolog of NCBI NO: 23452819 NR Description: major facilitator superfamily antiporter [Zea
MKQLRRGYPYLELSFVWIIVLSTSLPISSLYPFLYYMIEDFGVAKTEKDIGFYAGFVGCSFMLGRALTSVFWGIVADRYGRKPIILLGTISIAIFNALFGLSSNFWMAIGTRFLLGSFNCLLGTMKAYASEIFRDEYQATAMSAVSTAWGIGLIIGPALGGFLAQPADKYPNVFSQESLFGRFRYALPCFTISAFALLVTVLCCFIPETLHNHKLDSLSHDDSYDILEAASHESSPSTGKAGKNERKASQSLLKNWPLMSSIIVYCVLCLHDTAYSEIFALWANSPRKYGGLSYSTNEVGTVLAISGLGLFSFQVFVYPLAEKLLGPVLVTRYAGALMIPIQMSYPFIAGLSGLSLSLMLNCASILINVLSVSAITGLLILQNRAVDQSQRGAANGIAMTAMSLFKTVGPAGAGILFSWSERRLNAAFLPGSHMVFFVLNVIVVVGVALTFKPFLTTSRR

SEQ ID NO: 97952 - protein, 424 aa, Arabidopsis thaliana
  peptide (1)..(424): Ceres Seq. ID no. 13578794
  misc_feature (1)..(424): Homolog of NCBI NO: 22326785 NR Description: transporter - related [Arabidopsis thaliana]
  misc_feature (1)..(424): Homolog of NCBI NO: 20260160 NR Description: transporter-like protein [Arabidopsis thaliana]
  misc_feature (1)..(424): Homolog of NCBI NO: 30684565 NR Description: transporter-related protein [Arabidopsis >gi|14517414|gb|AAK62597.1| AT5g13750/MXE10_2 [Arabidopsis
  misc_feature (1)..(396): Homolog of NCBI NO: 10177340 NR Description: transporter-like protein [Arabidopsis thaliana]
  misc_feature (1)..(424): Homolog of NCBI NO: 23452823 NR Description: major facilitator superfamily antiporter [Oryza
  misc_feature (26)..(424): Homolog of NCBI NO: 30684567 NR Description: transporter-related protein [Arabidopsis thaliana]
  misc_feature (1)..(420): Homolog of NCBI NO: 15229781 NR Description: transporter - related [Arabidopsis thaliana]
  misc_feature (26)..(424): Homolog of NCBI NO: 21555230 NR Description: transporter-like protein [Arabidopsis thaliana]
  misc_feature (1)..(418): Homolog of NCBI NO: 23452821 NR Description: major facilitator superfamily antiporter [Oryza
  misc_feature (26)..(424): Homolog of NCBI NO: 23452819 NR Description: major facilitator superfamily antiporter [Zea
MIEDFGVAKTEKDIGFYAGFVGCSFMLGRALTSVFWGIVADRYGRKPIILLGTISIAIFNALFGLSSNFWMAIGTRFLLGSFNCLLGTMKAYASEIFRDEYQATAMSAVSTAWGIGLIIGPALGGFLAQPADKYPNVFSQESLFGRFRYALPCFTISAFALLVTVLCCFIPETLHNHKLDSLSHDDSYDILEAASHESSPSTGKAGKNERKASQSLLKNWPLMSSIIVYCVLCLHDTAYSEIFALWANSPRKYGGLSYSTNEVGTVLAISGLGLFSFQVFVYPLAEKLLGPVLVTRYAGALMIPIQMSYPFIAGLSGLSLSLMLNCASILINVLSVSAITGLLILQNRAVDQSQRGAANGIAMTAMSLFKTVGPAGAGILFSWSERRLNAAFLPGSHMVFFVLNVIVVVGVALTFKPFLTTSRR

SEQ ID NO: 97953 - DNA, 981 bp, Arabidopsis thaliana
  misc_feature (1)..(981): Ceres Seq. ID no. 13578803
  misc_feature: MA Experiment ID: 20000234 Result: Up-regulated in Transcription
  misc_feature: MA Experiment 20000234 PARAMETER Experiment Name: At_Siliques_P Parameter: Age (day) Value: 21
  misc_feature: MA Experiment 20000234 PARAMETER Experiment Name: At_Siliques_P Parameter: Organism Value: A. thaliana
  misc_feature: MA Experiment 20000234 PARAMETER Experiment Name: At_Siliques_P Parameter: Plant Line Value: WS
  misc_feature: MA Experiment 20000234 PARAMETER Experiment Name: At_Siliques_P Parameter: Tissue Value: Less Than 5mm Siliques vs. Whole Plant
  misc_feature: MA Experiment ID: 20000264 Result: Up-regulated in Transcription
  misc_feature: MA Experiment 20000264 PARAMETER Experiment Name: At_Open_Flower_P Parameter: Age (day) Value: 21
  misc_feature: MA Experiment 20000264 PARAMETER Experiment Name: At_Open_Flower_P Parameter: Plant Line Value: WS
  misc_feature: MA Experiment 20000264 PARAMETER Experiment Name: At_Open_Flower_P Parameter: Tissue Value: Open Flower vs. Whole Plant
  misc_feature: MA Experiment ID: 20000265 Result: Up-regulated in Transcription
  misc_feature: MA Experiment 20000265 PARAMETER Experiment Name: At_Open_Flower_P Parameter: Age (day) Value: 21
  misc_feature: MA Experiment 20000265 PARAMETER Experiment Name: At_Open_Flower_P Parameter: Plant Line Value: WS
  misc_feature: MA Experiment 20000265 PARAMETER Experiment Name: At_Open_Flower_P Parameter: Tissue Value: Closed Flower vs. Whole Plant
  misc_feature: MA Experiment ID: 20000438 Result: Down-regulated in Transcription
  misc_feature: MA Experiment 20000438 PARAMETER Experiment Name: At_Shoots__P Parameter: Age (day) Value: 14
  misc_feature: MA Experiment 20000438 PARAMETER Experiment Name: At_Shoots__P Parameter: Tissue Value: Shoots vs. Whole Plant
  misc_feature: MA Experiment ID: 20000439 Result: Up-regulated in Transcription
  misc_feature: MA Experiment 20000439 PARAMETER Experiment Name: At_Roots__P Parameter: Age (day) Value: 14 vs. 21
  misc_feature: MA Experiment 20000439 PARAMETER Experiment Name: At_Roots__P Parameter: Organism Value: A. thaliana
  misc_feature: MA Experiment 20000439 PARAMETER Experiment Name: At_Roots__P Parameter: Tissue Value: Roots vs. Whole Plant
  misc_feature: MA Experiment ID: 20000527 Result: Down-regulated in Transcription
  misc_feature: MA Experiment 20000527 PARAMETER Experiment Name: At_10percent_PEG_P Parameter: Age (day) Value: 20
  misc_feature: MA Experiment 20000527 PARAMETER Experiment Name: At_10percent_PEG_P Parameter: Organism Value: A. thaliana
  misc_feature: MA Experiment 20000527 PARAMETER Experiment Name: At_10percent_PEG_P Parameter: Plant Line Value: WS
  misc_feature: MA Experiment 20000527 PARAMETER Experiment Name: At_10percent_PEG_P Parameter: Timepoint (day) Value: 20
  misc_feature: MA Experiment 20000527 PARAMETER Experiment Name: At_10percent_PEG_P Parameter: Tissue Value: Whole Plant
  misc_feature: MA Experiment 20000527 PARAMETER Experiment Name: At_10percent_PEG_P Parameter: Treatment Value: 10percent PEG vs. No Treatment
  misc_feature: MA Experiment ID: 20000794 Result: Up-regulated in Transcription
  misc_feature: MA Experiment 20000794 PARAMETER Experiment Name: At_Petals_P Parameter: Age (day) Value: 23-25 days
  misc_feature: MA Experiment 20000794 PARAMETER Experiment Name: At_Petals_P Parameter: Plant Line Value: WS
  misc_feature: MA Experiment 20000794 PARAMETER Experiment Name: At_Petals_P Parameter: Tissue Value: Petals vs. Whole plant
  misc_feature: MA Experiment ID: 20001556 Result: Down-regulated in Transcription
  misc_feature: MA Experiment 20001556 PARAMETER Experiment Name: At_Drought_Soil_Dry_P Parameter: Age (day) Value: 26
  misc_feature: MA Experiment 20001556 PARAMETER Experiment Name: At_Drought_Soil_Dry_P Parameter: Organism Value: A. thaliana
  misc_feature: MA Experiment 20001556 PARAMETER Experiment Name: At_Drought_Soil_Dry_P Parameter: Plant Line Value: WS
  misc_feature: MA Experiment 20001556 PARAMETER Experiment Name: At_Drought_Soil_Dry_P Parameter: Post Timepoint (hr) Value: None
  misc_feature: MA Experiment 20001556 PARAMETER Experiment Name: At_Drought_Soil_Dry_P Parameter: Post-Treatment Value: None
  misc_feature: MA Experiment 20001556 PARAMETER Experiment Name: At_Drought_Soil_Dry_P Parameter: Timepoint (day) Value: 12
  misc_feature: MA Experiment 20001556 PARAMETER Experiment Name: At_Drought_Soil_Dry_P Parameter: Treatment Value: Drought vs. No Drought
tctttagttctcctatctttctccaataatactcaaaaagcttaattattgtttcgttttctagcactctacaaaaatatggctccctcgtttctaagcgtcgcaagattcgttgaggcactactccgccggagattctcctccgctggtctctccttacaaaccctatccatcgactccgaaaccaccatacagttctggggaccaccaccgtcttcatcatcggaaaatacacaaaaaccgtcgctcctcctcctccatggttttggaccttccgctgtatggcaatggagccatcaggtcaagccactctctcacttctttcgtctctacgtccccgacctagtcttcttcggcggctcctcttcctccggtgagaaccggtcggagatgtttcaagcgttgtgcatggggaagcttatggagaagctcgaggtcgagagattcagtgtcgttgggacgagctacggcgggtttgtggcgtataatatggcgaaaatgtttccggagaaagtggagaaggtggtgcttgcgagctccggtgttaatttgcggaggagtgacaacgaggcgtttatcgctagggctaagtgccaccgtatcaaggaggtgatgcttcctgcttctgcaacagatcttaggagattctctgggatggtttcttctaagagactcgattatgtcccagattttgtcttgaacgacttttgccaggaaaaagcagaacttctcgaggggctgagtattgggaaggatgacaaaaccaacgtttctccaattcaacaggatgtaatgctgatatggggtgagcaagatcaagtttttcctttaaaaatggcccatgacctcaaagagatgttggggactaaggcgacgctaaaagttatacaaaagacatcacatatacctcaaacggagaagtccaaagaattcaatggctttgtcatgtctttcttattacctccttctccatcaccataa

SEQ ID NO: 97954 - protein, 300 aa, Arabidopsis thaliana
  peptide (1)..(300): Ceres Seq. ID no. 13578804
  misc_feature (110)..(291): Pfam Name: alpha/beta hydrolase fold Pfam Description: alpha/beta hydrolase fold
  misc_feature (1)..(300): Homolog of NCBI NO: 22326938 NR Description: hydrolase, alpha/beta fold family [Arabidopsis >gi|29294062|gb|AAO73899.1| hydrolase, alpha/beta fold family
  misc_feature (1)..(212): Homolog of NCBI NO: 13374854 NR Description: putative protein [Arabidopsis thaliana]
  misc_feature (105)..(300): Homolog of NCBI NO: 26451507 NR Description: unknown protein [Arabidopsis thaliana]
  misc_feature (4)..(293): Homolog of NCBI NO: 30689631 NR Description: hydrolase, alpha/beta fold family [Arabidopsis
  misc_feature (57)..(293): Homolog of NCBI NO: 21592805 NR Description: unknown [Arabidopsis thaliana]
  misc_feature (3)..(212): Homolog of NCBI NO: 24059850 NR Description: hydrolase-like protein [Oryza sativa (japonica
  misc_feature (205)..(299): Homolog of NCBI NO: 24059850 NR Description: hydrolase-like protein [Oryza sativa (japonica
  misc_feature (15)..(294): Homolog of NCBI NO: 15242419 NR Description: hydrolase, alpha/beta fold family [Arabidopsis >gi|9955530|emb|CAC05469.1| putative hydrolase [Arabidopsis
  misc_feature (7)..(297): Homolog of NCBI NO: 18411865 NR Description: hydrolase, alpha/beta fold family [Arabidopsis >gi|19699019|gb|AAL91245.1| unknown protein [Arabidopsis >gi|25084092|gb|AAN72173.1| unknown protein [Arabidopsis
  misc_feature (8)..(300): Homolog of NCBI NO: 27436745 NR Description: Hypothetical protein [Oryza sativa (japonica
MAPSFLSVARFVEALLRRRFSSAGLSLQTLSIDSETTIQFWGPPPSSSSENTQKPSLLLLHGFGPSAVWQWSHQVKPLSHFFRLYVPDLVFFGGSSSSGENRSEMFQALCMGKLMEKLEVERFSVVGTSYGGFVAYNMAKMFPEKVEKVVLASSGVNLRRSDNEAFIARAKCHRIKEVMLPASATDLRRFSGMVSSKRLDYVPDFVLNDFCQEKAELLEGLSIGKDDKTNVSPIQQDVMLIWGEQDQVFPLKMAHDLKEMLGTKATLKVIQKTSHIPQTEKSKEFNGFVMSFLLPPSPSP

SEQ ID NO: 97955 - protein, 196 aa, Arabidopsis thaliana
  peptide (1)..(196): Ceres Seq. ID no. 13578805
  misc_feature (6)..(187): Pfam Name: alpha/beta hydrolase fold Pfam Description: alpha/beta hydrolase fold
  misc_feature (1)..(196): Homolog of NCBI NO: 22326938 NR Description: hydrolase, alpha/beta fold family [Arabidopsis >gi|29294062|gb|AAO73899.1| hydrolase, alpha/beta fold family
  misc_feature (1)..(108): Homolog of NCBI NO: 13374854 NR Description: putative protein [Arabidopsis thaliana]
  misc_feature (1)..(196): Homolog of NCBI NO: 26451507 NR Description: unknown protein [Arabidopsis thaliana]
  misc_feature (1)..(189): Homolog of NCBI NO: 30689631 NR Description: hydrolase, alpha/beta fold family [Arabidopsis
  misc_feature (1)..(189): Homolog of NCBI NO: 21592805 NR Description: unknown [Arabidopsis thaliana]
  misc_feature (1)..(108): Homolog of NCBI NO: 24059850 NR Description: hydrolase-like protein [Oryza sativa (japonica
  misc_feature (101)..(195): Homolog of NCBI NO: 24059850 NR Description: hydrolase-like protein [Oryza sativa (japonica
  misc_feature (1)..(190): Homolog of NCBI NO: 15242419 NR Description: hydrolase, alpha/beta fold family [Arabidopsis >gi|9955530|emb|CAC05469.1| putative hydrolase [Arabidopsis
  misc_feature (1)..(193): Homolog of NCBI NO: 18411865 NR Description: hydrolase, alpha/beta fold family [Arabidopsis >gi|19699019|gb|AAL91245.1| unknown protein [Arabidopsis >gi|25084092|gb|AAN72173.1| unknown protein [Arabidopsis
  misc_feature (1)..(196): Homolog of NCBI NO: 27436745 NR Description: Hypothetical protein [Oryza sativa (japonica
MFQALCMGKLMEKLEVERFSVVGTSYGGFVAYNMAKMFPEKVEKVVLASSGVNLRRSDNEAFIARAKCHRIKEVMLPASATDLRRFSGMVSSKRLDYVPDFVLNDFCQEKAELLEGLSIGKDDKTNVSPIQQDVMLIWGEQDQVFPLKMAHDLKEMLGTKATLKVIQKTSHIPQTEKSKEFNGFVMSFLLPPSPSP

SEQ ID NO: 97956 - protein, 190 aa, Arabidopsis thaliana
  peptide (1)..(190): Ceres Seq. ID no. 13578806
  misc_feature (1)..(181): Pfam Name: alpha/beta hydrolase fold Pfam Description: alpha/beta hydrolase fold
  misc_feature (1)..(190): Homolog of NCBI NO: 22326938 NR Description: hydrolase, alpha/beta fold family [Arabidopsis >gi|29294062|gb|AAO73899.1| hydrolase, alpha/beta fold family
  misc_feature (1)..(102): Homolog of NCBI NO: 13374854 NR Description: putative protein [Arabidopsis thaliana]
  misc_feature (1)..(190): Homolog of NCBI NO: 26451507 NR Description: unknown protein [Arabidopsis thaliana]
  misc_feature (1)..(183): Homolog of NCBI NO: 30689631 NR Description: hydrolase, alpha/beta fold family [Arabidopsis
  misc_feature (1)..(183): Homolog of NCBI NO: 21592805 NR Description: unknown [Arabidopsis thaliana]
  misc_feature (1)..(102): Homolog of NCBI NO: 24059850 NR Description: hydrolase-like protein [Oryza sativa (japonica
  misc_feature (95)..(189): Homolog of NCBI NO: 24059850 NR Description: hydrolase-like protein [Oryza sativa (japonica
  misc_feature (1)..(184): Homolog of NCBI NO: 15242419 NR Description: hydrolase, alpha/beta fold family [Arabidopsis >gi|9955530|emb|CAC05469.1| putative hydrolase [Arabidopsis
  misc_feature (1)..(187): Homolog of NCBI NO: 18411865 NR Description: hydrolase, alpha/beta fold family [Arabidopsis >gi|19699019|gb|AAL91245.1| unknown protein [Arabidopsis >gi|25084092|gb|AAN72173.1| unknown protein [Arabidopsis
  misc_feature (1)..(190): Homolog of NCBI NO: 27436745 NR Description: Hypothetical protein [Oryza sativa (japonica
MGKLMEKLEVERFSVVGTSYGGFVAYNMAKMFPEKVEKVVLASSGVNLRRSDNEAFIARAKCHRIKEVMLPASATDLRRFSGMVSSKRLDYVPDFVLNDFCQEKAELLEGLSIGKDDKTNVSPIQQDVMLIWGEQDQVFPLKMAHDLKEMLGTKATLKVIQKTSHIPQTEKSKEFNGFVMSFLLPPSPSP
